United States Patent Application Publication US 2025/0297208 A1 - sequence listing, part 10

SEQ ID NO: 1771 - DNA, 55644 bp, Xanthophyllomyces dendrorhous
gtagtagtagtagtagtagttgttgttgttgttgttgttgttgttgttgttgttgttgtttttgtcattatgatgtttcgtttcatcatattgtgttaaacacccggtcggttatcatgaattttcaacaacaagaagagcgtgagaaacccaatgtcagcaaacatcattacacacacacgcacgttcctttctctcttctctcctctctatctctacatatcgatgctcattcaaactgaccacatttccaagtccaacagtagcccgataagctgcttcgccctctgactcgtctacgatgaactatcgaacgcaaccatagccgaagaagaaacgaaaagaaagagcctttttgtcagcaatgtcgtctagatcgtccggatctagaccagatcgagagaatcgaaagaaatccatgtttaccttgcagagtgtgttcaacaggaccgggccgatattcgacttaagtgacttactagagagtgtcaggatcgaaaagctaagcagaagaagaggcggaagagtggagagagagagagagatcagggtacagtctagacaagatctcgggacgtcccgtctatccagctgtacacatgcacacgaatatcgaaaactctaaagatactcacttcagaagaatagtagaaatcgcgacccgaacgttcttgttggtctgcccgatagggagctcgctaaacgaacgaagaagctgcagatcgtaaaagaagagagtcggaagcctccttgtatcagtaaaccgaaaacgacatcttgcctgacctgctcgatgtcttgatgaaaacacgtagaggcatagaagacctggtgaacgcaccttctcgatagtctgtccttcgacgagcgcggcctgtccgttcgccgtgctgaacaagttggcaagcgcacggaagccaagcatcgcgttcgtctcctttaccttattaagctcccatgtcccatccagcggccactcaatcacgctcagtatcaatgccgggatggtcgccggtccggatgtcgctcggtacgcagacagactaggcgagatcggcgcgagtagccgcaacagatccagaactggcattgagaaccccaaaaagaagaaatatgttccttagctcgcacgcgaaagacctcaaaacagacatgcccaaacacatacctggaaaccgtttctccgccggccatctagagagaacgttcaccaacgatcgcacatcccatccttcttccgcctttttggttaaaggatcaggcagcgccccaagaggcaaccccaagaacgcgaccacgtccttcatcgccttcgtctcctccgagttcatctccaacccggtcccggccgcacgcaactcttcgtcgagctcgaacagttttttactcagagcagccacgttcgcttgtttgaacgtcagatacgtcttgaccggtagcacgtccgtcggttttctttcagaaggggcgatgacggtagcagccgacgggcccgaggagccagtatatcgagacgtaccggtgtacggatcgacatatgttcccgtggcttgatgagtgggcactgagctagaagatgctcgatagcgagaggcgcctgtgtacggatcgacatactcgtttgacgcaccctccccgatcgtcaccttggatgtgttcttctcgatgaatcggacgacctcgtcgatgtatgacaccggaagctcattgcggaccaggaacgcctgggcagcagcatatgggttttctgtgtcggcaagaaatctaatgtcaatatcattctcgcgccattccagttgtttcaccctagagagaggaaagtttgataaaaagagaagaagagattgcttctgaccagacgcgttgtagggcaatttaagaggaggctgtccttcagcaatatcgacatcaaacacatagtcgtattcaaccccgttgtaaagctgctttcggccagaaccaacagcatcgacgacctcgccaatcttctgccacacaccgcttccactcgaccactgattggtagttacaaagatacacaacattggttcagtccggtgtacagctaagaggtccataacgcttcaagaaaacaaacctgataggcctccacaacgttcttctcgtttttgaccatgatcacttgaccttctttcgtacctagaggaaaaatggacacatccagagtagagcaagttaagaatcagcctcaaactcgctcacaaggcgagtctagtggggagacactgaccgtctttagcaagcgcctccattccaggcacgttctctttctttacatctccaacttgctgtctatgcgatataatatttattttaacatagaaaaatcggtggtggcctcggttaattctctgctgtaacgggcgctatgtgtaagacagagaactaatacgtactgatcaaccttctgcttcgatatctcctcctcaagagccttgatttctgcctctggagccactcgactcgcactccttgtccaaacgcgcaccacgccgtcgctactaccggtgataagatctccgttcgaagcagctgccacagtccaaacgctagtggccgggtgggggattgtttggatgttcttaccaatctcggaccaaattctcagagttcgatcctcggacacactggccaactccggtccggcatcaggactagtagcgggaatgacagcaaggtcatagacaaaagaggcgtgaccgtgaagatcgatgattctatccccagagagagaccagatgatgattacactgtgtacaaagaaggagttccgaagggtatattagatcggcgtcgaaagggtaacagtttgtatattggaatggtcgagaggacgaacccatcattaccgcaacttgcaaacgtatctcctccaggaattggaaccaaaccacgcactgcgtctgcatgtcccaggaactatcaagatatcccggaaagtaaagaagaagaaaaaaaaagagatgagttggtcaagactaataacagaaatgattgatggtgcacgtgatctggacgctcgataccttttttgattctttgaacaaaccgtcagcacccttggtccacagaatgattgacttgtcggccgaagcagtaagaatttgtgttggcgagatggatctcacggcccagaccgtctgagagtgacctttgagaacctgctgctgctggaagttagcagaccagacaatcgctgttctatgatcgagaactttagtcattagaaatgaacgcgtcgtttatccaaaacgtagcgatcaaattactcactgatcccaagacccagagactagacacgaatagcagaatggttgttaacttgaccgaaagtgagtgaacatcgaatatggcttgatagatcagtcactcacctagtccgccaccgccgacgagaccatctagacagcagacgttggctgaatggccgatcagtgtgacactgggctcactcgaagtcgtctgttgaaagtcagtaggtgatttggaggcaaacccattgggggctgcataggcactgataagagagtcctgagagcccgtcaagatccattctaacagacaggagaatagaggtgcgtccgaagtcaacaggtgtgtctgatgttgcagagtagaaagaggaggggaacagaccttggtcattgatgacacctgcccaggtagagctaacgaaccctccgaagccgtcccaatgcctgccggcagaccattcggttccttctttggtccaggcgatggtcgacttgtctctggatgttgatacaatcaacgtgggtgaaggagcagaaacggaacgaacctgaggttgaaaagcggagctatcgtcagtcacagacgtgaatgcaaaaggacggcactaagaaaaacggatgagggaacagacatctgctttatgacccagaagggaagacgagagctgaaacagatctgggttgttcattatcttacaagaaagattctacgatgagttgatgagtggaaaggatgcttggtaggtagcgatcactctctttactcggtagaacacacctaagtgagatggagaggaagacgtggagactgatgtggtcattgttcgatgctagggttatatattacgtaagtgtatgtgccttgccggcagctgccacataatgactgtagccacaatggacactgtaaccattgtgatatccagctgtcggctccgacttcaacggacttctccacggagcaagcgcagcagccgagcccgttccgacggatcccgtccgaggtcgacggtgataaggatcggggcgagataagcaaagcggtatgcttataagcaacatggtcatctcgtcggtcttgatcactcacacacacccattctgcttctttgtttcaacaggttcctttgcttgatacatcctcacacatagcatacactcacatatatcattcataatggctaccttatccgttcaagcacttcccttgcctccttcggccaacccagcgttcttcagctctttcggtagagaagtaaagggcgtcgatctggatgtcgcctcagatgaccaactcgagcaggtcagtgttcgccgccggtgatgtcgctttctgtttgactgtatgttgtacattctatctgaccctgctctgatgttcgttttgaacataatcacctccaaatagatccagaagctgctctacgaagtgagtgcctgcatctaagaccgatgaactgaattgaattcatcgcttacctcgtcgccatctctaactcaattccctttctagcactcttgtctcttgttcaaaaaccaaaaagtatctcccgagtctcagtataagcttaccaaggtttgtgcgggtttatcttgcatgcgcgcacacccaagtcttctctgtcatgcacacgttctgatctgcgatcgcatcggctgactccgaatatcccgtccacctgataggtctttgaccccgaatctgatagatatgggcacgggaacaacaagactggaggagaaaaaaaatcaatccttcaccctgaccttaagactattcctcgacagcctcaggttcaggttcgttctccaagctcccacttattcctgtctctgaccgtttagactgctgagcattggaaatctacccatcacatctaggtcatcggaaacggaaccgtctacgaccatgagggactccctgaagcaagactcaagcacccccaccacaagacgttccacaagacggccgtctcgcccgaggatgaggaggcaggtgtgactcgattctacagatggcacatcgatgccgctctctacgatctgtctcctcccaaggttaccacgctctatgccctccaggttcccaagggagagcagcagacactccgatatgacgatggaacaggagacgagcttaaagtgcctctcgggaccacagctttcgttagcggacacaacatgtttgaggtactcagtgaagaggagaagagtctggccgtccgacttggtgtcgaatacgctccccacccttacgtctggatgtcatccgcccacgctctccccactggtcttggactagagtctgagggactcgaactcgacttgaacgatctccctccttggtcgcaagacaagatcaagatcttccctgccctgtggaagaaccctgttacatccaacctacaccttcagatccacccctccgcaatccgagcgcttcacatcgctcctctcccctcaaccgcgaagcggacaccggaatcgctattcccagacggagccaccatcacctcgctcccagaggtccgttcggtcgtgtatcgactccagcggcagggaatccgacccgagttggtctacacccaggattgggaagacggagatatggtcttgttccacaacaggggtgtcttgcattcggtcgtcggcgcgttcaccgaggatcaggtcagggtgttccatcagtgcaacttggccggaacgtcggatccgtgagttcttctttcttcgtcgttctcctttcctctcctgcctccgtgttcatcgggctgactgagtaaatgttcttgttacttgttttctcatcactagtgagggaccgtccgaggaggatatcaaaaaatgggcctaagaatgaaaacaaaattgcttcttcttgtcggccaattgtgatcatatttttgctttagttgtaagatgtttccagagtctcagattcattgtattttgataacgtcctgttcatgcttctttcagtcttatatatacatatgttagttctgtcctcccggggggggggggaaggattgtttctcaattattcatatgatgcttaatcaagggttcgttcctccaagtggttataaacatccaacattcagacagatcaatgccgcaaaaataatacacatgttcaacaagctcggtcgcagatcgatcatcagatgtcccctgccccagatgcaccacctgatccatcatcttgcccagacttgggcttccgactgagcagcgcaatctgacgttgcatatcgaggatctgcttattgtgtgcggcttgctgggcttgcaacgccgcttgaacagtagggtcattatgagccggctgacgaaccgacacatcccattgataaggaaaaaaaaggggaaaaagagggaagcacttaaacgttagacacgatgtaagaaactccctagcaacaagcaaagggacataccaaaggaccagttgagacccctccagttgggagatttgactgaggcgcgtacccagccgggctcgttccgtacatattgtacatcggatagctcgatcctccgtaaggtaattgaggttgtcccgagggcgacatattatacgctgcttgataggcagcttggtacgacggccggaaacctcctttggcgcctggatgggacggatacatcggcattccaggctggaacgactgaggtcggtatactggttgaccagggttgaatggaggttgacccgaagagtagctcgggtgtgaagaggaagtaggcagagtagtgggaagggaaggaggagcagaggtagaggtagaattgaattgaccagtggcacgagcaatggcgagagacgtaggagacataggttgcccagagggttgttgggaaggaggcgattggggccgttgaggcagaccgtgggtgggttgctgaagtcctcctcctgggtggttcatggcttggcctccaaacgcaggtgaagggaagccggggttggagaaagacccacgagaccctgattgtgctcctacaagtcctcctctgcctcttcctcgattcggcccgcctctaccaacaccttgcatatttccgcgttcacgtcctctccctcctctggtactcatctcccctcttctgtcatcctcatcctgttttggacccttcttcttcctttctcttgcccgcttcttttttcctcctccagctccatcggctccagcggaaagtccagccccaagatccagatcatcataaggtgccggtagggctcgaccgggcagagcagggcccgtactctcatcagaatcatagtcaagcacggtagaagcatcatcgtcatcagatcggccgctgtaagctgattcggcgtatgtcgagccggctgcagagtaggctaccggggggaaagtgctcgagagtgaaggggtgggcgatcctcggttagatggtgctcgagagtttcgactacaagatagaacggaggaatcatcgttcaaacaaggaaagagatttcacagtcagacaacgatacatcgaaatagacaaggaacgatagaaacagaagctgacggacctgagttttcgtctcttcttcgcctccgcctcgagttcgtcgtcactccactccatctcatccgcgccgacctcctcgtcaaacttgttactcgcatccgtccatttttccaatctcaaccgagcagtgggtacgaaacgacccatgtcaaccggataatacaccagcattccgaccaaagctgagagtggaacaggaggttgagcttcctggggtacagagatctcttgcgggaccgaagttgactcaacgatgggttctgatatttcagcagagagatcatcgtcgctagttttgggggagggaatcgaatgtggcgtagagtttgctggtggagaagaaggcgcaagatcagcggtaacgagagcctcaacttcagtctcggctgagctaggagaatctggcttatcggagatgaagcttgagacttcggctaattcggacgatacagaaatctctggtagagtcgagggaacggaggctagaagagacggaggaagcgtgaaaggtgtgggaagaagcatagtgtacaaaggagaggcagtcggaccgaaggtgtcttgaacctaaataaattgtttggcaaataagcaacgctgagctcctgtttctgttttggagagttaatgtgaagaaaaggaccttaccaatccgagcactcttccatcctcccaacaaacgatagtgttctctccgagcacatcctctcccttcttgtctacacattcgacaaccaccatctttcccaccgcacttttgattcgcccaagctccctcaaggttgattctggatcgactctctccataggcaatggcggggcttccacaggaggtggaagttcattggcggaagcaaaccttgtcgtgtctagtccttcatcttcgtctgagtctaggattggatcagctgacgcaggcgaaggggaacgaatgagagacttcaattcacgaagatgcttcttgtgaacggatcgaggggaaaaaggcttggtagcagagctagatgaagagtccgagtctgagtctgaagacgaagacgaagaagagctggaagcagaatcctcatcgcccgacgaagaggatgatggagaggactcgatgtcggagctgtcaggaagaaattaagtttcaaataggttcttatttcgtaggaaatatcagagaagaagtagactcactctggaccattcacagctccagcaagggcttgttccactgcgccttcatcgacgccgaccatctcatggataagtttcagatccagaggaacatccgtagcggaggaagtagagccctgtttcgagggaagtgtaggtagtttaaacacagatggaggagggggtactgctgtcgttgtcgtcgtagtagcggttgtcgccgctatcaccgttcgggccgatggagggataggcccggtgtgggaaggagaaatggctgagattccatccataggctcaacactaggaaacaggatacaagacaaaataagcgctcagctatagatttgtaacaatcaaacagatgcacaatagacggttcatacctagttgactcaacatgttcactagagaccacggtctctacagtctgagcctggctactcgagatttcatcggcagcagaagcgtttgtcttggatggagtttgggagccttctacctccgccaaacttcctatcgagaggtctatctgagtgtcctgatggacttcctgttctgtagacatgtctaggtagttgttgtatagataatatctgggacacactctcgttcttaccgtatccgttgaaaggcaagcttcaaattagtgtggcaagataaggagagctgtgttcgacgcgctgcacgtgatgacatacatcgctacaaagcacgtgcccatagccaaaatatgtagccgtaaccaacgcctctgccatcaccgtaaccatgtgaggtgagacagatcacctcgacttccaccgaatcagtcttcccgttctcttctaccttccatccgtcatccccatcccccatcgcatcacacagcttgttaatcactccttttactctaatttaaaccctcgatacacatatgaagacttctacagctttggtagcagccattgctactgcttcctcagtatctgcggccattcacaagtgagagaagtctttcctcgttcttggttcttccctttccgtccaatcatttgatctgaccactttgtcctcctgttctcttctctaccttttgttcatcctgcccaccagactgcccttgaagaagcttgatcctcagcctttgtccgttcgatccgtcgaccatgagaccgctttcttggcttccaagtaccttccaggaggtcttgcttctcaccaggcggctcttgtcggatccggtggcaatggacgaaagctcaagtcatccaacaacgccgatgatttgttttggacccaggaaatgatgaatgagaagggtcaggccgaagctttgaagggtggacacggtgttcctttgtccagtgcgtattgtttacttgcatctcaatgggcattgatcacagtgagacgtcattggtggcggttcaaacctgatcggcattgacaccgtctgctttgatctttccttaacgtcagactacttgaacgctcagtactttgcagagatcgagcttggaacacctccccagcttttcaaggtcgttcttgacactgggtccagtaacctgtgggtgcctggaaaggggtgctcttcgatcgcttgcttcgtacgtctattcttctataatcctttcgattcactcatctcacccgttgcctcatttataatcatctctagttgcatgccaagtacgattcttctgcctcgtcaacctacaaggccaatggatcctccttcgagatcgcatacggatcgggatctctcgagggtttcatctccaacgatgttctcagcatcggtgacatcaccgtcaagaagcaagattttgccgagtccaccaaggagcctggacttgcctttgctttcggttcgatctattttttttcctcatcaatccatgaaatcgagtgctggatctgacgacgtatcatgttctttataggcaagttcgatggaattttgggattggcctatgatacaatctctgtcaacaagattgttccccctttctacaacatggtgaacagcggtttgctcgacgagcccgtgttctcattccgaatgggatcttctgaggaagatggaggagaggctatctttggaggagtcagtctttcggaaccttatgcttttctttcctgtatcctaacgctgtctctctcttccttctttgtgtgtaggtcgatgattccgcctatatcggcaagcttgattatgttcctatcagacgaaagggatactgggaggttgagcttgaaagcatcaccttcggagatgataagctcgagcttgacaacaccggtgctgccatcgatactggaacctccctcatcgtcatgcctgtcgacgtggcagagatgctgaatgctgagatcggcgccaccaaaggctggaacggagcctacactctggactgcgcttccgtgccctcccttcctcctcttactttccagttcggcggaaagccttacacccttgctggagaggactacgtcttgaactctggaggaacctgcatttctgccttccagggaatggacatccctgcccccttgggacctctttggatcgttggagacgctttccttcgaaagtactacactgtgtatgaccttggccgaaacgctgtcggctttgctccttccgcttaaagagagatttctttacgatgttctgtctgaccaagaactgagcgttgcgtcttgctgtctttttgatcgcctgtgtgtgatgttgggtctcttctcttcgttcgtttcgctgtgttgtctacgtctgcctttttgtattctcgttccttctgtagcctgatttattatgaatttgcttcgctataagttgtcacatcaccaacgtcgcatttgttcttgtttctatgaataagaagagaaaagtagacaagcacgagaggcgcggacgatatgctgttcgttacagaggcaaaatgagaagatggaagaacagggagggaaaggccctggttcttgcaaaaagtctcgatttaagaattcttcttttctttttacataaacacatagtgagggtggattggaaataaagaacaacgataggaaaatgacgagaagagagaaggagagataggaaaaatagaaaagataggagagataggagaatggccgggcgagtttttctttttcgatcctgtccgtctatacttctatacatcgcctgcctcagcaggggtcggtgctggggcaggaatgttggcaggtgtaacaggagcaggcgtcgagccaggaatgatcttttcgccaccactttctgtcttggagacgagtctgtccgatatatgggtcttctgctcgagacgggacagaggagacacaggctagtcagttgcgagacaacccagcgaccgaaaggaaaagtctcaaagcaggagaaagaatagaagggagcgacaggaagaagtgaacaggcttacgggaacgaatggtttggcgttcgcattgaaaacaaccgatctgttggctcccgccggccttgtcaacgacgggttagaaaacgtctttgaatttgaggtagagtgggcgtaaggatggtatgttgtcgaccgaggggcgggcgcagttcgaccgaatgggtgggtgtacttgcaatccgctcgggtacaatgtgacttgaacttgcaaagctttccactggccgttaacggtccatccagtccccctatcgctgctgccgtcgtcgctgacgaagccggagcggccaccacgccatccagatcgccgatccctccgttgcccgttcctttcttctcttttggcttctccgccagagccggatttgccaaagcgggtggcgccgtcggctggccggcggcgtccacatgaaggaactgacaggagggatttgtgcagttttggaacttgcacagtacctgtgttggaccggtgtggtcggctgaaaggacaagaatatatgaatataggaaatcgaacacatgttgatataaataaggaagaagaagaaagagaaggagaagtggatggagaaaagataaaaatgaatagaacgaacctccaagctgagccgggcttacgtagctcttgacacactcttggtccttgcaattcttacctgcctcacaagcctcggtgctcaacaccaactgagtctgtggtgtggccgctggtgacgggtgagaatatgtgcatgccgcgttcgtgcatccgagcgcaaacttgcagagatctgtctctgtcggcttggtcggaagcggggcggcctccttggcaataaccggtacgatcgcttgcgaggccggtccagcagcgccattggttcgacgagggttgttgttgttattgttgttgctgttgttgttgttgttagcattgtttcggttgtttcgattgttgttgttaccagattgttgagatgctgccaactgctgcatttgctgttgcattgcctgcatttgggccatctgaaccatctgttgggaagaaaccaagggatcgtatcacgaacaacgagaaaaagcatagtcagccccatcctcgaagcttatctgaaagcttgtgagtggaccttgacatgacacgtcaagaaagaaaaagaaaaagcaacagaccatcatctcctgaagacccatccccatgcctcctcccatcatgtttcccatgaacgcttgaggatccatcatcatgttgttcatcattccagggttgaatccaccctgcatgccgagacccatatgttgctgttgctgctggaggtgtaagggaatctgctgtacttgtcctcctagaggcttcggagcgctagcggcgacaccaccggctcttgttatcgaatcgatcttttgctgcacggaatcttgacgttgacgggctagttgagaagaaataaaaagcaaaagattacataagtaactaggaaggatatcatagatatcatagaagcaggagaaaaatgagacgagaaccgagaaacacaccatcgttggcctctttaccgcctagtctctccaacaagttctttgacgcgtccccagcggccagtttcctcgggcctgatggcggagtactatcggacacgcctccagagacccgtctcttggatgagggttccgagccttgagacggagcgggcctcttctgaccgacgacgggagctggctggactggattcaaagctgacgaggagagagctctggcaaagagaccgttggctggtccggtaggaggccgacgactatgtggagggtcatctcgagctacttctgacggggcgatcacagtatctttagcaacggggacgggagcaggggcttctaccggagcgggcgagggttcaacattggtagtggtagatggagcgagcagttggttggtcgctctagcaaagagccaggtggtgaaggactcatctggatataacgcgattgatggcagaagaggtgtttgagaagcatatctgacatcagcttaacattcaattggatgcagttctgtttctgtggaaagacttaccatactgatctccaatgagatccatcaactctgcggtgatttgatcttgggtcttgctgttagcgagcatgacagtgatgtactgtcgttcaaacccaacacacccatacgtcaatattatcggtcagaacggttccgaggaagagagcaccaatatgacacgtacctcggccataacaggatctacgtcgcgaggaagaaatggattccgataaataagaatctaagagttcgcgtatttgcagagaaggagaaggagaacgagaggaaaaaggggagagctatcgacggggagcttgggcaaacgggtgacctaccatcatcaggcgcgtactcgaacttggcaagctctgcttgaatggaatcctaggtatgggcaatcgaccatagtggcaagagaaagcagggtgtgaacgagaaaagagaccagagaaagaaggtggatggagatagcaatggggagtcagtctctgatctgaaagataccacactgagagccaaaaagaggacaaacaaaacacgcacctgaagctcctgagcgtgagatgttcccatggtgacctgtggtgctggcgacatggtgatggctgatggttgatggttgatcgttggtggtggtggatgaggtccaagacacggctctcatagatttcctgtaggaagcctggcgtggcgaaataaatttgtaataggaatattctgtagtcggatgactacgagagactacgaaatctgtagtgttctcgttgttcgagaagtcctagtccacggactacaacgggttctagtcgacggactagtaaacagatcgggagaataaactacaacgctctctagtacgttgactagaaagcaataggcgagggttttagtcggaaaacactacaaacccaagctagagatttcgggaaaaatctctaatgaaaccggccggaatattctcaccgccaaacttgatcatcccgctcgatagcgtgaagcaagtcctcagctaacgccagcttggtccatcatgagcatcgtaagtcaggcagacagtcaggaaggcgagggaggaggaatggaaggaagcaagcggggatacatccatccgctctctgttcagtcttgttgacagatgaatggtctctctctatctctcaccaaaagtcttcgttcgacccacaatcgttgatccctcgggttaggtccattctagaaggggccgacctaagcacagtgtgagctctttctgtggtacgcgcgttccttctctcattcaggtcttggcttacgcgatccgtccttcctcccaataggtccgcacgtcaggtccggaaacagttatctgaacaggatcccagtttgactcctgatctgttaaaatctcacaaggatgcgattgacgatatcgtacgtccattcgttctgttcccgcgtgcgttcggcgcaagcgcatcgtacattggattgatccggttcatcttatttccggccatgccttgatacgttctcctctttgtcaggtgatgaccatatttgatgctctggccgctcctccatccgagtcttcggatgataacgacgacgacgacgacgcgccagaaagtccccctcgaacaaagaagcaaccgagttcaacatccgactcctcagtaaagtcaaaggccgaacctctctctgatgctcagctcgctcaacaattgtccgaccagataaacggtgccccgaatgcccgctctacaagagcatcttcctcatccacctccaagactgccaagggaaagggaaaggcgaaagcaagcgctagcaagacatccaaaacgaatgcatccggttcgtcaagatcaaaaaagaacacggtactctctcaagcgacgataggctcgtccgacgatgaagaccatccagatggaacaaagaaggcaaagagaaagcggtcgacggattccgacaatgcgccagaggcaaaaccaaagaaaccaaagaaaccaaagaaagaacctaagtcagagggcgaggcggacggagagcccaagaagggcggagtgttcatgaaaccctggggaatgagtgcaccactatctgctctccttggcggacagtctcaggtaaattccatttcctcagccagattcgtcttttacgaaagtgagagcactgaagattcttctcctgttcacaaacacacccagctgcctagaccccaggtggtcaaacagatctgggcatacgttaaagaaaacaacatccaagttggtccttcctctcttcccaagttttgtttacaaggatcataaccgaacgcaccctctcatttaggatccagccaacaagagcttcttcttgtgcgacgaccgtatgcaagccgtgttcaagacacctagagtaagtagggaagacgttttgcctagtactccagttcatagtgatctgatccctgtttccaactaactgttgtctccgttttcttctccctcctccttttcctcttactctttttttcgtcgaaaactattaaagttgcatgtacgttattcattgtctatgatttatccgtcctctcttcccttcagttcttctcattgattcccgctcttatcaatctacagatgttcacgatgaacaaactcctgagcgatcatctgtatccggtcaaagaggcccagtcataagaatccagcctccctttcgtttgtctacttgtcccaagggattcaacatacttttcttacacacacattcatatatatatgtatctacatgtacagcctcgtccgcaagtgagaaaagacagagatagaacgctggacagagacagaagagaagctcctttattcgcaattgtgttctattcaatacagagcaggctgcatataaaagagccgtacaagctctctgtattctatctagagagcgtgatctcggtatggttggttcgatacatatacagtatatatcatatacacgactcccctttagagatacacatgatacaatctcgattgcatcaggactcgagagaatacttctcccaaggatgatttgaagtcctctcagtctctcccttctggaacataatctaatttagccgagaggagcaaagagatcccagtgatatagatgagactggggagggtcttaagatctagatcgagaaacgatacgcaacaactaaggtcattagcgtgtgttccgatggaagagcaagtaataaagatatagtgaatccggttctacctctcatgtgtgcgtctgtccacttgtttggtccgtcaacctatccaacgcgtcctttagcttgatctcttcctcctttcggttcgacagccattcagctggagcagtatgtttcgtgattggatccagccctatcagcacatgatcttgcggacaagaggggccgagcgcgtagacatcttcaggagcaggagagaacgtaaggagatccctatctaggggaaagtcacaagactctgataggcatgaagataaggacaatctgcgactcggccgagagactgatttcgaaggagatgagcctgtaggagttatgggacgaggcagcttggaaggtggtggagattccagaggtcgaaagctgtaagcaggactgaagtgagaagcagagtgatccttgccgtcggcctcgttgtcttcgtcgtgacctgaagattcagacagagacaaagatgttttggcttctcgcttgttccacctctcccgtctgttcttgctcttccgtccagggcttcgagaccgtttgtttttccagtagagttcctccttccgcacgcgtcccagaacattatgtctatctttatccgtttcgagttctgcagaatcccatccaggtggcaaggcctctctgtccccttccgattctgtttccgatccttcccctagcttccagccttcttctaaagccaaaagaattagacctctggcgagaacgacgagatgatcgtcgtccctgtcgacgacgctggctggactgatatctgagaagccagcagagacccgaaagcttaggatgcccaggatgtacttgacaacttcaatctcttccctccgtttctcgatatacgcgttcgatcggtccgtcaaaggtggaagcggaggtagatcaggtagagcctgacggagcgtcgacgacaatgtctgaaggagaagatgaggggagaacgagcgcagagtgagaggcgcgtctaggggccgggcgatctgtaatgtcagcagcagggagttgaacgctgggatcagcggaggcagttcagtcgagctcgcaagtaagcacattatcgtcagctttgatagatatgatcagcgtgagaacgaaggtccatagggtatcgctgaatggatgatgatgaccaaagggaagagagggtgaacgaaggcattgagagaaaacccaacaaaaaaggaaacaccaacgcttttcctttcaaactcccatcgtcactctgtctcgttccatttgaactcatctaaatccattgctctcccatgtctcatccttcatcggccccagcggcttcatcctcacagatgcctgctcctcctcccccttcgtcagctccgaaacgtaagatgactgagcaagacgcgctcaaacattctaagtaagtctttgttcgcattcgtcgcgttccagttcttatctcactgttcttctttctatcctttcgctatcattcttctctccaggcggtttcgagcccatgtaccccctctaccagtcatactcaatataccggagagtagaatgtatcaggatctcgttcagatggaacaaaagcttgactggacaatcacaaggaaacgtgcagagattcaagacgcggtcgctagaccgacaaaggtatgtctcctcttctctccgtcactcttgttctactcaccccagatatcgctgctcttcctcaagagccgctccctggaattgtgctctgcggtagatgtagaccaggaatgatcatagctgagctcattggatgcatgcctttctgaactccagacaaagcgacagctgaggatctatctctccaactcctgtgttctcccagagacgtcggatgtttccggtcttgaccgttcacctcccaggagttggactctcaaaatagaaggccggttgatagacgttcgttctctctctctcttgatgttggtctccgagatttctcaatgcttgtatctgaaacacttcctctttacggttgtcgttctgatgtttagagtggaaacccaagacaggacaagttgacgaaaagaaagttctcaaccttcattagatctattgtcgtggatctgaagggaccaaattatacaatggccgggcctactaatgggaacctcatcgaagtaagttcttttgcctatgtttcgctacagaacactttccctttaagtctgacaagcatctgtcgtgccttcctttattctgtcttaatcagtggtacaaacctccttcgcatccccaccaggacggatttaccattcaacggcctctatcgccctcacacgattcatcagaagggcttccctgtcgaatcttgatgcagctcgattacgatccaccaaggttcaaggtgttgcctcagttggcagacctgattgatatcaaggaggacacgaaggcgagcgtgttgcaggccgtttggaactatatcaagatcaaaggtctgcaagacaaagacgaccgacgaagagtcagaggagaaggcgcatttggaaaagtttgtctgaatattttctgtcagaatagctgttcgcaaaaccgtcttgctagccaggagtctgatccgtgatgtctgtctcttgtagcttttcccaaaccagccttccatcccgatgcacatcttaccagaaatcatcaatcaatatttgacggtgcctgaccctgtcgtcattcactacaccatacagacgaatgttgaaaagtatacccatccgagatgtttcgacgtagaggttgaagtcgaggacactaacagatctcgaggaaacgctatcctagcgagcttcgccgaggaaggagcgaaagaagttgctggtttggaagaagaggtttgctcccttcctcgctttcctgttgcttgtcttgccgttctcactagggtttaagttttctctgtctctctgcgtagatctcgaacctgtcaattgcaattcggaacgctcgtaccaagagagactttcttcaatcattttcaaatgacccttcaggctttattcatcactggcttgattctcaggctagagacttatcccttacattaggtgtggagagccagggcggattccccaatagagggctaagcgcggaagatttgagacggagcgaactgtttcatttgccatgggtatgtttgaaggtttccttgtctgaagtttattggcgaaccaaaaaaaccgactgagctgatatctcttgctgtcgtcatcaattaaacttcacaggcggaggaagctactgtgttatacgacggagcaaaactcatcgaattacaacttaaagctcagcagcaacaacaaacccaacgtcgttgatctgtctccgtctccctcccgctctgttgtcatttgtataaatcccttcgctaccggtctttctcaatcgcctatactccttttctgagtgactgtccgacttgtacttttcttgcctgatctatccatggccttctttttatctcgtcgtgcgatggaaacccttttctctggcctgctgacttcccaaaatacttcatgttaagagcaaaaggacgttcaatcactatcccaatgcatctgctgcaggcgttcgtccacattcgcatctccttcccctgtctgctcttggtcgacgtccatcatatacgcttcttgttgtccgtcagggtatccgttcgattgatgattaggttcgagattttggtctagcaaagaagggtctatcaactgttccctcacttgctgtccgtctgtgtgatttaagaatgaatgggtttgatccatcagagagtccgctctaagtgatgggtctactagagaagggtctatcattcctctcgatcccgaatcccgtgcctcgactggctcgtctagatggcccatcagaccatcgagggatcgcccgttatgttcagatacatagggtgaccattcaggaagttgggatgacgagtcgtgattatgagataacgtatcaatgagtgatgtgaagccctgcacagcttcaccatccccaatctcgatttgttggtcttcgaggaggacatttccctccaaaggatttagttctatcggatccgttgattgatcaagaatagaaggatgagggtggtgatcatagttggtggtggaagtccgtagtctggatcgagatttacgtctattacttggagtagaagtcgaagctgctgatgatcgttttgggtcaacgacttgccagcctgaaagatttcggtcgtctcctccgtccggacgtgtccgttcgattggaatttcatcttccgagtagacattcggtcttgcatcatctgacgcgtcttcctcttcctcctcttcggcagcggcattttcgtcatccgtcaacgcaccgttctcttcgtcttcatccatatcctcttcaccgtcttggtcatttccgttcgcaccaccgggaggtcccgataaatcgcttcgcgttcttcccaactcggccggtcgacctcgcggtctacctccgctaagaccgtattttttcttttgtgagaacgagctataggaagacgaagccgacggcccgtctgtgggtacggtagggttgtaagtttgtggtgtgaattgaatagtctgaagagaggggagcatgggatttgtcgaagagcctggatgcgtgtaatgggcggaatgtaggtgtcagattgtatgaagaggcttacgaggaatacacaccgagtagaaggtacaacgattacgaaccaagagccggaggagtagacaaggaggaggaagaggtggatgggctaccaaatatcatttcatttcctatacgttccatcagttttcctttgaagagcgtattattgactttcaagaatggggtgggtgtattgagaccctgttcgaagagaaagacaagcagtctgtcaatcagctgaagaaaccggaaaataaacaaaagcagtcagacatacaatcagtgaccatgtatgtgatctcgcgagctcggcatcgccctgggggctgccttctatccgtctggaagagctaccgttggaattattgtcggcattatgcctagatgagctttcagcttgaccgttcactggacgagagaattgggtcgaaggttctgataccggagcagaagagtgagcaggaaatgaaggaggagatgcaagaatagatgtatctagcgcttgatccagagaaattgttattatctcttcctaggctttgcagaattgcgaagggaagtgaaagatcagaacggcgaaacaggcgcgaggagaggtgggataattacctctatttccgagtcccactcttcatctgaagctaaatctcgatccgagggtccaaagtgagtaactggaacaaacgttggaggcaagagtgaggccatgctcgatgatggaaggggatcactatgatgtagaggtgttgtagaatggatggaggaagtagagacaacagttgatgcatcgggggtcatcgggggtgataatcagtcgaagcggggattacattggggttatctggggtcacaatttggggtacatctggacgcacagactcaggttctcttctgtgcctgttgcgtcaccgtcccttcgatcgttcctgatcgtaccttttcccttttttttctttctcattcgtaccttttcctccatcatcttttcatccctggtctatttttcccatcccgcatctccacccagtcaagacagagctcttccgatgacggcgaagacttccagtgcatccgctggaacgagaaaaaagaaccaagcgaagaaggcggcaaagcaaggctcaaacgagcaatcctccaagtctagccaacagtcaaactcaaacaactcagggaagaccaagaaggagaagcaggcaaccaagctcaaacgaggagtccctaaaccctacaccccaccacccaagccacctcaaccagccgttcccgatccgcttgacgcccttggcttagccagtagcttacctgccgagttagttgttgtcctcagacggttaggcaagaaggacgagatcactaggaggagggcattggaagagtttgataactggcttgaaaaggccaaaaatgacgaaaacgaacactggtgggtcgaggttatcggacctgtctgggtatgtctaatttgaatcctcttgtgtgcaatttctctcaacgttcgtcactcgacttactcctctcgactttctggtttgctctcccttcctctacacagctccatcacctgcctcctcttttgttcacctcaaggcttaccccaatcactcttcaaacccaccaaacaattttgacccttttcccttcgctcctttccaccacccttccctacttgctcgagttccaacaacgtaacgtcctgggtactctactctcatcctcactccaatcttcctcagtcttcctccagacgttcatcaactctgtctcttggtctgtcaatgaatcgaccgagtcccagctggaattgaatagctatcttggtctcctgactgaatacctctcaagttctatactagatccctcggccatctgggagagcgtgtttcctcctgtcaagattgctagcgctggcgggcaaactaaaggcggaaatcagagagcagcgcaaagttacaagggccgaattgaacagggcggaaagaataacgccgggaagaaagaggaactcgaagaaagtgaaaaagtgttggaagaggaaagagtcgaaagagagcttggactcagaatcggaggcttggtcggtctgagttgggtcttgagaggtgagtcttttgtcggttatggtctctgctattgccgtatatccccttgtttgcttccctaatgatttgccttaccactttgcgttttcagaatatcctcagtctgaagagactggaactagtctatcagaagatctagtcgctcttctctcgactccttacctctggtccgctctctccaacactaccccaacatcggagacgtctgctcctcttgggtacggtcagacctcgattcggaaggctgcttgggactgtctgaaagcgttacttctcagatggcctggcatcgccaaagcgaacttggagatcttgactggagaaatcttaggaacttgctggaatgagtctgaggtggttgtcttgagttctgtctgggatcccttacttctatttttgactagtgagtcaacatcacggtttcaatccttggacttggctcaaaaagagacagatttgttgagcagattattctcatttgtctgaacagaatttcctgaggcttggactatcgaaaagaccatgaacgctgaggaagatcaaattcctgctgtgcaagagactgagcaggcaaataatgatgacggtaatcagaacgatgtcgaatcgaagatcgaatcctcgagatgtgcctctcctgaaggaggctctccagcatactctgctttccttgattttcttcgttccggatgtagaggagcaccagtcaatggatatctcatccttgttgtcgttctatccactttgccaacggaggtacgtctttcttcctgcacatttcctcttctttatacatacaggttcacagctttctcacttttcgtacaactacccaatcttttctgtttcctctgatctctcagattttccctctcacagagagctcgttcgatgagctctttcaggctatttgggctcctcttccttcgctactgtcttccagtattccacagattatcgagactctcctttcaaccgtccttgagaccgcgaccttcctttttactaaacaagcccggttgtctcctgataatgtagactcgtcgcgcaagttcctagccggtcaagttggtttgtgctgggatctaggtgtccttggactgcttcgtgttagagagtcagaagatacatcttcccgacctcgtagaggagtcttgagaggaggtagacaagcaggagaagagattggacttggggttcgagaagctagagtactaggcacagctttagggaagattgtagagatcgatcccaaagcaggagagctcggatggtccgagattgtctccaacaccctaggcttgctaacaggtccctccggtacccacgctgcggaggaagagcaaagagatgatgaggaaaatgagacgctctttccgttggcaaaactcccgtccgtcttggcagcgctccggacgaaacttccggcggagctcgaagcatcgtttattcaccttctaggagtcgttgggcgactgaccgtcggttcgttgatccaggagtttggagactgggaagaagaaaccaagaacggaggagaggaggaaaaagagaatcaaggagctcaattgaagaataggactgagctcgtattggagttgatagcgctcgaaagtctgggggctgttctgagggaagacgaaatctttgctagggtttgtctgctgtcactctgccttgatcttcacctgcatcttagttctgacaactgtggctgatggtttgctggagtatcaggttgtcgacgctcttcttgccaacgagactaccgctcttttctctcttcttccttcatccgcatctgccagactctatagagtctacttccactggagagccgagaaagaaccttgtgaagaatcttaccattctctttgtgacgctcttcgttcctcttcgagcttgtccaaggatgttcgattcccgatcattttggagcttactgcggagttcatggggttgcctatagagctagccgatggtcaggagcaaggcgagccgataggattggatgatgttgcgaatgtcttgattgaaagtctggagaagggcaatattgatgaagaaggagcggaagtcttggcttccctggtagtcaggccgagtatgtttcaatcatctgttgaagatctttatcttttacataacaaagtgttcatttatctgatgtgtttgcttcctatttgtgcccttctagctcccttcctcactccgacttcggttcgaggcgccgtcgagaaggttttccttctactcaacacgactgttcgaaccgtcttgttcgatgattcgtcccttacccgactctcccacctcgaacccattctctccttgctaaaagattctcttcctcaacaatcaatccaggatctgcttgcatctgacttatcccgcgatctagtggtatctctgttcgacactggacactttgttcccttgctatttggacaaggtcaggctgaggacgtgaagaacagtgctagagatatctggaaaacgttattgggacgcgcaggagatcaagaagatgagttgataaatttagtcatggtcgaagctcgaaaaaaattggaggatacctctagtcagatctcgtatgtcttttctcttgcttttaaacacgctcttggtgctcttggctcgctaagatagagatatatcttgtcagtgtcgagattctttggtctggattaaatgaggccagtgtgccttacgccgccagatccgtactctctcctttcgatctatttcatctactacctccggcatctaccatagtcgaccaactcaattccatcagcgtccgtcagcttcctcctgccctcgccgtgatcgacccattggttcctcaactttcagaagacgagattcagccatctgttgatcgagtacctacagactctgccggatttggatccttcgctagattagctaccactttaattgcctgctttgctgctgataggtctctgctaagacaagacccgtcatggttgaggatattgacaacgttcggaattttcgcctcagacgaagttgctctgcctcggtcgtccgctcatgttttcggagaaagggtctcaaaagacgtcttaggtgctatcgtcctttccaccgactctcttcggtcgtacgccctctcgtctctatcaagctcgatcgaacccgtttggtatggagctgccacctcggcacttacaacaggcaagattgacagcgaggacaagctggtcttcctactggcaggacttcttggtgtggccaagtctgaggaggacatttatgcggctagagttctgagggatttgttggctggtgtgcttttctattcaggagcaaatgccgaggatgctgaaaaatggctaatgtttggacgaacgcttcaggacaaaggtgagctcttgcgcgctttgattgttctttcagcctatctgaacataaagttaccatgttgagtcttttttccgagatcatacagctcctcaatcatcagttgctatcacccttgctactaaagacatctgcctcgagtctaccaagctcgatcgattccagaacgagcttgccgctgatctaacaggtctcaaggcttcagctgtcaatacaaagggccttcgggccctccgacttctagcagccacagcccctcctccagagtcctctgcgatctttttaccagaactccgagcgactaggttgatgcaggttttacaggagtggatgacaggtgacgaagaggatttgagcgaagagctggactcaagagttgcagagatgtttttgcatctcggtcctattgtccagaacgatctgagtcggttcgagtttgtgtttgatcttttggaggccaacttagaggtccgttatcctttccattgcgtttatcctggtaattgacctggcagcatcaatcccgtaaacatcatgattgactttctttgatcctgatctttactataggccgcctcttgggatgaccccgcctctttaccattcttggctcatactcttcgactactcgctgttgtccgagatctcgcgtttgccaacaaagctctgaaggaggtttggatcaagaggaaagacgcatctttggatttagtgttcaatctgttcctctccgaaaagggttcgtttttttcccttgttgacgagttgatttacatctaaatgaaatcgacgatcactaaattatttcttctttcacagctggggagatgtctcaaccgctctcaatctgtcgtggcctcgttgttgatcttgtagatcaattgtctatcaacacactcactcccgaccgatttggacctgtaagtgcttggtcgtggctcctatcaaaattcgtctgccgattgacatcttaaattgttctatcagctgtgtttgctcttgaatgacccgtctgttgatgttcaaaccacggctcacggtttactcaaacaaatgatcgagagaacaactgctgatttagttgtccaggtggaagttgagaccgataatgagatcgatataaagctgcccaaagagttgatcgagacggtagttacttcgctggagttgcctgtggctgacaatccggctaaaaacgtaagtttcttttcagacgcaaaatgggtatgtagatctcctctgatttcgtttttttattgtctcaatatacagtttggaatccttcttggatgggatctgatcttctcccacttcaacggagcggtgagttctgtttcgcgtcttctgttccaatgctcgattggtgactgatcattatcatcctttagtctcttaaaatcaaatcaagctatatcgagcaactccgaaacgaggagttggtcgctgctgtcttcatacccaccatcctcacgctcctcaatgtttcagaaaccaagatccaattgtttgatcttgctccctgggcggtggatgaattcataattgactgtaagcgccgataattcatcagatgcgaaactcttactcatctgacttctctctattgggtatggtttgtacagtgtatgatccggagactccctacgcatcggctcttttcggcgcacatctcttttaccaagcattgattgttgcacctgtatgtcgcagacgttcgcgctcatgatccctttgaatcacattgaccgtcttccttatatactgccaaattctagtcgttaatccgaaactggtggtcagatcagaaggatcgtcaactctcgatggctgtttctacctttacctctcgattcttctctcctgtggtgatcgaccacgagctctcaaccctgcgagatccagattccatggcggatcttcaagacggcgatttgactgttaagattctaccggcagtcaacgaagttaacgcgtcgtacgtggtggacgaacagccaatggaaattaccgttcggttgccttcggattatccgctacatggagtcgaagtcagagacgttcgaagggtcggtgtggacgaacgaaaatggaaagcttggttgttggccgttcagcaggtcgtcactacccgggttcgtgatgtcttttttgcgcactctattcctattccgcctttctaatctttcgacgagtctggttattgattgttgttctcaatgcctttatcgtcaaacaggatggtcttgttttggatgctctgacactgttcaaacgaaacgtatcgcttcactttgccggagtgacagattgtgccatcgtatgttgactcttctttatttttctcatcacgctgttctcgatttgtgctcaacgctgtcttcatttcctctctcgtgaaatcttgtagtgctactcaattatctctgtcaccgatcgaacactgccgacaagacaatgccgaacgtgcgctaacaagttccatggctcttgcctctacaagtggttcaacacatcccactcttcgtcctgcccattgtgtagaactctcttctagtagttcacttcctttctgcaacccatgtctttcctccttggacggtataagaatactatcctgtctagactcaattagaactgtatcacttatctataacattgcataggctattgatgttgcatctgtttttctttccttcttttgtctctcttctttaccccgcaccgtcaccgagttgatcaaaaagtttcaatatgttgacttgatacgacagcttgacggaaggcgtgatgatttgagctttcggagaagatcctttgaagatcgaatggtatggaagaagagcgtggaccagaaagagaattttcgagtatttcagaggctcgaaaggagaaaaagaaagaagacaaaagtggaagaacacgcaagacgaggcgtcatttgttctatgaaaggcaatgtcccgcattttatctatacgctccatcactcttgatcagagagctctaacctgacgaggtggtggttggctgagcagcagattcagcttgtgctcgctcagcttgagcttgaagtgtggcgagctaatgccatattcacgagcggatcgaagaataagagaaggagaagaaaagaaaaggaagaagaaaatacacattagttcatatcatgctcgttctgaacgattgtatcgggtaagatggatactaacatccgtgaagatcaaactttggttcgagaagtaagcgaattgacagatgacggcgatatcaaggaagaccgtcagaatggatcctctaccaaggcatgcaatccaaaggacaaccgaaataagcatctagatcaagaaaataggcgagctgaggcagatttagcaaagacgtacagtaaccaaggcaaattggttttgatccaatgcgaatctaatgatttgaataggatactagcgatatctgtcaacccaccccccggacgaaccgattcgattcaagattccaacaagactttagcaatgatcgaatcgaagttgaagagtcgagtgtccgtacgtacaggttaggttaccgctgatggtaaagacaaacatgcccagtgagaggccagtacatctagtctcccaattatggtaaatctgagggactctggatccgatgtcttcatcatgagagagattgaagcacaaccagagaaagtaaaagcggcgagtgagaaccagctcagattcaggccgacttcgacttgtctttgctcctatggtatctgaaaagcaaaatgacgtatagattcaaagaagaacgtacaagtgacggctgagatccaacccaaggtttgactcttccactctatcttagtggaattttctccatcggtcggagggtgtgagtttcctttcccccagacgttgacaccccaagcaacgagagccgttccgaacacgaggccaaacgccaagaaatgaacagcattctgaatcaaaaatgatttctttctagctggttcgactgtcgttgatttcggaaggagcggactagactcggtgttatcgtctgaagagggaacatgaagttgctcgacttcagaggaaggagtggccacggcagggttctgacgataatagtatacttggaacaggaggacgatatcgcagattgaatagtagcctatcgatcgattgtggaagggaacaagaaacacatcagctgattctatcaattaggctcggtgggacagctgccagtatctagctactcactagcaagaatgatcattgtaggcagtagaccagccatggctcctcccacctagaaacactcgatcacaatcgccactatcagccaatatccctgtgtacaccatgaagatagagagagaaaggaattagatagaacgggaagcataccaagttggtgacatcgccgatgaaccaaagaacgatgaaagcgatagagagaccttctcccgattggagaacgtagttttcccagatctggggtgtatatacgactagaaacagagatagagaagcagagcaatgaatgaaggacggtcagagagaacataagattaactcggccgaagccggcctcgacgaatatagggagaactaaccaatccagcaagcgatactgatccaaccaaagatactgcttagttgtgtgtcagagggtacgatcatgactgaggaggagcttgtctgagctttagttcagacaaatagggagtgaaaagaggaagaaatagaccaaacgaccgaagggtggatagagagcaagaggagaaatctgacggcgctcgactttggatggaagtcttgactcttatacgtaatttgttatctgcccgtcattccatcatccttctctctcaccatcacatctagttacatccacaactaacaatgaacgtcctagtcagtgatctccagcactctcacgttgtgtttatacctcttttcgcattcatctgaagatctgtcatatcttatgtgatctgttccgtcgctttataaggagcttcttttcggcaagtccctaactccagccgaacgactgaggcagcatcaacgagctctgcagaaagctcagcgggaactcgacagagagagaggaaagctcgaaaagtcagtccggacgctcatcatcatcattctttctggctcttacaaagtagctagtcaacttcagtgtcccaccttgttgactcatcgttctttctcccgttatgctggttgtctgtacagtgaagagaagaagattatgagcgagatcaaacgaacagccaaactaggtcaaatggtaatgtcttctttgttttctcgtccttctgcattgcaggcgaatgaaccagtgttttgcttccctctttttccacaacaaacgtggacacagaacgcctgcaagatcatggctaaagatctcgttcgaacccgtcgatacatccaaaagttctatgcgatgaagacgcagcttcaggcggtctctctcaggattcagacactgaggagcaaccaacagatgggtgaggctatgaagggagcgacacgagcgatgggcatgatgaatcgcagtatgaatctaccacaagttcgttcccgatcctatcgactggctcgatcctcatggtttggttggagtcaaagatgaacaagcgaatcgctaattcatcgtgtctatggatctctgtgtggtccttggttcttccttttctaacaacatcagattcaaaagatcatgatggactttgagaaagaatctgcaactatggatatgaaggaggagatcatgtcggacgcggtcgacgacgcgatggacgcggaaggtgaggaagaagaagaagaggagggagaccgaatcctcaaggaagtgttggatgagattggagtctcgcttggccaacaggtcagtctttttgactgttcctttctgccttttttgattgtgatatgttgctaacttgagagaaacccccttgattcttcttatcctctcactctgttacccttcgtccaaccacttccgctgctaaacatagttgggagacgcaccgtcttctatccaagaagcaaacagtccaatgccttcatcccgtttagctgtagcagagggctctgatctcccgcccacaccggcgtctgctgggggagggggcaaccctgacgaagatgctctccaggcgagactaaacaatctcaaacgataggatttcttacatctcttggagcctgtttgtctgcaacggaccgttctatctgtctttctgaaatctgcttgggttcttttctcgagttgtaactgtatgataattagtgtgataattaaatatgaataacacctaagtgacagataagccgaagaatacaatcaaatcgtctacaaacccaaccttctccgtttcgacaaggacaaggacaacgaccatctcctcaccatctcagatcctgtcactcatcttttccagacagaacaacatgctcgtcgatacattccttgaatacccaagtcagtagttgtcccatctgaaagttgcagtgtttcacaacagacaactcagggtcatgagcggcagcggctgagagtttgatttcattctggttcggaccttaatcattcttctctttcaaacaccagctgcctcaacattccttgcgtccattgggtctctgtttgttcttgtacaggcatacaatctgctcaagcttgtcgcccagttgactcttatcaagggtaccaatgtaaggtttcttgtctcatcgagcatccggagaagaaagagcgaagacagggcttcttcgccgggtggtctgtgcgcatctcacttttccttcccagttgctcacgatctcaatgggaactcgttgtatgcgctgtgtttgtttctctagctcactaagtatggtgctggaaaagggtcttgggccggtacgttgttcctatccttcctgtctgtccgaactggctacagtctgcttggtacctggttactgacgctcgcttatgacttatgaatgaaatgatacagccatcactggttcgaccggagatctcggtatagagtttgctcgacagatggcgaagaagggtttcaacatcgttctcatcggccgaaaccacgataagctcgaggcgattggccaggaaattcgttggtttcttttcatacgatgattcctggtatgttctctttgaagccgggctgatcatgaccatgaatgtgtatcatcgcaggcattaaatacaaggttacgacgaaggaggtcgtcatcgactttggaaatccccagcctgaggctttcgaagagctaaagagccttgcctccgatttagagattaatgtgctaggtaagagttcatctttcgcttagtgagagcaatcactgaataagctcttcggacggttttattggcaaattagtcaactgcgctgggctttcccacgagatgcctgtctacttcaccgaaaccagccaggatgagatgctcggtatcgtcgatgtggtaagaacattccatctacaacacgagtaaatgcctctatagatcactgatcgttatcgttctacgtgcatacacccacatcgtagaacatcaaagctacgctcctcactactcaggcactccttccagccatggtcagccggttagtccctcttgtcgaggttccaagaagtatttacaacccgctgaaattcgcttgttttgaccaccatagacataatggcttggttcttactgttggatccttctcggctctcgttccttcagctatgctcgcgacctacaccgggtctaaagctttcctcgagaggtggagtcaggctctcggagaggaagttgaagagtttggtgttgatgttcagctggttctgccctactttgtggtccgtatcagcatcgatgttgaatctcgagttcctccttcttttaggtagatcgaaaggctaatattcaaccgaatgaatgaacaacaaataggtctctgctatgtccaaaatccgacgatcctctgtgttgattccccttgcctcagactttgttaagtcgaccttatcctctatcggactgtcccgaggggcggtttctagacctttcactatgacaccttactggtctcacgcattgttcgactgggcacttgctacttttgcacttggaggtcgattcgccatgggtaaagggttgggtatgttctgtctttaattgttcttcagccgtgcgctgtaccgttaaaaagtttacatggctaatgaggcacatacatgtgcttgattggtcggctgattcaacagctatgcacaaggatattcgacgacgagctctggcaaagaaggcccgactcgcaaagtcagaatagtttcggttatcggcctttatagatttgagatctctagcttttgtctttactccttctctgtacccttcacattcctcttcgatcttaacgagagaatgaatctattttgaataaaccacgtgatgtacgcttaacatggccgagagattatgatgcgatacgaatacattcccttctatctttcttggttgtataaattagaaagagtagggtaggcgtcatgccgtataaggttgactgtccagtcaaaacaaagggcagggtatacagaagagagatgttacaccggacagactcctccgatttatgttaggcaaggcagaatagggcatacaaagtgtttaacccgttttaaggaagaggtgatagaagacagaagacagaaggttgataaggactacgaaggagcatttattgctgggtcggtccagccgggataacatagttcgagttccttctgtatgcgcatttatggcaaggtcaagaggattagatttggacgtagcgatcaaatgcagcgtttccgaacaaagaaacacgtggaggagaaaccaacctgaagttctctggcgtcatcttcattcagatcactagttccttcccaggcctgatcaaattctaaatcgatagcgacttctagccctgttcccgcgtggggatctctctgtcctatccctccagaggaagcggcgccggtcgttccagagccattgccagtactcgaaggtgtgaacacagaaggcgacgtcggcgtaaaaggagagagatttgatagcggtgacggttcgtgggacgagggaagagatgaattggacgatctggcgagaccacctacgagaggagcgccatttggacctataataggaactgtgctagaagcagtactatttgtagtggtggaggttgttgtcgatgatgtgatgatggtagtaggggggagaaaggtagccaaccgtggaatcgtagtcgatggattactcaatcgggggataggaagtatccagatccgttctcgcaagcgtttgtgctgaggtttcaatcaccattcaaagcgagacggttgagatataaatctgaaaggaggaagtattagaaggaaacaagagagtgtgaaacggaaacgaacacgttctcgatcttcttccatccggcgcagagtctcagcctgcgaaaagttttcaaagtggcctcgttttttactactcggtttgctctttgagatttcatgcactctgtttgcagtccaataggtgcaacctgaaatggtaagtaccacactcggcgaagtctcatcggccgggtagacaaattcaagaggaaggaaaaagagcagatacgaaccttcctttccttagctcaagtgtctgaagagcttcgtccacgatttctggtcgaaccaccctctttgtacgccaactttccaagatctgttattgtacaagtagttagccaaaaacttgtcttacaactaggattcgttcaagggaaaaaaaccccttttgaaggcaggaaaaataaagcagaggctagtcagacgaacttgttttgcactcatcaagttcaacgcgccctccctggtttctggaaccacataatcaacgactttgagaaggtctctggtgatgtagtcgacatacggtccatctggaaggccgaccagaagggaagtctcgcataaagagtccaggaagtatagtacgttgatgcgagagttcagcgaaccctgatgatgaacaatggaaccatgaaagagacgtagggaatgttagtgacggtagatcaattcaaagtgtgaagagggagttccaaaccttctcggcttcttccagtatacactcccacagatcttctccacatctggagccatactttatagcaaagccgacgacccggtgaatagaagcctgggaggcttcgagccgacggagaagccctaatagctgcatcctgatgtcgaacgggtcgaacgaactcatgtcaggaatgaggattcagaagctgttttcgtcgtcagaatgggagggacgagttggtgtggccagatgcaggctaggatggtcgatcgattttgaaagtgctggtggaggtgatggtcgttgatgatgatgatgatgtcggttcgtctcttttttgtcgcgctcggcatttgctcgaccaactctgagcctctgttgaattgcttcgttctgttctttcgatcttgctctgttgtgtatctctcatgctgatattttctatatgtgttctttgatcagaaagacagaaaagcagaaagacaaagggagacaggaaggcacgagaggtctatgacttttatacatcgaaactgtatctgatagatcatctattttttgaatcccttgatcatgtccatcccaatcttttgcatcatttgaagatcctgtagatatgagggccacagtcagccttaattgtagcacacatatatggacacacacaaatgaaagaacttgcctcagccgagatatttaatcgctcaacgaccgacttcatttcggacatcagattcctgaactcggggtccatcacgaacttcatcattgctagcttccccggagggttggccgttgtgtagcctggccagaaaggtcagttagcgcacgtgagcctgatgtcctacgagaggcctctataaagaggagagaaaggaagaacccaccttgagtttcgacgtaagtggacattttctggaataactcgactgcctgctggtctgccatgagctggtccatcacatcggtcttagaagtaagctggtctagcagctgcttgttggacggctccgattctgatgcgtacgatcggatggaaccagtgttgaggttggaattgaagccgatgatcgggcggatggagggaaggaccgctctggagacgaatcgcggccgggaagcttgaacaatgttcgaacgtgagcttacagaaagccgggagagcgtgttgagtgagagacgcatagctgttgttgcctgtggtagtagtggtagtagtagtagtggcaatggtggtggtggtggtgagagtcgtggccggtggtcgtcaagcggctacggtctaggacactgaatgatcttggtgggcaactacagaaaagactacaaacaaagagtacaaataatccgaaaaagactacaaatttacccgagaacaaacactacaaaacgtcgtagtcctcatctgtagtcgagactacaaaaaaacaaagaaccaacttacgcccaacagatccaggcacagacgactttcgccatctcgcccggtcgtttccatcgttctacgaccatcacgatcgtctttcgttgaccatctttcgctacctttctcttctgagagcctcgcttcgggtatcagctcacttcttgttgagaggaacaaggcagaaatggcggcttcaactacttcggctcctccgctaccgaccaatgctcccccacaacattcacccttcgggctctctttaggatcccctacctcggaagtacctcggccgacattcggtcggggccaggcccatgagaatccacttgtggccaagcgagggatccttcttcgggcatcgtcctcacgctcaaacaacctgacagctaaccatccagaaggcgagctcgatcaaagccgactcgataccgaggagctcttccgcgccctagccatcggagaagtaagaagggtcgaggcaagactgaggtgagatttttcgggtctcgttcctctgtctcttcgggttcatatcagcaagatcgcttcatagactcacccgggtagatgtccgttctgttcttcctctcatgctcatggttgatggccatttagatcctcggcactttcgaagcagactgagctaaggacgatggtagggtgcgtatcttgtgttcacccttggtcctttcaagattagtctgaggctggctcaaacatcaaactccttatccgcctttctcaactctccacagagaacgatatagagatctgctttcttcttcagcagctctatccaccttgtttgcatcctcaagcaggctgtccgacagcctcaaagtcatgaaggccgtcacgtcctccgctggcgagggaggcgtcgcttcgatctctggcagcatcggcaacctgcgaggaggtagtgtcaagagtgatgctggagatgacgctattgccgaaggttcgtctttctttttctgcatctcgagggtacccctcactaaccggcttcatctcctgcaatatctatctgtaactccctctcagacttagacaccctacttccgctggcttctcaaacaaagctcctgttagatgcaccagaaatactttggcggctgctcgagcgaaaacagttcctacacgccgcctggctcttttctctaggtagaatcgttcatcaagaggtcggagagatttcagacacttctgttagtatttcgcccttgcttctctacgctagcgatcgaccatctgaaacttgatgtctgtctctgctgttttgatgtaagatccaacttcctctcttgcatcgtcaatgggaatctctaagcaccttccggtcacaaatcgttcacagagcaacgcttggactcaaggaactatctctctctcctttggtgggttgtcacgttctcattttatccccgtcgtcatcatgcgctatgctctcttttgatgactaagatgctgtttatacgtctcaaatatcacactcaacaggacatgtcccaaactttgatcgctatcctccttctagacaatatctccctgcctcaggcgctgaacctcctcctcagccagcggacaaaactccttcagactgcacttatctcttcaaaccaacctgctcgttcacaacaatccgtcaataatgcgcttctctcatctgacgatatctctgccgttcctccttcgaataaagaagggtttcatcgtgaaaacatgactcaagaccaggtccaagcgctcctcgaagaaatcgtttccgttcttgggggtaccatcggtcttgctagggaaatctttgcttccgaggaatccgatcaaacatccggaagcagtaaagcggaaaagaagagtttgatcgaaagcgtcattggaggtattgagagaggagacgtcacggacacttcatctcaggccctgccctcagatcaaactctccggtcaccaccgattgattcggttgacgaaaatggtgatggcatgggtaagctgatcagtatgtcaaaagaacggatttacaagcggcgagcgtcccgattagcaatgtcgttctcttttcctgctggtgtctcgcccaacctgtcctcgccggcatcgaggtcttctccctttggtctttcgaacgcacaaggcggttcactatccacttcatcccagctggttccaaatctcacaacagactcactctcgagagaacggttcctgtcggaaccagtaatcacctcatcaggtctccttcgacaactaccctcttctccactcctgctccggtacctgccgccttcgataaggaactacactccttttattctttcctctgaggcatcgacctcgtcgtcgatgtcgaatctgagcccaccacaattaacaaaatcgctcgctgcatggtttcagcaaaacacttccctccttcattcgaccttacactccatccttgcctcactctcgaccacggccgatgtttgggccgttcgggctcacgttggtcagttgctagccaaagtacccggtttgaaaccggatgaacggaaaatccttgaagatgtactggaggaaggctgggcgggccgagtgaaggacgtttgggactctgcgttcaaggatctaggtgatagagttgaacggagcgttcggtccaaagtcagtaccctcagcgaggctccctccacatctggcggaccactgttggctggaggaaaagagatcgagggggatcttaatccatcgagtttcttgttctccgcctcgattccgttcccttcgaacgcagagtcgattccaccttcaacgagcctgccgattttccgggctgcgcttcggagaagggtcgccggccggacggctctattggatggcgtgttgagagaggccgaggctgctgccggtgccatcaaaattgacctggaggggctcagaaagctagctgaaggcggagaaggaatcgagagcactttgttaggaaagtacaaggtgttggcgacagaggcacttgaagggctagctgtccggttaggagctgttttggatgatcaaagtttacttggtgagtccagttgtgcgtgtattccatgtgtattccttctgatatccttgttccattctgtatgcaaactcttagcggattcgatcaataccgaaatctttgtgggcagggtcgcgcttcatttggtatcaagcggttcattttactcggatatcatgggtccgggcgtctctcctggtaggtttctttttctcttgcatccatttaatacccggctaagatgaccaaggtctcactctcatccatccttctgtttttatttgcaatccagatatctggcgtgctcgtctaaaggagattcatacacggtctcttgtgaagttcgagtcggcctcaattcaccgggcgctcgaccatgtccggcgcatctttgagttggatgaggtggtagcaaacacgacatcattgtatttgtggaaacgtatgtccttctttccataagaagtccaattcttttctgtctggtattgcgctcggaactgactagccaagatgggatatcatagcatgtaccatgaacccctcagttgttttacctggactcccatcgagagaactccacctcgccctcaactcgctcgtcagttcgattcagacattgggtacgccaccttcgttcgacctcaaactatatggaagttctcttcttgagaactttctcagaagattccgtgagtcggacagttgggagactgtcaagggaaagactgctgtccaggtgctttgggacgtgttgttcttgagaacgttgagctccatccaactgagatcagagccgggcacggatggcactgtgtgggatgatttgattgatcggttgaccataaaggtatgtttttctttctttcttcgcttcattatcacgtacatctaaaccggtactttatcgtctaattcacattccttttgaatacatgacaggcccgggatgttctcgccatcgaccaacaatctgtagatttatctgaactgatgcgaccatcgattgaatctgaactcattcgttgccaaactgtgctttgtccgatattgaaacttgggtccgcctcgcaattgaaaatggattccaacgggtcggcagagaaagcacaaggcgaggccgactcgaaacatcaagctttacttgcccttggggtctctgggttgacgaccacaacaacaacggctgcagcggaattacaatcatctttggctctgatcgctccttcccaacggttcagtctgttgtcaattaccgcaactttccgatgacttctagtatttcaaccaggtttttttcactatcgtcgctacatatacattatacatatacctttcctttgtgatgtttctattcctatttgtttgttcgcctatggcaattacgtggcttcttctactcgtcttcagccttgctgaattcttatagagtgtcttttacaaagcgcgaagaccttgcatacgtgaacgcgatgcttggttctacttgcccgcctgtgttcatgtctttaccttcttcagggaaaaagcaacaagaatcgattttaaaaaaaggtcattggttgaacaaatacaatacacgttagcatctctgcgctagatgcagctctttcttcaacaggaaaagattaaagaagatagatcagaggaggggaagaaagagaagacggagagaagagatatcttaaatcagaccgagcccccaccatctctttctctttggcttcgactctccttctgttaacgacacaggtgccgactctgccaccgtagcctttaccgctgatactgatacgggtgccgggtctgttttaacctgtccggtagctccctcgacggcctgaacgatagcctctcctcctttagtcgtactgaacatatcacggagtaatactccaacggatcgatttcgtttctcttgaagatcaactagctcagcttcaagtaggttgatccttccttgagcttcatcaagttttctttcagttgttaaagataatcggataaggtgaagtcccttgttgagttgttaaacggaaagagcgaaaagtttggatgagagtggagtagacagaaatggatccaaacgaacaaagaagtcgaaacaggttaggctgggtctgacaacatgagatacgacgatcgatccaagaggccgtcgttccaatatgactttgacactggaagcgatggctgaacgacataccatatagattccgatggctactccaagagcaggtagagcggcagggacgagctcactgtaccagattggtcgtttgggcgaatgcggaattctttttgaatgagcatgtccggaggaagagaagtttgaggaagacgacgacgacgacgacgatgatgatgaggacgatgacgaagaagacgaggagaacggagatgttgactgagaccctagacgagtggctgatgaggcagaagagggatataagtgagattgagagggaggatacgagatcggggaggacgtatggaaaggcgagttgtgaaggtcacgaccggagcgttcaagttcgagtctttgaagaacccgaacacaggatcgtgggatacccattgagcggagtgtgaacgacatctttagtctcctgcttgatgatttggagcaaaggatactgctgttcttgctgttgtcgctgctgttgccgtcgctgctagagaagaagggagcgttgcgtcgttgcgagagcaaaagacttaagccgaagacttggttacgcgggtgacgtaagttggaactgtcgtggttacaacccaagtaagacgtacacttacgtaagcttctgcacagcccgcttgaaaagttaactaatttcactttccagcctacgccttctttcccacacccaaccatcgacaccagcctcactactctaccactagacgacacagcaacaatggctaaagacgaagagaaaaagtccaagaagagaaagtccattgttcccggagaggaggctgccgcccctgttgccgaggccgaggttagttttgtcagtgaaaatattcggcccaatcctcggctaatcctagtttcttgaaacagtctcctgctaaaaagtccaagaaggagaagcgcaagtcccttgctggcgaggaggctgccgacgtctccatggtcgatgccgccgacgttgccgatgtttcatctcctgtcaagaaggacaagaaggataagaaggataagaaagaagacaaggacgagtttgccgtgcctttggaggccatcgctccgatcgctgccccgttggccggaaagaagctcagcaaaaagttgttcaagaccgtcaagaagggttcgtttgttgtcattctggtggaaacatagtaaaaggcgacgctcgtgttttcttcgcaaacaaagactgactggatgtttaccgtgcttcttcctttctaccgcttgttgccgcgtcattgatttttttctttgctaacgccaaaacccaatcggatcttttatcttgtctctgttggccgtcgcgtgtcttttcttcgcatttctcccacatcctttccatacctaattctacagcttctaaggctcgacagctcaagcggggagtcaaggaggttgtcaagtctctccgaaagggagagaagggtcttctcctcctcgcgtccaacatcactcctatcgacattctttcccacttgcctatcctcgctgaggagtctggtgtgaagtacgtctgggtgcttgctaagtgagtttatgtccttcaatatttgtcttaattgtatcctcttgcgtgagcttcggcttttctttttccgcccttcatgggggaaaacacacagaaagaaaccaatccccatgatctctgtctgttcttcggaatgcacggagggatttgcgtctgagtctgtaatactctagctttgggattctgacttctattgttgtttgtccttttcctcccttgccggatctttccttctgtgttactcgctcctcgtgccctgtcatctatcgtccgcgctctcgcgccttcgctatccttcatctccaccaactcttcattcttgcctctgttcttaaattcctctcgttccttctttgaaaattcaaatgaaaaagggaggaactgggacaggctgctggtaccaagcgagctacgtcttgcgtcttgatctgtgaggctcagaggaagcgtaaggcgtctgctacgggcgaggttgccaagggtggagaggactggaaggagggatgggacgagttaatcaaggaggttgacgaacttgtgagatctttttttgtcttcttttgaatgtttatattctaacggtttacgcaaattcatctttcggtggctaatcctaaactttatacacttcaatttggtaggaccagaagattgctttctaaaatcagaaggaagaaagaaagaaagaaagaaaagtgagaccgtgactggtatactggcatttgattcctatgtcttttctttgtttatattgtatctaagattagagaaaattggacgtaattagagggatacagagaaattggtttgtgaaagataaatttgtgaaacaagtaatagactacgcatgatcacaagaggaagtatgcaaatatgttttgtattgtcgacagcacaggaaagaaaggcaaggagagaagtaaaagggttataaaagggtgaaagataaacgagtgtcattgagaaaaagaaacatcatcaatcataattttccggcttgtgtagctcgaagttgagctcttagcttctgaacttcgtcctgaagagagttcagttcgtcaagaagagctattcccggaccttgcatctcccttggtgagagaaatacaggaagataccgcaagagtcgaatagtcggttggcaagtctcccatctcttctttgtagcctatgaaagaagaaagaggacgaaaggaggacgtactttgctctgtaatcatccaggtcattttgggtcttatccagttgtaccctcagcctgtcgatctctgactctaatctctgctggaccactcgtttctcctgggacgcctcgttcgctactgtcatcgctctgatcgataatgctctgtttcaagaacaagttcgaattcaaatgtttcgttattttcatgtcagggtccgcttccaacagaacaagaattacaagaaaagggaagctgtccgcactcattagcttcactcagagattcacaggcctcaatttgagcggcgagcgaactttccaaccgtcgtttgtcttctttgagtgaggtgatggccgcttccagctcattatatttctggaagctgtgtgtgtgtgtgtgtgtgtgcgcgcgcgcgcggaaggaggcaaggataatggagaagaagtgtcgaccgacagtcagagaaagtgaaagacagattgcgcgcgcacaagaggaaaaagaaagaaacagacttttgatgatcgacacctttaccagcatgctcgacgtatgccaacctatcttccaacatcctgacttgtcgctggtatgtctctagcccggctttactgtccatcacaagccgctgcgctctttctgagttacttttatggatgtctctctcccgcttgaacttcgctgttcgttcgatcaacattcgaccgtcctcgatcaatgctcggactcgttcggaaaacatttggataccaggatagggagtcgtgccgtttgtcaagttgtaagaagcgacaagggatgaaaggtcgggtgtttgtgacaaagaggacgacgacgataaggcgggggaagagatagttgggcctagcggccgagagaatgaagagggagccaaggcagaagacgaaggatgagacaaggacagagatgggctgggcattgtggacgattcggggagagatgggctcgagaagaatggactagacgatgggtttggtgtgaaagggaacaatgttgtggtcgatcgagaaggaaggagactccatagattttgaaggtgggcgagtgtcgtttcttgttcgatagatatcgtcgactcaatcgactttgtctgtatgctttggtttgaccttttttacgtgatagaagagagaagatggagaaataaggttagcaatgggaaagaaagaatgacggatagaggaaagagaagagcctgacagactagcgatcttggccttcaaaacttctcgttcctcactccatcttttttccagttcttccaccctctgcctctctgccgtcttttcttgctctagtaagacccgttcggtctctgccttctgactgactgccagtagctctgcctttccttcctttacctgagcttccagactgaagaattcatctcttacgagtcgggcgactgtatctatcggctccccctcaacggaaacatcttgacctatcgaccgggatgagagaagtggaccaaatatcttattgatggcatcggcagggcggccgagtcgttcgacctctgcagtcttctcctgcagcgatctttccaaacgacaaacagtgtcctccaatcgatctctgcattcgatgtgttctttaacaagtactctctcggcttcaaacgacttggtggcgtggtctaactgactggcggagctattctctttgtgttgtgcattcgagatcgattctttcagttgcactaccgtacattctagcctttcgacctggtcaatcagagactgttctcgttcttgatcttttcccgacgctgaggcaagcagaggagacgactgggtgcctagcgtccgaagtcgacgggcctcccaagcgagggcggatgcgtaatgttcgttcaagcgacgacggagctgggtctcgcgttccataatgacgtacatatcctgaaaatggaaagtgatgcattggaaacaaagatcaggacaacaaatttcgagcatgaataagatagacgaagacagagaggaatggagagaaatgaacatagaggataacaaggacgaatgatgaaagtgacgagctcaccttttcagcggaagccgagcgcttttcggctgtctgaagttcttccgttgtttgcttgctcattctagatgatggggtttcccgcgatgtttagataattaacaactctactcaatttggagaaaggaagagaaagagatggtgagcttaccgtttgtgtccgacatgtaatctgtccaacgtcctggcagccgtcagaatcttttgctctcttccaaacctgagcttgagaacatcaagtctgtcgacaacaaggcccagttctttcttcaagctctctacctcttcccagctgagggtgtgataggaatcctgatcgacgtcgagagcggcctgacctgctagaagggagagtccgagttgttgatcgttcggttgttgaggggaggatgaatcggcagaagagatggtctcgtctgaggtctgtctagtgtgaggctgtcgatcatggtggtcgtacgaagagctggcgtaggatgaaccgactgaagaggatgatggagaatccaaatgttgtttgtcttgtaaagagtgggagcgaggatgagaatatgaggaaaacgattgctgttggctggatgatgagagtgatgatgatggtcgatgaggtttctgctgttgttgttgttgttgttgttgttgttgttgttgttgttgctgttgctgttgctgctgctgttgatgaggcggcagatcgaatgctgggtagagttcagtggacgaaagatggggagaatgacccacggtgacgatgggagaaccaggggcggatgattcgacggacagcggtgccgagggaagtggacgagctggattgttagtgtttcgctgtttccagaacgccccagcatttatcttgccagagccactctcagagagagcacctatcggtgacggaggtgagcgtgatgtagacgacttccaatccccagacgagccgggatgtggatgggacatgatcggtgtatcccttcgttggtgtgtgtatgtgtgtatgttctgatcttctcttctggattcggctgtctgtcgtttttttgttggctattgtttgggaaaatcacacgacgcgtcgagaggtagcgcgcgtcgagcgtgttcacgctcggagggttacacactgggagggttacacactgggagtaaccgtgagggacagtgaggttagtcaaccacgtggccttttggtttgtcacctatgggccgattagaagattcagaaccacacccgggtatactttcggaaggcactttgctgcacatcaattatagtctgggtccagaacggaagagacattgggccgagaacgttggtgaagcaaaaatgagctatgaaggctgcaggctcggatcggtttacacaggcacgaggattcaggtacataacgggtgatcggggagctcagagcttggcggtaaaatgagcaagcactcacgggccggtcgttccacgtttaggcatccagagagagggacacagagagcatttaccgatcgggacaacgatagaacccgtcacaaacaacgtggcggcgtgcatcgcgagggctcaacggcacgagagcgcgagaacatgagaatggatgagaacaaggatacaccgagggtcgtacccggtgagtgaacacgtcatgtattattattattatcattattattattaccatcactcactcttccgtcttgcaaaccgcctcgggtacactcccacttccgatgcttctataagggaacaccctcgcacctcttcttcgtctcttcgacactcattcattcaaccaacctgcatttctctcgttctcttcttgcctttcttgccttgccttgccttgcctcgcgtcacttgctctgcatcttcatcgtttgcttcattatcccactcgtttcctgtgtccaccatgctcaaactacaaaagtcaccaaatacctcggtgtatgatttacccacgctcgcttcagaaaagctaccaccaccaacaacagcacccactcaggaccgcatccactttattgtcctttctaaacggaccttcttctctgtccttgccttccttattttaaccgtctctttagtttcactctcaccaacgttcctgtcgctctacaactcacactcccatcgccacggacattcgctcactatttcttccacctatccaccaaacgcgaccgtggtcgtcgttggcaatcacgtcgtgaaggccaagatccggatcggcacatggaacctcaaatttgatccactggccgccaccaccatccctgttggtcaagacggagatggcagcgaatacaagccaaacgcggactacaatacccagatcagcggtctccgtgtcaacgagagggtatgttcggatgtatttctcttccagccttgcttgttatcacaagcttgtcctctctttggtttcaacttctaatcattcgcctgtatttgtagccctgggcggaacgacggtggagaattgcggattctattttcaactcggcctacgatattattgggtgagtccacttgcgttcctttatagttcggtataccgtgttgatgtcggcgtctatattggcatgttgttctctcccctcccggacacctcagtttccaagaggctttggtcacccaggtgaccgacatgcaatcccttcttggctcgtcctggtcacatttcggagtgggcaggaacgatggcgggcagaagggtgaatttagcccaatcttttacgattcaacccgattcacactgttgaactcaaccaccaggtggttgagtaccacacctaccgtcgccgggagtataagttgggacgcagtgagtagcattccttcttccaagtacctacttcttctgacttattcgatgtgtctctcattttcttcaaaagagccaaacaagaatagtgacgctggtgactctggaagacaaacaatcctcggccatacttcacctcggaaacactcactgggacgaccaaggtgtcaccgcaagagagatgagcggtagattgctccgaactctcctccccgactatgccaaacaagtcgagaagcaactaggcctcggagatggaaagaatttagtcggaaacgttctactcatgggcgatcttagtaggtgttcccctcgttcttgtctacttgtgtcgtcttctgatcatctccatttaacccctttccatagactcccctgcggaagaacaaggctaccaggcattgacaaacgttactctcaccgcaagctccctcgacgccaacgcctccctcacttcgcctgctttccacgacactcttcgtatccttccccgtcgagcggcgtcgccgtcaaacatgacgacccagttacctctcctaccttatgggccgtacctcacctggacgtcttttaaccctaccagctctgtcgttcaaaccaggatcgactttgtcttcttgtacgaccgttcgtggctcggttccaatgacgctaccaccagctcagcgacgaacgcgactagtctgacggtgtcccgattcggtgtaggctcaaactacaacgagggtgacctgtatggatggaagggttatctcaccgatcatcgacccgtcctcgtcgaattactcgtcgtttgatgaaacctacacccctttgtacttctccccgttcatagtttatacacatcctgttgtaatcatctttgcaaaatatatgtacctgtttgtatgattcagttccactcagacggtcgcaagcaaagtgccactaaaacattctccgaccagattgttacatgaattgtctacatcagagtgtccgacatgagattttactgtggctcaaaactagaagcagattacatttctgaatgctaaagacagcgcgctagacgctcttcaccacgcttactgctcgttttgtcttggcagacgaacggagccctttccatcgttggcttatgtcgatacaactgattgccttacaaacatttccgcaaactctctttgtcttttcttctcttcagaatgttatctgcgttcctattgacaagcgatggtcatatgtgtgcgtcggggcacacacacaagtgctcaatatccttttcttctcactctgccttaaaacttcgggcatcgacctctagttgatctaaaggctcaatgttttctaacttgatgaagatgacattcttccgtccagaagtatgcagttatgaagcactgattgatctcatgtaaactatcaagaagtggaatgagaggctttggcttggaaacctttaataatggttgttcaaggtacgttcgaggtacgttcgtccctggaaagctcgttcgattagttcgcttttgatattgattgatttaatttcgaaacaaaacgaaacttgtacactcgtttaccctcgtcttctatggatagcaatactgcctaaacaggtacgcaagatatctcaagatattggttttgttcttctagaacgttcttgacatcatgcgtgatacctttcgtcaccctgttttcttccatctccttctcatacttgatagacgttacctacttcgagtcgttcggatcgaagagttctaagtcacatcatataagaaattcaaacaagtggaaagatatgacaagaggaagcacagatagtaaaatgacagaaagggaagaatgcgacagatagtgcttgtcgagaaagagagactagggcaagaatctataagaggtgtatcgatagaaagatctcaaaccttgccggatccaatgaactgcccatacagccacggtccaacgaactgtgaaatcgatttgagataatactcagcgccctctcgtgtatcgtgcgcgcgtcgaactatcgtcacggacgaaatacgaaagaacgactcacaaatatgaatgctactacctgatcgagacaagacaaaaacaaggaagcggacaagacagagtgttttgtttagtcaacaatttaatgagacgatgttgccaagatcagatgagtatatatgaagaagagaaagaagaagaaaatgaggccacgcactaagaaagggttgatactagccaacccaccgctgttggtgcttatcccagccggcttcccactcaatgtgtttccaggaccagcaggccaccccccagctggagcaggtccggatagtgaggcaacaagcgatgcaagctttgatggattggcacctttaagtctatcaacttctttgccgttccgaagaaagacaaaagtcggcatagccgaaatcgagaacctagacgcgacggatcgattggcatcggtgtctaccttgacgaaggtggttgtcggatactggttcgggaatagatatctcggattagaacatgttgtcttgataaatttgacatggattgaatcttatatctaagacagaaagagtcatacttgtttggcgagtttctttcaaacaggagagacaacagtggttaaagattagctcaaatgttataataagccaacgccaggcatgattccaccaacctcaaatacaggcgcaattgcatggctgtcggccatgccttgaccgaggtggccgcatcagcacgatcccgtttgtcatgaatcactctcctacgattgatactaatggatcagtaaactcaccaaggtccacaccatgtggcatgaaagtcaacgctgatcatacacatgatgtccaatcccagtcaattccacgagattttatataatcaatacagacaaaacgccaaatcagtatccatcgtacttacacgacgagcccggacgacccagcagatgagacgaaagagtcgaattctggacatcgagaaaaggcaaagtgacatgcgatcagccgacggaacgacgaaagaaccttatgtagagggtttgggcggctactcaccagaagctgaagaggcgattttaatagacatgtttctaacagaaaagcagagataaagagagcgcgatgcagatggttgagaagtagaggcaatggggtcaagtgttgaggcggagaacacagtggtgacacatctcgagcacaacacgaaacacgtgattaattaagctttggccaagagttgttcggctgtgtttgaggttaagtgtcagggtccgggttcagagggtaacgggaaggttacaagaatgtaaccaggcagggaatagggctggcaagaaggaagttcaggctctctagcttggtgactgtgacgagagcgcaaggcagggaaatcgtatgaataaggttgatacaacaatg

SEQ ID NO: 1772 - DNA, 4019 bp, Xanthophyllomyces dendrorhous
gattatgcataatagaacaggtcatagaaggtgctagaagcacctgcgctggaaggtcatatacctgcatgttgatgtaatggaagagcataaggaataccgaggcaggagaaacaacagaaccaaaagaaggttaccgaggtgtaacactcaggtcacatccctaacattgagtatccagatcacgtgactactgataagatgatcaaaacacatcgttcttcctttggagaactcgacttcttacatagactcgcaaacgacttgcaaagatgcagaactcgtcttcatcgccaccgtcttcagtagaatctctgagtgttttggtcgcttatgctaatacgttctctgatcaatgcatccagccgaaagacataatatgggcactagatctgccatgtgcacctccagtgctgaactttctggcagaattgattgcttcagaagacgacagtatgccggagcgaacgtccgggttagacagagaggaaagagaaacgtcagtttgcttgtatcgaatcattccagaagcacgatcgctgactgttgttcataaatttagcgtcacagttgggacaaagccgttcaagcaggattagtcaacgcagagccttcagatgaggcagatctagaactatccgagccttatctaacacctgctcaactcaggcaagtctgtttctcaacgagggtgcccttatcttgcacactcagcacgccaatagctgatagtgattcaaaactgaacagagaactaacaacctatgaccaacaaatcatcacaatcaaggaacagcaaattaagcatgtccttgcaagaaacgagatgctgcagtaaggggtttcttgagtggcctcttctcatcgaattcaaccactaatggcagtactgtacctttttcgttcaactatagggaaacatatgatcagatctcttcggaaatcaacgagtctcgacaaactcgcactcgcctcggagaaaagatcagagacgttgaggcatccttactagaattttcaatcaaggtaccaattatctacaaagtcacgttccaaccagtgtccttgtctcatatgctgaacactgaccactgtattggctctacagatgaattacgtcctgcttcctcaattaaccgcgcaactctccttgtctttcaaccctaagcctcttcaaaacgagttgaaccatctgattgaaaatctgtctacaaaccttcctactccaccattccttccatcctctcgagcaccactttcaaggctatctcccgagagcctagagagagaaacctttcgtatatcagactcgttgaggtctctattgaggcagaaagacgtattggaaatgtcttcggatgatagcatggagaaaatttgggagcgcgagatggaagaaattctgagaagaatggatgacgaagatttcgggagtgacgacgaggatgaaaacgaatgggaagtggagggtcaagaatctagccaaggagagagagctcccatgacactcgtgaaagaattgatcgagggggcttgggagtgggatatgatggacgaactagagaattcgattgaaagggctcgaaatgtaagtgactcttttgctctgatcccttggttttctggagtcgagttagattcgtatattgagtctcttcatctttctgattcaactgactatttgatcggctctttaaggcaaaaacgacgttgactgaggttcagctgcctatactcttacttctccaaacaacactacaaactgattctgaacaaacgctcagctctctggatgtctggcaagccattcagctcgagatgaatcgtttgagaatccagaaagtagtattgaactcaaagggaatggtttcaacagctgaactaagcaatatagacgaagaaggactcaaatggaaaggtaacctcagacttcaggatgtcctgttttacaagtttatacttactaggtcggacattctctctgctcaatcatattctcccagaatcaatatggacgatcctccggtcgaatttgactacatcaacgcctttcttagttggcaagacggtagaactagcctctttcgatgacgtgctcgcctatctgcactctttgaaagcccaagtatgttggctgaggacacagacaaatgaagagcttgacagattgatcagaggaggaactttcaaaaggtgtgatccttatttatcgatgttctgaccaactttttctctgattttcatcttaacacaaattcacttgaaacagccaacgaatcttctctgttccgatttcctctcaagcgcctacacctctacactccactcttgagccaccgaaggagattcgacaggccaaggacagtattcaaaaaatgatgcatactgtcgaagggctagtgagagaatgggtagtactaggtgaatctttgggaaagaacaaagagggcaaaaagcaaatcacgaggttcgttgccgagaatacaatgcgtacatgatgtatgatttggtaggatgcccctggttgtaagaaatcgactctgtctcctttgtatatctcagtcatgtcactgttgcaactaatagttcatcatccgattacatgagagataggccaaggaaattaaatgcagaaagagcaaattcattcatcatcatccttcaattctttctttgcttgaacctttttctcgttttttgccttccatcttgcgttgatcacatccgggatctctcccctttttcgcgtctccaacggagggtatacggaacatcgctccaccttaaattcgttcgctcccaatggggttttaacgatcaacccacctccctctaattctccattggacattttctttcggccgtaaccaacaggcgcgtccaacacgagcattggattatgcttcctgagcgcggcgtggaaatgggcgttcatcaagctctcaatcacgttctggtggtaggactctagcattgaggtcgaaagctgagtgtagttgaacaggaggtatttatctgagtcgaaacctagatgagataatggggtagccaccgagtcttccgaggcagatctgtcgagggcaggaaccgagagagggatacttccgtactgccattcgactgaaccttcgggaaacccacaatcccacaaaagaagaggtcgctcgtctgccatttcatatgacggtttggattcccatttaaacagatcaaggataatcgtaggcttctctagacgtgatccgacgaggaaaagaacggccatgatatgacgaacttggtgatagaggaaagccttgcccattaaatccagtacgtagaaggtccctggctgctcagacgtggtggtggtagaaggcgtaggagaggttgccttaggcgtgatgtttgagtaaggagacggaacaaaaggaagagccaagagtgggtcgacaggagagattgtagcagagtggataccccgaatatgatgggtcacctgtttgctgccgtcaactttacataaatttctaaaatcatgctcgcctactaaatacccagccgcttgtcgcatcgcttctagatccagcccaggtccatctccagaggggcatgcattgagggagaagaagtacttgtagtgtcgagagatgcaagaatgtcgggcatcgaaactgtcgtctggagaaagagatgaccaggcaaggatccgaatggtcggcggaagaaatctattgatgatgctaacatatggaaattctagccgcttggatggtgttttagggttgttgatcgggctgtaagaaagagtggccgtagatggaatggcaagagcttcttcctcagagagctcgtcagaagacaaagcggtcttgctcccgttctccaagccttccttttgaaggcttgattcttcaagcctctctgcaatttcgtccactctatgttcatgcacctttccgtcataagcgattctacttcgcacccacaggctaacaacctgaccggcagcgcttactcctctgtcagttcggccacag

SEQ ID NO: 1773 - DNA, 7460 bp, Xanthophyllomyces dendrorhous
tcccagccctttcccttgtcgattaggttcgacttctcgagtgcactcatcaaaacagcctcaaccgtgggttttggagaggacgcctcgtcctggatggccagaccgcaatagggcgtaccaaggtatgagaacttgagagcaatctttcgtcgagggagcttttcaaaaggagacgcatctgtccgatgcttgttctcgtatttgttgcgagttcgaagtttcctttttgaaatttcttgggtagccgtagttccctggggaacgttagaagtagaagcagctgcaggagaaggacttgacaagctggactcaagcttgataagatgagcgacgagctcttgcttggaccacgaatcgtacttgccagccatttgagtcaatgagcgaatcctaccaaacccagacatgtgctgtttgactcaaaagagccaagtttcaaaagcgtgtaaaagaaagaagattaaccctaagaagtttatttgaatattttgtaattcatatattctagatcttatctttgacgctgacgacaaccactactatagccacaaccatcactaatctacgtgatctactttcgagttcatcatctctgaattctgctcaaaaaccaagacgactctctatcgttgaatctcacatcagtatggcggagacattgtcgtacggagctcagcttccagatcaggcacagcctctactcaatcatatccaatctgtcctgtcattctatgcggatgtcgagaagtttaccttagaacgagcagctttagagcgagagtttggacagaagcttcaagcgctgaccaagagaatgatggaaaagaaagccaagagaggagactctctttggaccggggaattggccggtcatggaagtggtttgggtgataaatggtgagaaactatcttgaattcatatactatcaactgcttctgacacccgcctttccatcattgtttgcaatcaaaagcacattgagcacggccctagatagcgttctcaatttcacagaagaagcttcgaacgctcatgtgacactggcggaccagctcacaaagcaggtagccgatgtcttgcgcgaaaaggagaagcgaaaggaagtcattagaactagagtgagtactcttgatctccgcttctgatgaagcatcagtttgatatcactaacgttaacaatcgaacaacagtacggaacctactaccaagagctgctagatcaaagagacaagtattatcaggatcggttaaaggtagacgagtcttctcagttgtgattcacgacttggagctctgcaagatcaaataacaggtagttgatcatgtatgctctaattttcaatccagactaagcagaagtaccaagaagcttgtaataatgtagaagctgcccgaatcaaacatgatcgatctgccgcatctggagatcgacatgttgatcgcgcccacaaatcattcttagaagccaaggataaagcaggcgaggccaagaagtaagtacctcttctcgatgcagctcaactgtgccctaatttgctttctcacacgtcgatgcttgtagcgcatttatcattcaaacaggaatcgccaacaagatgaaagaaaaattctataggatagatttaccagctttcgaagatgtaagctgttgtcgccctctcaccgcggtactggattgtgcaatgctgatctttctccttatcctatcatacagaaacttcgtaagaacatacatttccaggtttatcttcagaagacgttctcgcattaaacacgtcattgcttctcattcttttcaagaggacctccatctctcgtctttgaacacactatctagcttgctagcaacagatcaatctcttcaggttgcccacctctcatcactctcaaaaataacgaattcttccataacgtctcttcagaactgtgacaatataaaggatttggagctttttgtacgatgcaacactcgagttggaagttggcaagaacctccagactgggtctgggaacctgcagaaggcctatacgaagtcggtgtatggtgtgcgtctatcaattcctccatctctgcgttgattgttgtctgtcaaagcaagtttggcctgacttttcaagcttaatatatgctttcgactatctgccgtaggtctcgacccgggacccaagatagttcttcagaacagtgagtatatcccaacgatattcatactatcgagtttgcgtgtataactatgctcagcttgtgcggttatggtcgatttataacgattgtagggcttgctcgatctgctggacggattgagtccacctctcctgttctccataccaaacaaacagagttgacgaatctgattggtttggtcggcaagtattcggcggatcctagtttgggagatccggataagattatggagggtattcttggcaatctaactgaagttgctacactggacaaccaggtggctgcaggacatgtagttgcagatctattgcaggatgcgctgggaggtaagtttatcttttggctaagttcgataaaaacccttgaaagctcaacttgaacaatggtacaacaatgtgctctcctctgtcatagatgatcaaggctcgctacaaccgcacgatttcaaatcttcctctttcaccattcctacccattgcgctcattgtaaacagtcaatttggggtcttagcaagcagggaaagacatgtaaagcttgtgggattactgtccacagtaaatgcgagttgaaggtatataccaatgcttacatcttattcgacatgctattatcgagagtcatcatacgacaataatttctgaccttactgagttatttgatctagatcccctctaactgtcgatcgacccctgctttagcccggcgctcctctatgacatcgaatctaacccgatcgtcttcatccgcgtctcgagcttctgggttctctgctccacgaggaaacaatgcctcacatataacggctaaccttgctccctcagtcttcgaagaagaggaagagggagattcatttgtggatggaggtagagaaactaaggtattattcgattatgaggcaacgtccgagtctgaaatatctattcgcgaaggccggactgtgagggttatagaggaagatgatggatcgtaagttctgtcaactgatctttgatcaacgtgaacaacatgccatatctgacggtctgagtcttcttgatttgacatttgcataatagtggatgggtgaaggtggacgacggaacgggttatcagggtctctgtccggcggcttatcttgaggttgttgatacatccccgaaggagtcctctgcagcaacaaccacgaataatgtaagagatcagggcgataattatggtaagtcatgcagactttcaggaactatctatcctctgtaacggcgactgaatggccgatcgctcggtctttgaatgtctggaatattgtactgtgttgcgcttgatagtctcggcaatttatagttatgactctcagggacccgatgaactctccttggtcgaaggagaaagagttcaactcacaccaaacgggaggaactactctgatggatggtgggaaggcatcaaggatggaagagtaggaattttcccttcgaactattgtcaaggctaaggggtttgcaggtggcgtatccacatggatcacagcggttagaaggatgatgtatgaccggttgtcttgagttccaatagttgactgttttgtaaggtacttttggacccagctgaccttattgacgtgctagaacatctgcttgtcaggcacttgcccttgtttgccaacccgggcctccttcgagcgcatggacctccttgactgacagctgtcctcctgtctttctctaacacctcggcgactccttccttttcttcatctgctttacccttttcttctcttctttcttgccacctctcttctttctccttgccacatctcctctttcctttgccacctccgaatcctttctttcaaccccttcctttgcaccaccttcctgtccttcgagaaaacagctcttttcaatcaatcatgtatgtgtcaattcttctacgcattaagcgcattgacaggtcatcgactgatctgatgtgaccttgtcaatcatcatagataacctaacgatctagttgcttcaacgacatcatgagcgctgtatcttccgtgagcactttcacggaacatcctgaaatcgcagtgagtctctaccttgtgttacatttcaggttatatctgtattcaatcttgtagattaatgggactcgtgcctgatggtcttttgatctagcctgtcgttagtgagtggtttgtcttgaccatgcatttgaagtcatagccaattttgactaatctttcaatcgtcactgttcattcagtttttcctagaccgggtctgcagctactggctgcttttgtttgtaagtctgttccatctttccatcctccggattgatgtgtcagagacttaccgggttttcgttcctgtccctgtccctgctttgtgctgagcgcatatagtcatgggaggttcgtccgcacatccgatgttcgacatcgatctttagtcgatacacttcatatttaacccattctataggtctctctgttctgtcatttatcctcgctcgtcgatcactcaatctcggcgcgctttcaacgactgcgtggaggcgatggtcgattcctaggttggcctgtcttgccactttcttcacatcgtaagctatctctgtatcacaattgtctctatcgtcgaagatttcacgatgtatctgatcgcttagtggaaatgcaacgtgagtagttgggcctttctattttcgtctggaattttggtgtttggtgtagggactagctcaagggcagcgatctgtagtttggggattttcagctgtatctgtaagcaccacgtaactgccaggcatagagtatcgattggaatgtatcactgatcgcgtttgtgagacagtgttctatgcgttctccaaggtctttagtgagtaactagccgcgttctgatttgtttcattagcactgaccgagtttctgtgatgatcagtctatctcttcctcattgagaaggttcatattgtttcgaacacaaaactggcgagaacgcaatcttggatgtaccgagtttgcttggcctgttgggctccatatttgattattgtgatcatgatgattatcggtgcgccttgcgatgttgttttgtctcgatcagaacactagatagtgtgctgaacttgagcttatcttataggacgtatctctactatcgatcctgagactatggtgtgccatattggactcgagacttatgcgtttgtcctcttttttttcgttcattctcatactccttttccaattatttttgtcctgaatgacttgtgattttgtcctgatctttagatcactatctctcttgatctatgatctcttcctcaatgttttcgtccgtcatccgcttcatccaatcatcccgagtctcgaggatctaaaagctgattctttgaacaaatttgatacagctcacgagtctatttgtttggcctctccttaaatctaagtgtgagttacatacgaatatatgaccgaataaaagaccccacttattcgtcttgtccttgcacttctaaactcaagtcgtcaaccctaagattcgggcggtcgctatgagaactgtacgtgcaattcccatcaacgtgatgaacttgtttttgctcaagcctcataattgtgtttttgatcattcggaatgtatctccatgtttttttttcggtaataaagatgttgtgcgtccgctactttcttgcctgatttcatcatcgcgctctatactaatggttttactgtttcacttgtatccttcagtgcggctcttgcggccttgacgacgtctacgataaacatactagttctcactctgatgcatgggcggcagttaggatggttgtgtgtaagccggactctctctttgactttccatcacatcatgtacctccatatcctaacaacatcgctataagcgcccccttcgatatagctctcttcctgtggaggcgatgtgagtttcttgcacatctctaccactctataccctactcacatgcttactcaaagttaactctttgggtctgtcttaggtgacaataaatgtaagggagaagttcctgcgtaatatcatggagattgactaatctttgtctattcggcccactccactttaggccctggtcctcttctacgtcacgatggtaagttaaatcttggaaagcttacaagctgctgcgtatcgctcactagtttgtacatatgcccctgattgtctggtaattacagagccctggtcagggtcgtcgtgagagagataccgctgccgctgccgagtcatatctggacaccggcgttcgagcatccatcaaacttccaactatgcccggacgggcgggtcatccaggcactcgtggcgctgcgtcgcagaatgaatactttgatttccctgagccgactgatgttcacaaacaagggtttgtcgaaatcaattcaatatacagctgtagctgtacctgacaagacggtggtctcatattctctcatgtttttatcgttcaggcagaccgctattcctgcagaagagggaggtggatatgttgtgaatcgcgacgagggttctacgcgatgccctctaggttctgtcgccatcatggccaaggatgatgctttcgtgcaaaggaaagtcgatgctaactatatgcaggagcgagagaagaacagagcaaagggcagagcgaatcaagagagcaagaagtcgagcttatggtcaaccctgaagcaagcaacaggcattgagaataccgaacggcatggcgtggaattgggttcaaacagcattcaagtatgtccgcatctcagtggatggacctccaactctcacgatcagcgttcttacaacctaatattattttttgcttagattcgggtgaataccgaggttgccatgtccgaattacagcctgctaacgagtatgatcttgacaaccggcgaggacggggcatcaacagaactcccttcagcgaccctatatcttcatcatctcctcttccctcacgaccagagagtcctcactcaccatccaacggatcgttcgattgcgagaaagattcaatcgatgacctaggcgatctgacctcaaccacaggactgcgtgatgacaaccgacctgatcatcggaatgaagaatcactcgcagagttcttaaatgataccagagtcaagtttacgtagaaaccttgtttcgcagacttgtaactgtcacctgaatttcgactgtccagatacctagccacttgtgtggactgtgcctcctttgctttcagacttcttatctcttacatatcttcgcttagtag

SEQ ID NO: 1774 - DNA, 5368 bp, Xanthophyllomyces dendrorhous
tcgttatatatcttaaacgtctgtatttcgccaggttctttcttggtcactacactatattttatctcttgacgacttttcttttatcgccgacattctattgtcattcaacaccctcttatacgtatgacttggtatctgtgtttctctggttatactctcataatctgattattgacggccttgtaggaacgagaagagagtattgctgaaagtcgcgatctttcagagacacataaaactgatgtcattcagagacaccgttccacactataccgagttcccattcgttgttgagggtggcaatactcaagaccggaatgaaggtcacagcgcatgatttcagataaggatgtagtgacaggattctgtcttgaactaaggcgtaaagaatgacaataagataaacgcttgcaagtgacacaatctgaagagagtagacaaactttcagaaacccgttgcttgggtgaatagaaaactttcacgctcaaagcagcattcaacgaagactttgcccattcgggggctattgcatttgaaattgaatctatccgatcgagaaagaggagaaaggaaagagaggtttcagtggtgattctctcgacgaaaagggaagaggaaccgaccgatatcgttgaagccggctactccccatcgggcatctccctctctaaactcagattcgatccattccaccgatcccttcttttcgaacgatcttataattggttctggactctttctattctcttcgtcatccgaatcagagtctgagcccgaggttctggaagcaaaagtggatatagcgcctgtaggccgaggaagacggggcgacgtctgcccggtgtgcaggaaagattgccattctagcttggcagatcgaggaagagatgatggttggacaagcagtgttggaggcggaattgatgatgtcaggaacaaaggattttctgcttcggtctgttaagttgataatatcaagggtgtttgatagataagcgaacgcaagagactgatgataaggaaatgaccggaacatacctcggcctctagagtcgtcgtccatgctgtccttgctccatccaaatcagaccaactgctgacccatccgatagatccttctatgaagcaccgttttagatcgcttccaccagtgccctctttgagcgctcggatgagcgatcgaacgtgtttcaagcaaagcgctgcctccaaaggaaaggacggaggatccggaagagccaacgtagctggaatcatcggaatctgacccgataaggtaatgcgagagttgacctgtgaaaggtcgtatgtttcggaacaacggagcaaacggtcagttatattcgtaatcgacatgacaccagtggcgagaggggctgacgatgaccgcttgtgaatacggtccgatattggcgggagcccaatggctcagtccttgaacatgcaatcctcttctttctctacccatctgattccgggtgtttcccttttgtctgctctcttcaaaagcgatcgcttcgaagagaatccgagtgcccttaggaagaggaacttccacacacgcacgcgctggcggagacgaatggaagtgagctgagtaagccttattgatgactgggaaatcagccatatttgcaatgtatacagtcagagactgtaccaccgagagaggagtcggatggagtgcgtctgtttggtagagagagaagagggattgaccaataagaaacgtatatgcattcgcattcagaacgaaccgacagacttttgataattttgaagcattcatcgacctcctcctcgagactcatctcgtctttctttttgatacttggtccactaaaagcagtcacatcaccaattgaaatccatccaccgtttctgcaaatgccaaaagtacgatctgagcgttgttcttccatacttctgatgagctcagatgagctgctctgtttggtgatccctgataaagcgctgtagacctgagagaccgactctctgacctccttgccttgttcgtctaaccagtcatccccgtattcttcttctagatcatatcccagcaatgctcgcgcatcagcagtagtgagaggtttatagtcaggtttaggttggagggatgccttttgaatcagcaggtgggccacaggtgcgacaggggacggatcggtcagctcggtcatcgtttcatctctgtcagagaagacaggttggctcagtgagctcatgatcggttgttcgtccgtatcgaaatttggaatatgaatgggtaggacaagacctacaagactattgtgtcgtgaaacatggggctatcgagggttaccgtctcatattcgcctccttctccgcagatatggagaccatagatcgagttctgtaccgaggacgggtaacgagaagaaaagtttggtaaaaaatcaaagggatctcagttcaaatgagcgaaaataaagtaaacacgagaagcaacgtacaagtttgaatagttctctcctcatctgacccaagtcttttccgaggtgctcctccttgagacctactcctgctaccttgaccaggatcgctcgaaggccagagttgatcatccggggaagcagtaaatcttgaggctgttgccatagataagccagtgaaaccaaatcaagacgcgcgcacctgatgggttccaaggttgattgtgatgataggctgtatgagtccaagacaatgtagaccagcgacagctcgaggaaataaagacggacacatgttcaacccggatccgttgataggaggacaggatggcccctaccgagactgcttcagcgtctgggtgattttcctgtgcgtcatcattacacaaggaaggcagagggagtcaggaagtgagctacagtctgccttctccgaatacgtcgaagcaaggacggaagcaggacgtactttgacgagcttgagcaattcaaacagatcttctgtctcatcgccttctgtttctctatcgccatattcagcatctacattgatcggtttcccttggatgatcctggtgtataacggtagtctcagcgcctgagagatcgtcggtatgagagatagtccgacagtttggtacatgaagctgtcgagctcatccgtctgaggcggaggaagcaggccggcaacggcaataggaggatgtccgttggctagacattcaagtagattgaagcatgagtctttaccaccagagagaagaccgataaccttcatcgttcgagggattgtcgagtgtacggcgagggatgaacgagaatgaggggaaaaggcatttgccaatcatcagaaatcaacggtcagggaagtatttacgtgcggcacacgaatacataactaaaccaaccgctacgcactcgaggcaaactctggctactctgagatatacgttgtgtatttatcatccatcctgacgtgcttagcagtcactggcttttgcaaacatctcatgacgaaagccatcgcagatcaaattctagatagagaagaaaaccgctttctgccggatcccaagacgctcaaagccaacacctgttgaaaggtgggaatagtagccagtgcggaaacgtagaaagtgtcaagacaaaaaagagaccagattgaatagaagaaaggcgaaaggtgaagggagaagggagaaggaaggaataaagaggaaccaaaagccacaaggtaactggaagaatgaacagatgaacagaaagaaatatagacgaaacggatctgtaaatgaaggaggaaaataaacttcaacagcattcaagaacaaccagacccaaggcaagatcatctactgttgcttgcctgtaggatagtagaaaaggagcaatatcgaatcagcttatcagctgccgttccgagatggcagatagcagatgtctgagagagaaaaaaacatacattcttgaggatcctgctgagagcttccaggtactgggtgtcggacatcctcctcctcctcatcctaggaaccggccgtagagacgagttagttcaagaaccagggttcccaggacaaatggtttcgtgaggattaacatgtactcacatcatcaccatagtcatcttcatcaaattcgtcactgtcatccaaatcatcgaaagcctcctgcattgccttgccggtgtagaagtcgatggctcggggaataatctgaacaggaaagcacccgggttagccaacgttgcagccgacacaaaatagatactatttggatagttacttactcgctctttgaggtcctctccgatctatagtcaattcatgttgaaaagtcagtcgagtgagtaacatatcacgatggagtttaagtgctcacctggtagtcaagctccagcctctcgtccaaatcctcgagctcgtcagggttgagatcctcctcaggggtatcatcagagggaggtgtagggggtttgaagaagttgactgaacaagaacaaaagtcaaactctgtgtcagcgacaaagaatcactcagggttgtgaatcatgcgtagggaaagacatacagaaagaatcggcaggaatgaccttcttgactactcgtgttcggttagtgtctacgggttaaaataaaaatgatcgcaactgcggcaatcagccaaacgtttcttctatgatattgtgaacactctaagacaaacttactcttgttcctctgcttcttgatttcaaccttcttggtcagatccttgtcctccttccacttaatgtcagttccctcggctcggtcgtaaactaagggagagatcacatgttagtataatttgtgcgaatgttgaacaagaatgtgaacacagacgtaccgaggtcgccctcatacccgacctcctcctgaatagaaatgaacattcgagatgggcaagtccgttagaactgaccaatcgagggtgaacaaaaatgagagtaacgaacctggtagtggtaggttttctcgagtttggagtcctcaaagtattcgttgggagcaaagtggaagacaagggtaaatccaggcttcgtgccctcgaggaacttaagttcgatgttcttgagtgatcgcagggcctgtgtttgataagtgaggaatgagcattcaaatcgggtttactgaaggtcacacatgaggccgaaaataattttgaacatacatcctcatcctgctcagtgactggaaacgcaggagagacagttagtccggtacgcacgacgccacaggtctatcaagtctcagacttactgagctcattgataccaatgtggttcttcaaagcggctaaacaaggtaatggagtgtcagctagttagccgaaaggaagatcttcaacggacgcatatttgattgaggtaaacttactgagccagaag

SEQ ID NO: 1775 - DNA, 7960 bp, Xanthophyllomyces dendrorhous
cttggtcttgtcatcgtcctcgttgatttcctgaacagatgcagactgctcttcttcgtcatcatcaacggcttcaccggcagcgacctcagcatcagtcggctcagcctctccagagacgatagccgttcgtcgagcatagataggggcgtatcgggcggcgaactagggaattgagcgagacccaggtcagtcgtgacattggagaaagagagagcagaaaggaagagcatagacaaagatgcctaccttcttctccagagcaaggatctcgagttggaattcactctcaacctttgcgtgctcctgctgaagacccttgaggcctttcactcgctttcggatagcgggaggaagtgtctcgaggaagccagagttagaagacccaccaaacgctcgggattccatcaggttcaagagggcggggttctgtcaaggccaatgaacgagggtgagaagaaagggccgtgtttgggtgaatcgcacaaacagtgattggcaggggaaagcaaagaattgaaacgtaagacgggggtgtcagaagatcaactggacaaatcacattgttttgttctgacgacggagaaaaggaacgtcgaaaatgaaaaagagaaaagagaaagaagagcagggtggaaaccaaggaggaggcctctctgctagaaagatagcaagatacctcgacactgatagatggacgatatcgttggggaaggatgacttcgggtaaaaaataaacggtcatcactgtgtattatgaagacgacagctcaactcgacccctgccacctatcggacaaaacatccactcatcgctcacaacgctgatatatcttatgaattttcatttccctttattggaattacttgatggcagcagtagatcggccgaaggaagatgatgacagtactgtatcgatcaaagacacaatgcactcacgttggccaacaaagaagcagggtttccaccagtgtgctcactctcatcctcctccggcacgttcgacacacctggagcggtcgacgaggcggtatgaagagtagaattagcaaacgagttggcaggagtgggagcagaatgaccggaagaagagggaatatccatcgtgattgttttgtcaataaagagcaagatgggcgggttcagtcgggttggggagagaaagagggagagatgaaagaaggattctgatcagggtaatagaggaattcggatgttgtaactatgtcacgtgactgtcattgtgtaaccactagaccgccatgcatccacactatccgtctgtatgtctgccagtcgatcggtgctttcattcgccatcgttcgagggggagagcttgtgaggaggttgcaggctgggtcgctttggatacatataatattaaccgttagaaagaaagtataggacaaggattgctatatatatgtgtatataaagaggacacccatttcgagtccagtctctacctattcagaacacgccgagatctaagtggacagacgaacccgtacaacagtcagggaatagaagagagaagacagaccctttggacgattaaagacactggttcactcaccagttgacctccttggctgctagtcgagcctcaaacttttcaaattcgtctagggcgacctgctcctcttcacccaggacctgtaatgaagcgatacatcaatcaagcacacagatggtcagcggtgcaacgaagagaccttctgataaaaagaaaccccgacttaaatagttgggacatacctgttcgacacccttgacctcaggcacgtagtgcatcaacatcctctccactccgcttttgagcgtcacagcactgctcgagcatccacggcaactacccttcagcttgatcttaaccagcccgtcggtgtcctcgccgaaacccataaactccagatcacctccgtcctccatgatgctcggccggatccttgtggccaatagctccttgatcatcgcaaccacctccgaatcactgtccaaaatcctcgtgtcttccggctccgaatcttcggcctccttggagccttctttgaagagaggcagtccggatgagaagtgttccataatgatcgagaaaacttcgggcttgatgagcgaccaaggcgtagcctcatccttctgaacagacacgaagtcagggccgtaaaacacagagagtacaccctcgatccccatcaaacgaattgccagtggagaggctaaagcagactttgtgtcaagaaactcgtgggtgcctccggacgaaagaaccggtgttccgggaatgaattgaagtgagttaggattcggtgtggtctgggtctgaacgaaaagtgaacgggctttataatcgattgataatgttttggaaaaggttcatagtcggtcctctacagatcagcattttgtgtttgaatcaaacgagttcaaaacatatctcaaagcttacacaaagaaggagttgacttgaggaccgaagaccgagaaagagtcgagcgtggcaacccgatgaaagatctttgttgggtcagatacggcgacgatacgtaggacgatcgaaccggtgcacggacggcctgtttgccccatgaggcagctgacgggcgagtagcacgaagagctgaagcagcaattcttgaagtggaagccatggttgttggtatgaggatgtatagggttcagagaaaggcgaaaaagcgtcttgtcacaggatggatgattaatatgaggatgtaaaatgtcgaatgagagcaaagctgatttattacgcgagttcgctctcgcttgtgttttgccacctttttaaataaatttatatctcgttcacggcaaccagtccgactggccggccgaacggacaaaaaaagaagaagaaaaaaaaagagacacactctattaatcatgcatagatgagcaagcagagacactatacagatgtattcggccagaagagaaagacaaaaaccgttatatatggtcggagagaacgcatgtagaaaataagtatgaggtagaaaagggaaaggaaattctcaaagtatataacagagaagctgtcatcaattcaaccgacgttctcacagagaccaaactttgacggtagcatccttgccaccagaaaccatgtatttgtcttcgtagcgcagcctctcggcaggaagcgtatgtccattcgtggtcagcctagaatgctgatgggacgtccggttgtaaacctataagacagaaggtccaatattgatcaaggtgaggagaaagaagctgtcagtctacggaaagccgcagtgaatcgcatcaagagatactgacatcaatcccgttctcgcctgtgcaagaaatgatctttcgcgagtcgaactgaacagaagtcacagggaattcatgtttcagaacttccgaaacagcgcccatacgcagatcccaaatctgttaacacgacccaggagaaacaagagcgcatggaatcagattttgaagatacgaccagacaagtagttcaatcataacatacccggatggtcttgtctagacttccagtcactatgttcatctcatcgaactggagacaggtgacaggcccggtatggcctagaagcgtcctatgcgcttgaccagtcctcactgtggaaaagaaaataagtgataacattcagtactgagcatgatgggtgatttaaagcgtaacgacttgactcactatcccacattcttacgccgccatcctcactcgcactagccaacgcatatccccagaactgaacaccgccgacaaaatcttgatacatgtcccaacttccatccgaatatggtggtgtcggtacagcaaatgcgcctgatgtcacagaagccaataggtttgaaccaggcaggatgctttccgatgtcagcgggccataggggtcgaaagacgtgggtgctggctgaggaggaggtgcgctagagatagcccagagaatatccattgtcaggacacattggcctgtgttgacatcccattgtcggatggtcttatcagatgaaccggtcacctggtagcggttgcgaatgatttgagccagacgatcagcttcagctcgtcatctctgtatgcgtcaaacaaaagacgcaagtcaacttactaaacacccgctttcgtagtacaaacagctgacagccttgctgtgaccttccaatgtccttatacacgggtttccaacagaagtttcttcctttgaagcctctcccccatcctcctgaacattattcgacgcgctggcgtatatcaccgatgagttttgcatgtcccttgccagcttgtcctcataatcatcaactagacggagatcccaaagacggatatccccatcaactcctcctgtgaagcagagctggtcctcgcattgaatcgctttgacagttcctgatcgaaagaatgaaccatgataagaaaacccgcttagactttccaccttcataggatgcaagagcggataacttatacgaacctcgatgtcctcgaagtcgaccgctttcttctccactgcaaagatcccagactctcaaagagtcatcggccgcggcggacacaagtactccgtaaggttcagaaaagtccaacgctgttatcggtgctgtatggttgaccaacgtctgaccccaacagcatgtttttataaccggtttttagtctagttaccagacagaaacgcgttgcaggaaaaacacttaccatgaaagcgacacctgaaggtagatcatcatgctctgaaggaaggaaagcaggtcccttccttcttctagaggagggtccggcatgctgaccggtggcatcggctatacttcgattcccctccggggttatcgataatagcctatcctgaatgccttccactgatttagaaaacaaaaacggacaaatgaaagagctagttagtccgaccatcttatgaaagaatccgatggtatttgtttcaacttgtttggtgaatcgaggaacggggcacgaacgctcatcttgtaatcctaaatcttcctcttttaacttcaggatgtcttgttctagttccatacggatcttctccagcgcggatatttttgatgaaagctcctcgatctcggagttgattaaagactagcatgcgaaacccaacacaatccgtcaagaatatataccaagagtatttattgaacaggctgactggacgcatacagatagatgacacagagaaattacactaaccttcctgacaaccagattctcacggtcccatttgatctcatcctccatcctcaagagttcctctcttccgagttcatgcttggcaaacgacccgccctttgaagatgaggccgcgagctttgctttttccctccttctccttcttcgttccttcccggtcatcatcacaccctcttccacttctccatcctcgttttcctctcctgaggctccaagaaggccactattttgcgctgccagtcttttcacacccagccgaccaccacccagtccgacctcggccaagtttcctcggacctttcgccttcgctccttcccacgttcagagctcggcacggtcgcctgaaaccctcgaagcaaactaactgccgtgttgctatctgtagatgacgatgaaggctctgggaggggggcagacagaagagaagggatcgcctcaaggatactgagcgaagccgaagttttctgacggggtcccaaagaaggcatggtcatcttgagaggggtcatgatggatgtgcgtgacggaggtgctaaggtttgacgattgaccggatgatttgatgcgttggctataaaacgcggattgaatatcataggagccactatttaattgatgaggtcgccaatatcagcatgttagcttgagttcagaagcttcttgacgagtaccatagcaaggaggagagaagagaaaaaagagatcctctctttttctgtccacacatcgtcttcgtaaatacagagacatgaagacgtactttcatgtaaaacgtctccaccattggacccggcgttccaaccagagcctattcccttgacggcatgtccaaggaccgcaaaggaagaaggagcggtatcagttattggatccaatgcagctttgatcggcctctgggattcatgaggttgagatcgatctgcagaagatagagatggctcctgcggacgagaggtcgagtcggagaagaactttggcatatagactgccggaaagtatcagactctatctatatacgtagggttgtgtatggaactgtctttcctcggagataacttgagggtgttcaagaggaaagatgtagtttgggtcgccagaccgagatacgcacaagatctttcgctgaggtcattttccagcaaagctctagcagcttcaaataaactacggaattgtccagtccgtctgatagtgttcgctcgtcgattctctaatacttttctactcaccctcatccgcttctctgtgtcgttctttttcctcttccatcatcagagccttgtcatcgtacgtcctcttcgtcatctagtcaacatgaactcattccatcaagtctgtgcttacttgttctctttgtatctgcccaagatagatgtctgctgtgagaaaatctgccaagcttagcgtaaagtcgctcacacagtacctcagcagctacccctccgacaagccaattgcacttccggcagccattgaaagactgaagttctctgtcgccaatactggttcgaaatcgttagtcgccgtgctcttctcttagttcgttcgttgctgtttgagttcaaactgttaagactctatcccgattcttggatctgggggtcatttttttttagacagcagtcccatcggtttcttggaaagacataccttccagagaatcttgatgagaaagagttgattcagcgaccccttcgacacttagcctataacaacgtcaatgttcctttcgagtttgctctccgtaaggacaacaggccaacagaagagactaaggcaagcaaagagagtgcgaaaaccctcgacccatattggacccgagagtttgtcgacatctggacaggtatgttttggaagcaatccatgacctgattttgtacttattacctcttcaaccggctgatcttctcttcactcgcaccaacttcatagagggttcatcttctcctatccgactggacatcactcgacagccccaatcgaagattgtcgagcttcttacctcattcgatgcttctacatcttcgagccttccgtccgtcccgttggaggagggtcccgagctagatgcctacgtagtcgcccgaaacgcatctgatctagccacctacaaagcttcttccgagtggaagacgcccgagcagctgatggcccatcgggaacatactaaactcactgtcgagaagacaaaggcagaggccgctgtgaaggaggcagccgatgaagcggacaagcaggggccctatgcagctctccctctttttgggacgagcaaagttggctctaagcttggagagaacgttcagaggacattcaatagcggagtagagaaggtagaggagacgttggagagcgtaaaggaggatttacaagagatggttgggtcgatcgagaagcaggagtcgaagccatgaagaataaaaggacgacgttcagtaactttggttctcggtcataaacattggttgtcatccaagcttttgtatcatcgcagcaacaaaaattgaatatattgagatatgttatacatattgagctgaactagcgtatcatagcatactgctctttctggtcaagtgagctgatcgcgtcgttacaggtactcatagcgactgaagaagtcactatgtgagtgtcaacgcaagtgattgatggtttttgtttacggtaatgatgaacaaaaggttgttcaaaaagaaaagatagaaaaaatacaatctagaccgatgccgggatcga

SEQ ID NO: 1776 - DNA, 492 bp, Xanthophyllomyces dendrorhous
gccactacaccaatcggccaattatatctggcacaattggacatattgaatatttcctttggaaggtttctttttggcttcacatcttcattttcctcttcttatcagcttcaatccacttttttttatcattttgaggcaacactcatagaccttgcgtgaagcgtttaaacgtgactctgaagagcttcaaaacttcagtcagtttgtctgtattttcctggtttctcaatccactcttacctagacacctaggtggtgtgtatatgatcttggaagccagccagacagacactgaggactcaactaggaacaaccgcaagaacgagagtctactttcgctctgaattttagtggagtttcattgcttgcattgactcttgtttacaaatcattacaaaactgtatgttctccggctccaacggtgtgaacaaagagaagaggacaaaagcgcggctggcagtcaaaaagagtggagattgtaagaatcg

SEQ ID NO: 1777 - DNA, 26692 bp, Xanthophyllomyces dendrorhous
caactgagctaaatccccgtcatatttaatgctgtgaatgcattctataatggatggaaaaaaataagaaattgaattagtttactgaaatacaagggtgcaactggacttttcgttccggcacttgttcccactcaagtcctcactggtttcccacaccatatacacaccacccaggtgtttcagtaagatggattgagaaatcaggaaaacagaagggaaacccgctagaaatttatagctcttcggaaagagagccttgggactccgcgcaaacggaagtcggaaggtgatgcctcaagaatagataacaaataacagatgaaatcatgtcaaaactgctgaaactccaacaatgttgaacaaagggaaagagggacgtccacatgacaacccatcactgtttcctagccaacataagtttcgaatcatcgttggacatggtaaagaatacatgtctcatcattgataggtcgtcagcgtttcaagatatcgaatatttcacaatcaactggctctactgaagaaggagaatcatctttttatctcctgtataacgtttgtgttcattttagcaaatgtatcagaaggatgctcggcagcaacaaggcatacgagaactcaatctaaaaaaatgagactagccccatgggggggtcgaacccccaaccttcagataatcgtagttgtaaaagtctgacgctctaccgattgagctaacagggcgattgtgacaaaacattgtcgatgttcatatgatcatgttcggaaaagaaagccaacaagaatagaaatcaagaaacaagttgtgtttcaactttagttttctatgatatttggattcagagaactctttgaaatcagaaagccttcgtttgcgatctcgttgattgatgatggcaaaacagtaagcatatccaacccacgatcctcgggagtggcccaaacgatttgactgataaaacctagcttggctccgtgcaaattacttctatcggttgagaaggcgatcggctggtaaacccagggtgcaccattttcatctaagcttccatttactggacttgattgtcagtccttcaactgcatgttttgtttgtttgacacctggacataacttgacctgaaacacccttccttgtcatactcttggttcgattcttggagagtccagattgtctgggtgtattgtcagtgctgaagttcgggcggatcgacttagcttgttccggctggttgcatccaaagaaatatggctgttgacttgaattgcattgattggtattgctattgccgtagacgtgtctttggtcgtcttttattttgacctccttgatatgcgccaacagagccgtggtcttatgttctagcaggcttcgaaagttaccatcgtattcaggaggactcggacactgtcgaaagccaagtgttaggccttcaatattgatgtcggatagacctcgtacggattgcccttgagtctgtcgagtacgctttggaggtgtcccttgttcaagatgtcttgtttaaaagcctcaatctcttccggtggatgtccatcccatcaagatatgtgactgcctttatgtgtgggcatcgcgcctaaatatatttctgttgaggccgtattatctgagtacaagtgggtttgtcatagtcgtcctccgaagtatctatagagaagacacgatgcttgcttctttctggacgatgccctatctgatgctgatctgtagtatcgacagcacagtcgatgatgcctttttttgacctgccttcgagggtaatgacgcggccttaccccttggactaagttttgtaatcagagtgtccccattgtctataattctgatacgattgaccgagacttctcctagcagaacatccttggcctggtaattccaggaatcaaagtatccatgcagattgagcaagacagggtgcgtggtgtattcactcaggggtttccattctccataggcaactctgatctgggttcgcgatagattggcagttaacccgcaacgctgtttccaaatccaaaacatatcaacattagtcttcagaaaccggattatatgtgaacgacataggaaaccaacagagataacctgagtcagagaaacatacctatctcccagcccaagtattcaccgaccgtggcagtcaaaagatggagtcattgtgcgacggtaaagagatcatcagttacggttgatataagtgatgtctacattgcctactctgaaactgcacacaagtgaaatggtcaggattgggaactttcgagcaatgccccgaggatgcatgagatgaaacaaaaacaagcccaaacgcggatttgaaccacggacctcaccgttacgagcggcgcactataaccacttagctattcgggcctattcgactgcaaacttacccatgaatatatcgtacttgcatcactgaccaccgacagtcggatgtagcgggcgagacttgtcccaaatcatagctcttaaacttgttgcagtgcagtcagatacacagattttgtcaaatgtgatagtatatgcttacactgtaggtttctgttctctaggagaccagtgaagcatgttggttcgtctcttctctttctctgttcgtctctgttcgtctgttttggctgttttcctccctcttctcgtctttcggctctcggatacacagcagtagccagcctcttcctcttgcttttccagctctctcggccgtcttgcttgcgcctgtgtatgtgtatgtgtgtgtgtgtgtgtgtgcgcacacctgaaagaaccagtgtcaggcatagagagagctgggactatatctaagtgatttatcgaatcaatcagcgcagaaagctctctggtttcgccacaggtaagaactatgaggatctatatatgatgtataagaaacattcgcgctaacagaaacttgatgggttgtacgaaagaaaagaaaaagttgaaaagcaaactcttcgttcttgtacttgttcccagtcaagtcctcactgctcttctaaagccatacacacaccatccagttgtctcggtaagaatggggtaagaaaccagaagagaaagaagaaacagaaatagaaaaggagaaggaaacagaaaaagaggaataaatgaatgaaaacgcgagagaagagagtcaagtgatagctagggtgttgtatcttctcagagagaagaccttgggactccgcgcaagatctgagggtgctatcttggtaaaagcaacgaactgcaactgaaattataacaagactgccgaaatgtcaacatcagattctgtgcttctgtctatgttcctctttccggtcgtctactcaagaagactctcactattatctgtgatgtgtatttatcacgatgatactgttcagaaattaaataatgcgaaacgatgcaacatacgaactctgatgccaaggtatgcatttatataattgaaaactaattcctctttgacttcttaaccacacgcttcctcccgttgtatgatctagtagcttgaaggtctccgaattttcgtttcgcatacgcctgggactcctcatctgccatgagctccttgaggatcgagcctgggcgagcagaagactccgaacgaagagtagtcgattggagtactttggattgactatgaagtgttccaatctgtgagagcagagcgagattgaacaaagcagaagaagaaaataggataagtgattagactacgaaggtcaactcacagcagacaaagaaagaaggcagaagatacatacagcgaacacttcaggcacatgcttaattgatccctgacccttgtagaaccgcttgggatctagcgaattccgaagcttgagagcgtggtactccctgaccatctctttccgcttatcttcggggatcataggcaactctccccaagcaaggggagcgttggctttccttgcctggaagtaaaagaggtatcaaagagcaaagtgaatcagaaggtattaaaagagagcaaatcagatggacaactgaggatctcgaaggatagatatcgagcaggcagagaacaaacctcttgagcttctttcttggatagagctcgctcgaccaccgtagtatctaactcatgttgctttttaataattgatggtccagcttctgcatttggcgtggcggtagagagcgagtgaggggctctagatagcttggagctcgatgttcgggaggcccgagaaaactttccttcttgtttgaacgacaaatatggtgttgggagcgaaggcgcggttaaagagggaagttttctttatgattttgtgagaaggaaacaatcaacattttcagcacagtttttgtattcttgaattccaatcaacaagagaaaacgaacgtttctttggtttcctcttccatagtgagaaccatctcctcactagccttgcgcaaccgctcttcctcctctgatctttcggcgttcgcgtacgctttcgatagaagggattctagatatgcttcctcgtccgaatgattctctccctctgtttcgtcatcttcttcttcatcatcgtcatcagacgattcttccgaggaagaactctcgtcctcagagtcttcaaataaaattttgctgttccctatatccttcatctttgggatcgagccattcccctcagtggagtctgactcttcgatcaaatttccaacttggtcttctacgtcctccatactttcatctggctgttcgctcagtctttcgatctgaacatgctcggacacgtcggtctcatcatcaattgtcttgttagaggggacggacgtggtcgagctcgattgggatgcagagaggttagaagcggcagagacgggggtagacgtcgaggtagagtgggcaggagtaggtatcaaactcgtgtcggatgaattttttgatttcgaagggcttgtagtggaaggaagcgcgacagaagcagcaacgggagtagactctgttgaatacagaatgatcgttccttcttcttcttctccgtcgttgccatcaatatcgacggcctcaatggtcgacccagtcccagtcttgactgaagactgcttcttgctcagcgtcagtcgggagagaccctcaacgtctccctcgaacaaaggctcaatctccttctgctgtctttccatcgcttcttcctcgagctcatcatggactgctttggcaacaacgtcagcaattacatctgataatggctggtgggatggggaaggaacggcccctcgagctctggaaggtgacgttgatcgggttgaataatgatgctgggctggggaagcgatggcagcggcagtatgaactgactgactgacggaatgagaattaggagtctgttttcctgattgagccgatgagggtggtttaggtgaggctgtggatcgtttaggggtagagtcgttgctatggatcttaaacgccttggaaggactagcttgtgtctgcgaaggactaatcaagtttttaaccgattgcgaggagctagcaggagaggaagcagcggaccgtgtggacgctctggtcaatctacgagtggtcggagtgtctgacatagatgcttgaagaagaggagaggagaggagaggagagaggaatggagaaggctgaaagactgtctaaattggttccaagtctaggatgagaggaagagtttttggatgggaggaataggaatttggccggtggcgtttgatacagcatatgtcacgtgtcaaaccacatgacgtccctcatgggcggcaacatgggctcatcgggggtcaatctgaaatgaggcgtcatccgaccgtctatctcactcattttccttctttcctcttgcacttcattgtccattgatgtcttcatggtgctttcaacatcaccagaacaaatagggtggagcaaagagttaggaatattttctgttttcttaattttggttgttttcttttttgtttgatttggtttcttcgagaggtctctgactgatcgtcgtcctttcacacttggaaatcacagacctgagaaaccaaattaccgttcgtgctttccttcctcgatctggtcaaagatagaagacaactactcacataaggaagcattacttcattgtggctcagtagatcaggaagtctcaagttcaccgacccgtctatacgttcttccccgtccaacgttctatcacgatccaagaacatcctctttcagcgttgtttcagatatcacggccgaatcgatacaggaagaaactagctcgggcgaagactttacaccatcctatctatatataaaccaaccagatccagaggaaaccgagggttccgctctgtcccttctttgggatgatacaaactctctggacactgtcggatcgacagcatgctcggccagatccagatgtcgtcgtccttcgcctggccagcgccgagaacggaaccctgaacttacctctcaggctgtttcggacacgcccgataacgctcctagtagttcccccagacggtccagaggcctttatccttcccagagctcagccaagagacgttcagcgtcagcatcatcatcatccaactcatcctcctgctcatccgtacttccatcatcatcctctttgacgcacacaaggactcgatcccaatcgttctcgctcgagcccacgatcatggagacctcgaacggatatctctctcctgcaccacgaccaatacctacaccccgatccgttcgattcaatccccgaacccttctccgaactgcgtatggatcctattcatccgacagatcgggtgagctcgacttggcctccccagcggtcagtttcatcggttggcgatttccgaatgcaaaggtagcaggcaagaggagggcaatgtccctctcggtcgaacggtccgcctcgatcgataattggacagcattctatgggtccataggctcgaccccgcgtccaggaggaacttcactagaacgttcatcgaccgagccctcaatatacccttctaggtctttgcccggatcgtcttacctaaccaatgcgcctcttcttgcaagaccggaagatcctttggcccgtccggatttgatatcagatagttctgagcctccgtggtgggagagaatctgggaagggtctttttgggcgcaaaagtttggtggatgctgctctttcttgtctctggaggacgaggattggtcgggttcgatcagctccatagatcgcggggtaagatcggcaggcgattcaaacagaggattcttctgacgtgcagacacagttgtttgcatcgactcttcttccctctatctatcgtttcctctttttctttttctttttctttttctctttctttttggttcaattaatctttgacttttcctttgtactctgtttgattttcgttagacttactggattatgcccgagtcatctcctccatcatagaattctttaaaaatctcattctatcctctcttcgcctttgtaaagctaagcttcttgttcaactgtacaattatatgccactttcacagatcctctcctgctttgatgaattcagctatccacccaagtctggatacgtctgataggaatgaacgaacgcgtaaccaaccctaacattctggttacaagtcgtaaccacaacatctcaaaccgaaatgtccaacacgctttctccattctcattcaacctgactctggaagaaaagacctggaagagcagacggacggacagacaaaggaacgaacggacctactgttagaaaaagcttgccttcaccacccgcgaactatcgattagacacctgaggatggattcacccaaaagatcttttccgtccgaaagtaccagtggtttgccctccagcctggagacaaaacgactcaagctcgccggctcgccatcagatcccgcttctactgctgatgttgccgatgccgggcctgtttcagaagtcgaaggagcaaccgcccatgaagctgcatctgcgcccggtaagatcatggagaaacaacctatcgactcgaccgcaattggaaacctcagtcaagctggagtggatgatgatagaatggacgtcggtacgtgactcgcttctttttcttttttttttctctccctcttttctgtactattgtttccttcttcagctactctatcccctgtgtttcgctgagaaagacgtgtcaaacatctgaaggaagagcttactgaagctactttatgaagttaccaatgggatggaagggagaagctaacaaaacgcgtttttattcatccacatatgcctcgcttgctcgttcaacaaacagttcaagatacttccatcccttcttccaatacctcagttccagctcttgtgactcaactcgaatctgtaactgacacagcatcctcgatcgagacttccagacaagaaccggtctccactacccttccgaacgcgtcccagctcccggaatctcagccacaagacgatgttccttcagagccggaggacgctgaagaggacctacccgcactccgagctcgagcagctgcctacttggccgctcagacccaaccgatcatcatcccttcgtactccgcgtggttcaactttgccacgattgctcctatcgagagacggtcgattccagagtttttttcaaacaagaatcgaagcaaaacccctcagatctacaaggattacagagacttcatgatcaacacatacagacttaatccaagcgagtacttaactgtcaccgcttgccggagaaatttggcaggtgatgtgtgtgctatcatgagggttcatgcctttctggagcagtggggattgatcaactatcaggtatgttctatgaatggtctccatggataatgttcgtttcgtcgcgtctttttgcctgtttgtctaactcaatttgtgcttttcgctttctttcttcttcactctacttccgaaacttttcactgtgtctgtcagattgatccagatacaaaaccttcatcacttggtccaccctttactggccatttcagagtcacgctcgacacccctaaaggtcttcaacctttgcatcctgggatcaagccaaacacatcttctcctcagccagtcgcgtcgacttcgagaccgacaaccggatctcttaacctagatctccgaaaacaagtctaccagacgacgtctaaaggacttcaccgatcgattacaccgaccgaggggtcgaccttggcgtccaagaacgccggtctgaacggatcctctgtcggtggtcaacagaaagcgtactcatgcgacacgtgtggggtcgattgtactcgtgttaggtaccattccctcaaggatgctaaatactcggtctgcccagcttgctacctttcgggtcggttcccctctacgatgttctctggagatttcgttcggatagacgatgcagctttcaagcatgcctcgacggatgactggaccgatcaagagcttctccttctcctcgaggcaatcgagatgcacgacgaggattggacatcgatctcggaccacgtccaaacaagaacaagagatcagtgtatccttaaattcttgcagttgccgattgaggatccgtatctggcagccgcttcggcagagactgatcttggtccgttgaagtatgcggttgggctaggtgggaatgccgaggctttgccattcgcaaaggcggacaacccggtgatgagcgtggttgccttcttggcgagcacgattgggccgggcgtggccgcagcggctgctggtcgggcgatgggtgagctcacaggagacctcaagcaaattgcgaagaagccggaggaaggagactctagagcggacgtgtctgagaacaaggatgagagcgagaaagaaaaggagggagagcagaaggagaacgtagacgaggaggacaaggataagccgagggaggtagtcgaaggagatgtgtctatgcaggacgacgaggcggtcgtcggaagcccatcgaaagagatcaaagaggagaaggaggatggacagacgacgaccgaccaatctgacccggtctctgttgctcctgctccatctcggtcggctctccaacaggctgcgtcggtttcactctctgctgctgcatcaaaggcatcggtgctggcctcggaagaggaacgtcagcttcagtcgcttgtatcccggctagtagctgctcagttgaagaagctcgagctcaagatggctcatttcgaacagctcgaagagatggttgaacacgagagacgggcggttgaagtggctagacagaatgtgtacagagagaggatcaaggtgcttgagcagacggccaaagttaaggcaatgatggagcaggcccaaggtgcaatcagagccgtagaagggcagattggaaacgagagagctgcttcggtcaacccagcggttcgactagcggtcaactctccttctttctctgctccaccgcctgctcctgcccctgcctctactttttctaacgccttcacatctgctcctgtctctactccttcgacttcagtcgttcaaccttctctgcctcctacttcttcctcattggctcctgctggtccctcacccggtttgcttccttctgggtcgccttcgaccgttccatccgcacagcctccggctactgagcaaagcttgccgacaactgccaccaccatcatcccatctactgttcccacgcttactgctcctacaactaatgcgccggttggatcggcaaatcctgcgatggtgttctcggcggacatccaggccggattagatcagctcaaacaggcgacggacaagtcgacaggacctgtagtcggcgaggcggatgtatcgatggaaccgagtctatcgaccgacgaatctgctggtgagtgagcttctagaagaaaattgtttcgtttcgtttcataatctgacgacggggcttttatgttgattgtctcgatcttccttctctttccacagccttgttgcctctataacaaacatgcctagttctctaaaggccagatagcctatggagatcctttttatacagaggtcgctctaccacatataccacttctttgtctctacctctaccctttctcgatcctttcttctttcgaccttctctctgtgtcctatttagttatatttccatctttcaattcttcctacctttgtcttggtttccgaacatttatttttcttgttggttggatcgaccgtgttatacatttgttcatgtgtgttagggaacggatccgtcggttaaagccggtatgttacataagctgctaagatcgaagcaagacacaaaccctcagtccgagggaagagaaacctcgtcaacatggagacattgactctcaacaatgaggacaagcaaatgaacggggcgcgcatggagaggacacggctagagagaaagtagttggcatgagagcgacaaaaaaaaacagaagcaagatcgtcaagttggatgttgaagatgtcgagtgatcgaggatacctcgtgacctccaagagtgagaatcgcccgctgccgaccaattgccgttctcaagtggatctttcatccacctttgctctgttcagcgtccatccatttatctaatcatactaggcatactcaactcgttcatctgaacttgcgctcaccctgcctcaagaagatatgtcagacgcgtcgagtcagccgaagaagagaagacggtcatcagagatcgtcgaaaagcctcgacaagtgccttcgtgtgattgttgccgcatacgaaaaggtaagtcggatctctttcaactcttccgttctgtacttgtctctctcgatcgatcattgctatatatactccactaggatcatctgagtctttcccttagaggatcatcgctctttgtcgacctacggtaacgcgctgttcgacggacaaagccgtgggtagggttcacaaccagtcagaacgcaagcttaccgtatgcgtatgtcgttggttcgatgaatggacaaacatccggacaaacggttgggatctatctggatctacctcaatctgcacagtgaaatgccacagagaacctccgttggatccgtctatcaacctttacgatcctcaattgaagattccgccttgccgacattgcttatctctcaagattccatgtctgtacacatatcatcccaaaaagagaggtcccccaaaccaatacgtgaagtaagcgtctgaagtaatgttatcttgagaatcgggcttatagtttccttgttctattagaaaaatgaaccgggaagcagctgaggctgcagaaaacagagaatcgttaatgtccaaaggttcactattaagcaacaatggcagccgtttcccgatgcccgagcttaaacatctttcgagtgccaacagcctttccaccatatccatttcaacagctcaatcgagctccgaatcgccgggaggttcgtcgggttcggtctcttcggaacctaccggtaagatgtcttcctttgtctcgtcagctttgtccgccctaggtatagaccaggccgcccaaccgactccccagagacgacatactgttgatgggttgattcaggacaattctcagctcacagaagatgacccggtgagctcccagtggccaaactttacgaggagcggatcgctttctcgggtggacgatcatccgaatcacttgggttcagatctatcctctcttcaacgacacgcatttccctcaatgtcgttcgcgtcattaacgttaccacccattgcaccttcaccacctgtgggatccccgactggatactcacaaagatcaccgtcggaaaattatgccctgagtctttctgggatgagcgaatttcatgcagtatctcaggcgccgttgcctcagtcacaacataatcatcaattacggcaaccccaacttccatccgatcgttctcctaaggagatgtccagttcgttccccaaatcccatctttcgtctcatctcagaggagattcttcatatttgatgtcaagccagatatcaagtgctaacaagacttcagaccttccctctgccatgcacgaagattcaccctcatttgccgaggaatttaatagtgggactagaggatttcaacacatcttgtccgaagaacgttcctcggccatcacacctccaacttctacttctagcaatggccctgctccagcaacaatattcacccctccagcagtccatccttatcgatcgagcgcggaaaaaatcttttcacagcttggtgagaggatgccgactggattgagtgattcaggaagtaccgtcgggcttgaagttgccacgagtgatacatcgaccccaaggagtgacgcgacttctaaaaggttgcattccatcgaagacattcttccgagagacgctgcaatctatataatatcgctcttttttgattatgtatgtcttcgcgctctctatcttcttctggctgatcttcggatgatccaggaggacctgatcaactgacggatgatgcacatacttctttcaaacgtttggtcgctacaggtatggccgttgacaccgtgtctccatcaaccgacgttcatcgctgatctcagcgcccgacgaggttcatgaaattcacatgatttatgctagtccaaaatatctcacactgactatgtcacttgtaccggcttgccctgtttgcttcatatagaggaacgagattcgctgttcttcgctttggtcatgagcaccctggcggcgaccctagttcaagtatgtatacctttcctctaaatcttgctttttgactgttcgcccgatcgatagacatctcgtttaactttcgcttgatatctctcgctgtacctcgcatcggttttacacaacctttctaggttccgaaagtttacgtcccagtagaaaacagtcaggtccgaggactcgctggaaggtgtcaaaaagcatcgagggcaatcacaataaacgcgtatgacccacctaccttccttatggttatcatcaggtatgttaagttgactacacatgaagagaagagaactttgtagggacctcatcatatctcttggtcatgatggaggacaggtatttcgattgcgtgtaccattttggtaagtgagcgtacttcctgatgatactcctgaggtttcgtctgaataaactttgttccatatgtatggtgtcagtcatcgggaagcctggagcaaatagtatgttgtcagattatccatgcgtcatgtacatttctatgctgacgacctgatcgctggctttcggtcaattagctgcctcattcgccgaagccttagatatcgctgtgtctttgggtttacatcgtagggaggtaagtctttcgaccgcaacaccattagaatcacaaaccttatatccttgtaaattttcccgcttttacgcgcagtcatatatagacctaggtatgttaaggcctgctgctcataggttatctgtctgtcaatttgtcttgacctatcttatttcggatcgaatcaatctcctcaagatccaatcgaagatgagcttaggaggagaatatactggctattgtttgtcgcagataaatcgatgtaagtgctaatcttctcttccattgtttacgacgcaacataaatggcaaggactccactgacgatatcttgtcactttgatcttgtagggcttgtctgatagacaggattatcactatccaaatcgagaatatatcaaccccattgcctacagagattgatgatgaatttattacaaggcaggcttatctcccccagccatcgactaggactcctatcatcgtcggtcagtatatttcgtcaggctggattgtgagatataaacacaaaaggactggccagctgattattatcaatcgcgcgatgatcaggcttcaatctcgctacaaagatttttgctttacttggttctattctgcaaggtgggcctttgttgttatctcgcctgcaagggaataaataataagtcttagagaagtttaacaatctcacgctgtgctcgtcctcctcaccaacaaaaccagctcaacgagagactaaacggcatcctcctgttggggcagaagaggtgttacataaacttcgggttgtggcgtcatttatatcagacatggccagtgtccttcgagatatacctaccgcattcgttcaacaggactcgttcgattcggcggccaactcgtgagtcaatcttcgttgaaaatctcacagcacacagaaaccacgtagaagtcttaactttctgatcgctttctcttcggacgctttatctatcagaccatgtcatggctgggaagaggaagccaaaacccaactcacacttttcttctcggatccaacctcttcaagagagaatgcaaaagatgcgttcctggttagtcaaggaaacatatacgttacccaggccctagtgcgatttgttctcatgtacgcttttttttcttgacttgcatcatgtgattctcactttcgggctgagcccgtatgtaaatcttagctgatccattgattggggtctgtagacaataccgagatgaactattggatatgagtggcgctatcggctcgccaagtcggaaaggtgaggacttgtcccgtttcagaagtatttgtttactatatgctatatcctgacaacggtatcactatctcttaaccgctgtactcagccgccgaactggttatacaagagcgtgcgggtgcgtttgaccgccgagaagccgtcgctgtggacttgttgaacgctgtgagtggaatctcttcttatgtcaacattcgaaggcaaagacgtgctttgttcaattgactgggtgcccaatctggctgaaacaaatcatcagcttcatcgaatccctattcaatctgtaaattcaatatttttatttttccttttcctcaaaggctcgaactctatccttcttccttgattatgacatactaacttaaaacaacggcactgatgacggcgatggtcaaagcttgctgtgaacggaccatcgttggttcaaaaagtccgttttgtagcgtcaaccctacgtatgttctctttcacttttcttgagcgctaccgagaagagtttcatctgatctcatactgatgtctttgaaaatgttgtcaaaatggttgtagtggaaatcgatgcagacaccacgatgaataaatcagagccgatatccggccgtttaaatgcgtatgtttgcttcttcctgcttgttggactgtctagtcgtaaactggggctaacgttcacttggccggactcatagatacctctggggtacgagtctctgctttagttatctacctgaatgcgcagaaagaatttatttgccgactgacccttcctttctgaactagacttcctatcggtgctgagtgagatcgaaaaagtaaggtcctacccacctctttctgttctcttggactacaacttttgtgagaacccgttctgatctcttctcttttctcttctcgtcttgattctctaagaacttctccgagtgaacgcattcctcaaaagggtcgtcgatcctatcaagataagttctggtcacgcacgatgtactggaggcgaaaaaaagattgtaatgaacagacaaacggatgaacgcatatcatatttaccgataattatgtgctttgacaagaaataagtttctcgatgttagaggagaaaacggaggtacatgaatgaaatgagtggggtcaacatatcagtctacaaccacgatgggaagagaaaggatgggagaaggttgtcgatgtgtgatgaggaaggattagaaagactattcagaggcaggcataattgcgtctttgaagaagaagacctctgggcacaagaaagacactcggttgatcagatctttgatactttgcaggctaacagatgtttcgggtttcgttacctggtgctgattggatgagatccgagttttccctatacgaaacgagcttaacaaggttagcgctctgctcaatgtacatagaggtgaagtggactttaagacacacactaggagctgaaactcttcgcctttaacgtatgagaaagaaagcaaagacaaggtgctatgtcaatgaactgtagactggttgcaatttttctttttgatgataagaaaaaataaaaagtgatttactctgcagatgaaggtcaaaagcatcgtcgtccatgaatctgtccgaaacagagcgaggacgtggatggactagtcagctccttgcttagatgaacgatcgaaagcgcacgcattcactcgaatgtttcagaaaggaataccttccctatgtctagatagaagagactcactctgcataagctagaaactttgtgcctactacatcgtcatcttcatcatccacgcaacgcaatgttctatggaacaagacgccggctgaaatcatccagaaataatgagattgaacaatgttcctcagatttgacgagtcagcaattgttagtgtagactgacgctccttttccaagatgcgctgtgaagctctggaaaagcaagacagggttgattgatcttgtcagctcatcataaatgatcccagctcgagttgactgtgattgtgacacatgcagcaagatatactaaccctgccaagaacgttgttagttcttctgcaagtcccggcctggatctcaactgatcagagaagactccgtagtcagggagtcaatgtctgagcaacgttgttcatatagtgaaattttgtttatattctcagtgagtgcacctaccacggtcatccatacgaaaggggcagccgcagaatttgagctcgagacggatcctcctgaaggccgtgatattgtttggtgtttgtttttggtttgttcaaataacaaagaaaggagtttctcgtttcacgttagctaatctatcgccacatcaaatagaacgcatagatcgagtgacccgttcataccgttcgagacgaaactctcggcattgctgctgaggctgttgcttctcgctctagcagacgatctgtacattgagaaggcctcgttagcggagtccgagtttctggagtagtccgaatggatctgaactagttttgatgggcatgtgtatggtgaagacttattcaatgacatctgaacggtgtgatggttgaatagatcgaagatcgtgagatgtgactacgttgatatgccttgccttcaagcaagtttagaggaaccctaaccaatgatgatggatacgtaatcctcttgatctgagtttcttcagaccacaagtcaccagcatctcgtagctcataggtctagtttccttcgtcgatgaggtagcttcggcgggaagagcagcagtggcaaacaccagcaccactgatgagtgttgaacgtggacgattgccctcatcatcctcgacttctttatatcttctaagctgttggggtctatgcctgcttctttgcaggaaatccctcttaatcggttcaaccgactgcaggtcatgatgaacaacctggtgaaggctctaaagctcatagtccacagacaaagacacaaatagtcaaagagaaagagacacaaagagacagagacgatatgtcgaatcgagccaggtgcagctggattaattattcgtccggatccccaatgttgagtatacaaaacgaacatcaaagcagtcgagtcaacccagcactgactccgacatgtctcaaacagtgaacgttcggtgaagctttcgtatctgtttcatcagtcgctttctgttctcttgtgtaacgtagcacgtacaaacatgtatatgacacacatcttatccttcccgccaggacactggcgtctggacagaagggcatgatggtgtctgggaggcagacgcacaagcaacttgccacatcacgtgaccataatttcactgccttgaatttactcacgctcagaaatttcagatagtcctttccccgttctctttgcctctgctgcttgccgaccagtctttgcaccaacaaaataacgcttgatcgccatgcctaaggacaaatctgataccacttctgttcagaagaaggagcgaaaagaaaagaaggagaagaaggagaaaaaggagaagaaggagaagaaagaaaagaaagaaaagaaagaggagaccgcttcggaggtcgagcagcccaaggtggaggaggaagccaacggaactgtcgatacgtctacccctcagccggaagcatcaacatcttcgaatcagtctcccgctccggaggaggtcgtatctgattctattgaggatgttgccccgacagatgatgccgatcttctcgaaattgatcctaatgctcctgctcccctctctcgtgctgctctccgaaaatctaagtcaaaatctaatctccgagaaggcgccgaaccctcgacagactctgccatcagcacttcgaccacctctgctactacctctagcaagaaggctaaggacgattcgaagccgggtaagtattcggtctgggtaggaaatctgtcgttcaagaccaacgaggatcaactcaggcagtacttcaccaaagccttggtcaactcggctgctaaaggaaaagggaaaggaaagaagccggccaagagtgaggacgagtctggagaggatagtgagagtgatagcgagggagatagcgataacgaggaggaggagagtggagaggcacggatcacaaggatcaagatgcccagaggacccgctcaatcgggcggacgacctggccagaacaaggggtacgtttaccttcatctcgatctctttccttagatatttttgcgcaaatcaaattcactgtctgaacgcaatctatcaaccttaatatgcgaactcgatacaggtttgcctatgtagacttttcaaatcgagaatcgtgtctggaagccgtcaagctatccgaagggcacctcagtgcgtacattcgttccttccatgagtttgctcgttcaattcctctgacctgaccaggtttctcttcttaattatgttccctctagacggtagagcattgctcatcaagctcggatcagacttcaccaatcgaccagtcgcacccaccgcagccgtcgcctcccttcctgaaggacagtccaagtccaaaaccgcccaggctctgttggctaagcagaagaacccggttggtagtacgctctttgtcggaaacttggggtaagcctttccatcttattacctcttctcggctcgcgcccaagcatgctatacgcacgcgtccttattcccattgatttctccatccatcagattcgccgcgactgaggagatccttcgaaatctaatcgagtctcactggtccacttcgctttccaactctaagaaacacgctcagaagcaacctcggtccaagttcctccctgagaagagtgagattgatgccgccgctgccgctgccgacgctactgctgccgatgacgaagacaagactgagaagaaagagaccaagtcggacgccaaggatggggcgactgagacagccgtggaggagatttcaggagctgggttgagaaaggttaggatgggtcagttccaggataccggtcgatgcaaagggttcgttctgtctccactttcaccctctgtctgtggtatccttgactgacatcatcaacgacgcatgcgtccctgataggtttgccttcttggatttcttcactcccgcacaagcgacggctgcgttgatcgacatgcgaaaccaccgattggacggtcgaccattaagcatcgaggttagtgcccctgtttcaaggtctctttctccttctttcctcctgagtcttatccgttattatgctttgtctccttgttgtcgagatacagtttgcctcggcagccgccgccgctcgatctggcacgggccgcaatacgttcaacaccccaatcatcgatccccactcctccacctcaaacagctcttcgaacgcgaaccaaacgacggatgacgccgcccaacctcaggttcaaatcccaaggaagaaggtccgacctatgaagagtgagcgagcggccctcaaggctgccgctgctgctgctgccggtggggccgccggaactgaaggcgaaggagaagacggccgaaagaggaaggagaccgccgatgacgatgacgctcagggagaaggaaaggcaaagagaccggccaagatggccaagtgggagaaagcaggtagacagagacctggtgctgctttggcaatggccaagagagagaacgtggggatcgtggagagtttgggaacaaaagtcacttttgactgagtcccccttcttcgtcaggttgtttcgtcttgtgttgtcatgtcgtttctttcattgcatgattaattctgttctaggagaaaaggaagaggaaaagaaaagaaaagataagagacaacgtattcatgccgtatgcaagtatgtagtaaggcaatgctagtctggatgaaatgatccagacaatggatttgaaaaaggaaagagaggaagaaggaagaaacccgtaaacgaaaaagatgaacgggctctttatgcaactgtgtcaagaagagagtgaaaatgaacgaatagagaagaaatagaatggtaacaaatttctctatggatagaaaatcgaaagctaaagaacagcaaaaaaactacgaaagctgtagaaaaaaatcaagactaagaatagataaacaaatagatggatggacgaacggactgacgtttggacgataagaataaaaggaaaaggacgaccaaaaaaggagaagacattgctagacatgcacatgtctatacggtcgtctgtgaagtctctctctctttctcccgtccccgctctctttcttcagcttcacgaacgagcgcgcaagcgacttttttgattgagttttgtcacaatcacgcgataaagaaacaattgatcaacttgagactcccaatagatgatgaaaaaggggcgagagcaagaaaaaggacatacttttagaccgggcacgtaacttctttccatacagaaagatcagaagcggacagaacccgcccacaaaggctatgcaacctagtaacgtcgatgcactgcattggagaaggagacaagcccctcatatattcaattcatgtaacggacgagcgcaagataggaaaaaaaaagcgggattgctcactaaggatacccaaggttttcgtacaacgaaggagcaaataacgggaagaccgctgcaaacaaatttcgaaggagcgattgagcggcctgtgccgaagatgagtattgctcatagctatcggaaaaagaaagacgatgattttaattaagcatataagccaaaagaaattggtagagagggaagaaaacggaccagtcgctcaaataattgaaaacgccggtgtagcagagatagattccaatgtttgcaaagagcagagcggccgctggtgaaacccaggagattcccggtcgacctgtccatgcgtaccaaaagatacctaccaacgtgagggaagcgtgaagtaaattaacgaaatggacaaggccgagcgcatgatgagtcagggcgagggatgagatgaaagcaggacgtacctgcagggaagatgaaggctccgatcaatgtccaatacaacctagcctctggctcggcacggccgcccgctctggctgtagccttttggtagagtacgttttggtggaactcgatcaagactccgatagtggctgcaattcccaacgttctgtattcgtacatgttcagagaggaagaagcagtcagaggggcgaagagagacggtgttgttgagaagacagtggaaagacaactgacagaagaaccaaaccggattcaccagaattgaatccgtactgtccaaagaccatggcgacagagttgatgaacaaaaagaggcatccccatacgaatccgacccaaaggctgatcgcggagacgatcggttcggtgaacaggaatactaagatatcacaaacaagtacaaaaaccttcaatacatttgcacataaaagcgacagaaaccaaagatggaaggaagttgcagaacggaacttactaagaggccgactgattgagatcttgactagggttttgatatcctttcgttcagcgtctcccggagcggcatgtggcttcccagtctgtttcgtcaacttgaccgctcgtcgcgatactgttcgattcaaaagaaccgatcaagcgacccacagatgttctatcagcgatgacttaggtcggaaaacgagatcaccggacgaatacaaagacgtacacaagatcgatcctcgagtctcttttaatgcaaagatcagaactacaaacaagcctccgaacatgatcaactagagagggagataaggttttcagttccagagtggtcagatcatcaagatcgcagacaagacaaaaaggaatcgcgtacctctaaccagaaggtccactggtatccaagccggatagacacccaacccatcactaaggaccgcatggggaattcagactagagtatcaatgtcggaacgagagatacatgtatagtaaccttcaaagaaagcgacgaaagaacatactggcaggtcctaatgcttgaccccaaaagacaaacagagagtaaacgctcatagcttgccctcgagctgtgttccagaggaatgagcaaaaagattggagacttcaacgagatattctggggcatatgtcagcctgtggaagaatggctgccactcacactctgcagggaacatgtcggcaatcgagcctccgaccatagagtttccaacggaggaacacattccctggaagaatctggagacaaagattccagtggggccacactgcaagatgccaaaaagagagttcaggaatcgagaagagatgacacaaaaagttaccaaagaacaaagacacgagactgaccaatgcctgaggaagacagagaatagtgttgagaaaactagtgacgagataaattttgtttcttccgatgagctccgaatagggcgcgaggaagagaggggtgaacgagattccaacaagaaactatcggcgccgagacagaagtagcgttgatattggtttaataagaaagattatcagcagatgagaaagagtgacctacacccaggtaaggagaatacagggagagaggacttaccaaagtgtttcctatcgtccaagtgactttggagactccgagcttagtttgtgcatctgaaaaggccaaactgtaggccgtggcgttgaaagcggtgagggaggtaatcgacacgcaacacagggtgatgatccatttcctcaggtttaaccagttcagcgggtcctttgggaagaagaaagagaaaatgttatgtcagaacatgtctaaagaatttaaaccaacgaacgtacttggaaacacaaacaaatatgtgggacatacctctggatcacctataggaaaatcaatgtaaatgatttcttcatgcgtacgaacatcggtgaggggttcttcaaaacgctcgcctctaccggacctggtagggtagagttggccgtccatcaggacggatccgaccttgtggagcggttcgcccgagatgattccaggttgggtctccttcggacgaagctctgattcctgggtttcctcccccacttttccttcaggcaaagaaccgaggtcgtgagacttttcccagctgggagccaagtgaaagagtttatcttccgcggacggagtgttgacggccgtttgaggaccggttgaagagatctcataatcgtatagcgtgtttgcgcacgagacgtcctctgaggattcgtgtctgtggtgatgatagtggtggagcgggtggggatgagaacggtgtatcgaggaggaagatggaagggcagctatcgaggctggggagcgaggcgagccaggagcactcggagaaatcgatccatcggcagtcgtgtgatcgatcatgtgtatatgtgtatacgtgtatatgtgtatatgtgtatatgtgtgtgtctgtgtgtgggtcgatagaggagctatttggccgcggtgtatgtgtctgcggcgacggttcggagggacgagctaggctagcaatctgagctaattggagaatataaagaagagtgaatgagtgcgtgcacgttgtgcgccaacaaagcaggtttgtctgaccgactggaccaatcaggttttgacgatgatggtgacaacaatgttgtagttcagcaggagactccaacgaagaggaagaaaaaagaatgaaaaatgagtgtataaagaaacggataaagaaaaagccagcgttcaagaaaatgactagttctgataaagcaacttgaaataaatagatgaatatttaagttgattaaggttgagatatgggttcaactagtgaatcaagccgccccggttgaaatcccggaccggattgccggaaccgaaggccgtggagataccgcgttgtaaccaagagtagtgaccactctgcgcatgagcatgatgagtacaagagaccgagtgacatccagacaagcgatcaggccaaactctttgaatacatacacatgcacatacacacaaattccgtttatacaacaaggaccttattgatgtctcatcagattacatttctttctccaatctgctctctcctccgctattgaatagtattttttatggaatagcttttgacgagatgcagtttacacctttgtcatgtttcatgtttcattcattcttgttccatatgtcaagaaaagattggtcaatcccgtgttgaatcgggtccgtcattcttgccaaagaacaagctacaagagagactatgattgtcaagatgactggtttgacggccacatcgacggcacatttactagaaaccgatcagatcgcgtcatgtcacagttcaagttacctggatgttttcgctactgtgagaacatgcgttggatcgaagatctatgtgaacgttcgtgcggacgcccgcctgtttgactgccccgcgtgctgaccgaagaaaaaagaagaagaagagataaatagaattgaaagccaaaaaaaattctgaagaaaaccctgcaagcagaagaagaaaaagaagagaaaggctgggctcctagatccggggaggaaggagaaagccatgaaagaatgttaaccaaattcgagactagaccgagtgggcaatcaagtgcaacgtacttcgtactcattggaacccgcagttggggactaaggtgaaagaaatataaagacgacgaagagaaaagaaaagatccgaaaaaggcaaagaagacaagcgtcactcgggcggaggagcagaggattttttttccaattaatacaggaaaaagaaacgaaacaaaacaaaataagataaatacaataaaatttaatagaccgtctggacgactaacgactgacgactgactcaggcaggattgggcggctcttctatcatttccatgtcaaccaaccgcctccacacgacgcaatctcaaacacatggttgtcacttgtcattagatcccagactgcgagctagttccgtcctggggtgaacggtcggtcgccgaccgccgtggggcttgatgtgcctctactgcgtaatcctgggcatccagccctttcaattgcctatctcttcggatttatttagcgggtttccccc

SEQ ID NO: 1778 - DNA, 2457 bp, Xanthophyllomyces dendrorhous
cctctgggcccttttagtctttttctgttgtcgtgcctatttgtcgtcgggtcgatcgggtgcctgcttgtgtgaaaaagtaaaaacaaggggaagacggccgtcgtcacattcagatgacaatcaggaacagacagcgagcgaccgaccgaccgatcattctaatcggcctttggccttttgcaagttccagttcgagctgtgtgtccatataaaattcaatttcgcacggaccgcctacaacctaaatgttgactgcgtcggccggctcgctcacttttggttcagttataaatccccccgttgtctgttctcttttattctctctttttttccttctttctttctttcccttcttgtctctttcttcgttttatttctctttgcttcctttccgtgaatccttctcgatcacaaaccagcatcctactcgtattcgtatcagcatactcctcctatcatcattcatagggaatgtccgccgtcgttcgtggtgggtcgaaccagaagtcgctgagcgaactatcgatacatacctgtacgtcagcatgtctgtccttttgtccgagatcatcacccttggcaccggctgacatgatgcgcggttcaactcatgtctccagcgcgcatggcaacctttatctctcaccggccacctccgttcactcaatcacaccaacacccacacccagcaaaccgactcctgcctagacatctcgaacctaccccggcgtttgccagctttgtctcgaccgtgctcgagtccactcagatcaatcagctcgtcgtcgtccttgccttgctctttcttgaacggtaccatcgccaaagatcactacgccaagacgtcgacgttccgactgacgcgcagctggatccggagcacactctctttcttagctcactcctcgtcgccaataaggttgcggacgactgcaattacaccaaccgttccttcgctgatgtctcgggtctttcccttcctgaagtcaacgcaatcgagcgagcttttcttcgaaccatcgctttcgatctatgggtctcgaccgaagagtttcacgcctggctctatcgtctcactgatctcggcaaggctcgccatcgcgccctccaggcattcgttcatccctatcagccgttcttaccctccttccaccaacgactatccacccctctctccgtccctggctcgacattcttatccctagcccaggtcgttcctcccccagccggttgctacgtgcccacggccaataagtctcccaagctgccgtcggccctgcttacaccaaactcaaattctcaacggaccgtcaatcatcccggaggtcacgctccccgaccgttcaagcgttctgccgaggacgcgttttctagtctcgatccttcatttggaacagacgtccggccagtcaagaaacagcaaccctcaggaatctcacctacgaccgtatctgtcggtcaaaagcccaacccggctgtctccacccttcccactcatccatcatcactgtatccgtctgttcagcaacatgttttcttacagcataccaccccatctgcacctatcgtcacatcctacccacatccgcaccaactgcatctgcatcagccgtctcttccagcatcgcgcttatatacccagaccggtcaaccggcttacccctcgccccaccatcctacctatccctcatgcgcacctcaccagaccgttctttccgctgggtacagccatttgcttcctcatctgtacccgcattcgtacccgtactcttacccgttctcaatcccagaccgatccaaaccatacgacgtcatccgtccggatccgtccgtcttgccggccgctccgacgacgatagcgatggcagcagtgatagctccattcgccagtttgaaggcctcggcacaaggaaaagacgatccggataagatgtcggcctcatcctggcaagctgtcgaccggtggcgaaaggctgtcgtccctctcaccgccgacgaaggcatccttccttgggctggcttggacgtcgttctcgtctaaatctatatttgcttctcccatcttccatctcggtttctcacttgtccaaatagatatctggaactgcatctacacttttcatacatgtatcaccttacacccatcatttgctcccttttctttctcgctcatacagagtttatgtaaattttactactagcaatacctctcatgagaaactttcttacgatacacatatatatgtctttcattgtaaacgtcctagtcatcttctatttcacgaacctgatgatcctttcctcgttattttccaaatttcggatgaccgagcgaaaagggaaagaatgaaaaaagcacaagtttttgatatatctgtaagcgaaaacaacggtatcgaaaggtagaaggaggaaagcaagataactagagcaggttgttccttcacccctccc

SEQ ID NO: 1779 - DNA, 17417 bp, Xanthophyllomyces dendrorhous
aagatcacgagaaagaatgaatagaaagacaggttcgtcttttaccttgcgacgtttgtcagaaagccgcgggtcaaggaaaaaaaaagaaaaaggaaataaccgttgatgagagtcaaaaaggatgagagatagacaggcagtccacacacgaaaaaaaaagttcgaagcaatccgagaaggggaacaaaaggagacaagaacatccggagagaagaaagggagagtagagacagaaaaaagaaagaaaagaccacaaagacccaaatgttgacaaacgaaaagaaaaacaatgaaagacaaagaaaagatcattctcaaccccaaacgccagtagacgcgttcaaccttacttgtcctgcaccatcacggatgtcttgaccgttttcggtctctggagtaggcaacaacggtcttcccagttcgttcggatccgtattcaagatctggctcagattcgaatttgtattcgaatccaagttaaaattagggttccgatgattgttcgaggcagattgggaacggagatcgacacttcggttggctgacactcgagatcttctccgagcaaggaacccttggactctggccgatggacctgttgtgttggtactgttggtgctgttgatcccattaggtccagcgggagtgcctatgaaggtcggggcaggagtcgttgccgataaagaaggaagaatagcgttttgcgagaaatctatgacaaaccagagagagagaagaaaggtttagatacaacatcgcatgagtcaagaaatgataagaataaagaaggaaagggaaccttttcgacaaagaggacagactgcgcttatctcaatgagccagctgtcgatacaatctaaaaaaaccaaccccgaagtctctatttcagcgagagcttcttttttcatgctggaaaagagcaagtgaaacaaacctttatggaaccgatgagaaccttgacaaggtaaaactctaataccatccccatcttcgaattcaagcaagcagattggacaactctcttcgacatcctcgaccgacatgacatcttgtgtctttgatattgtttcattcgcatctgatgcctcttgacgataatggatgttctgttgaccggggccttcatcaatcgtccgagacgtcccgtccgaagcgagtctggatgtggacgaatttcgagtgcgacggtcggtaggggagcttggtgatgatgggtcgtcgaacttcgactcatcctcctcgtcgccgagggatccagcttggtttgattgtcgaagcacatttaatgtccatacctcatcttctcccaagtgacgatgatgaccgcccagtcctacctcggctttctttttcaccggactgtcaccattctctggcaatggtcgatgagccccttctgacgatgacgcgccacctcgacgaacatatcgaacgatgggaaaactatcgacaatagctctagcaagtcctgctgttcttgtctgagggacgtaagattcagtcccggatggactgaaatcgtcaaaggcaggatcatcgtagttgtacggatactgtctggcggcgggaactcgtcttctaggaccgtaccgctcaggatgacgtattgaacgaaacacccctagggcgatcacgctgatcacaatagctgcgacacagcctgtggaaagaacacgaccaagaggtaaaatttatcaaagacttagtaagcgcgaaaagcaaagaggatcgcgtctgcagaagggttctcaccaatcacaacgtatagaatgatcatcgccaagctcttgcccttcccacctccggattgagcattgctgccagaagacgaggtcgaccctggagcggttgcagttgccgtagggacaacagtggtgtctgtactagtagcgttgaaggctctgaggaaagcaacgacataggtgtttgagagaggatatattccactcaatagagacgtcaccgagctgtaagatgagtttaagagtgaagggttgaagttatgaaacgcagcagcgcagtgttgttcgaatctataaagacaaggagatgaagagagacaggacatgtgatgtaagtcgaagctttggcaggtcgcagaaaaagaactcgccaagaaggaaacgtactgagactcgatgatgatggcgtcatttttgttccttgttgtatacacatctaggggtttttcataattatctagataattctgggtgatctggcatccttcggacgtgttcgagtataacaactggaacagaatcggagaaaacccgcttcagccatccatcatactcaggcaacataatcaacagaaacaacagactcactgctgccatagctccccgatcccgcgcgagggaaaagatgtctgaacagagttaatcaaaggacggtcaggaagggccaaaggaaaaagaaaaaaagggattgtagcaagagaagtttgtatgattgaccgttttccatactcatgtctgtgatgtttgagtcacaagacacgaatgctattgagatcaaaaaactatttagcaactttcttacgtaaaagtattacacaggaatcatacaggaaacgcaccaatccaaggagtattggaagaatcgtttgtttgtgcgagatcctcgctgtgaagagacagaggtgtcagaaaagaaggtgagccatcagtaggagtttcaatctccctcttttcgatcagctcgacgaaacaacatttacgaaaagtgcacaagagctccctggacgacggagataagaacaatgtttgattagcttggaatatcttttgtattaaaagggccaagagcgactgggggattggcgatgaaacataccctgtccaatcctccatttgcgaactcatttggaaagtagtcagacgtattggcatcggccgtgctgaattgatagccgaaacgagagccaaggtcaacacgcgaacagacctcgactacgaaccaaaatttcagatagaggcgggtcggacaagggagcgagaaaatagttagacagacagttgaagcgatatgtaagcgttgtatgttccctgtacccagataaagtccagcatagacgaatcgtttctggagagggccgcagtgttgttcaaggcgaaagctagaatcaagcatgcaaacagacgatttagctagcttgcaaaaaaaactgattgagggatgtaacgaactgacctgggatgtatccccgagcgcaaaccgaacacacaagaacgatccaaacaaccatcatgttgaagatagagagcaccacgtcgggttgtttgtccttgccttccctctttgttccttgaaaagattttacctgactcgccttgaatctcctttggtttagctattgccgcctagccaggtttgagtaaagatacgatggaccagtatatgtttgtatccagagtccaacagattgaatgaaagctcggtgaatgtataagctgctcccgcttgggcacttggcccggccggtaattaactccggtgagtcacctgtgtgatcgttgtaaccacagagatggctggttggtcagcggaagtctcacgtgtttacatcctgcaccgctcgatcgtcgccgatatcctacgtcatagactgatgatgcccagggttgattacactctaatcggcccctgggagaccactcagtccgtatatgcaatccatggactttctctcgatcctctcgacgtagcccgggaacggcagaacgcccgagggaggcctaatgaatctagactatggatccagatttgtattcgatcggtaggaacaaggtacgggagaacaattagattgaaaaaaggtacacaacaaagcgcgaggactattcttcggagaattcatccaacaagatccatggctgtctctgctggacggcgtaggatatgcatgattacggttgatggcggatcatcaagcagacaatccacagaatgctgatgatgctgatgatactgatgatgacgatttgaacagaacaaacagaaagtacgggaagataagaagaatcaaaacggaagagaacaacggcttgatccttctttcgttcgcttcaatcctcgattcttcccatcttgccttctatatatctagcttgatatctggattcacacagcattcaccgcaagatgtcaggtaaacttcaacagaatgggtcgcttccgcttcctgcttcggcagaaccgaagattgaacagtcgaagaagcaggaacgaatgaccgaccttaaaaaccattgtaagaaattattttcagtactggattcattctcgagcgcatcgtgcacgagcagtcactgagatggtttatcaccactcgatctggaacagtcgtagctgctattggttggtttgtcttcatatatagcgtccacaaaggttgagttgttaactaaaccatgtctaccaaattccaatctcaggagagtttgtcggcaccacgatgttcttgttcatggcctttggaggaaccaatgtcgctggcgttggaacaggttcgtttgagaatacaccatgagcaggtgaatcctcaagttcgctcatctgaacttttctaaatttttatcatcaccaactagatactaatggcctcaacgtcaaccagattctcttcatctccctggctttcgggttttcccttttagtcaacgtctgggtgtttttccggtatgacctatgcaccattactctttcccttatagttccttttctatgctgacgtcttgcactaaatcgaccgtccctcagagtctctggaggtcttttcaacccggcggtctctctaggactagctctcgtcggagccatcactccggcacgagccgtgattcttgtgatctctcaaatgatcggaggtatctgcgggagcgccttgatttatggtctgcttcctggcaggctcaatgtccggacaacactctctgaagggatctcgatttcacagggcctgttcctggagatgtttttgactgccatgctcagtacgtctgttgaggacaatctaccgagacagtgtgttcgatctgataaaacttccctttctggccgtctccagtgctcacaatcctcctgctcgccgccgagaaagtttgtgaatcttcatgcgtttagttccttcgctatttcaatcatattcttacgtactttgttttgcgtcggtgaataatagaacaaggctactttcttggctcctgtggccatcggactggcgttgttcatctgcgagatggtgggaggtaagtcctcagtttctctgttcttgtcagctcaacatggatcacgccaactcttattgacttacaaatttcatcgcatcatcggttgtcagtatactagtaagtacatatctctttccgcaatcaaccttgacaacaaagtcagctaatatgcattattctttcgtggatttctcccctataagtactggtggttctctcaatccagcccgtagttttggacccaatgtagtgcttggtgaatttgaaagttcccattggatctattggctaggtgaggatttaacaacttttacactctttcgcttccatcaagtgcgtgattcagataaacacacccgctgaatctcgttgatgtattacttctctgatccgaaggtcctgccatgggttccgtactgtgagtgcacccattggtgtatcttttaaagaccaagggcctgatatccgtcaatctttttactacctcatagcgccgtcggattttatttgctcatgaaggcaatgcatttcgaagaggttgtccccgatcaagatgccacatccgatgcccagggtgaccatcagaaacatttgattgctcgaaaatccaaattgtcgcaaaagccctcggatggatctcacgctctaggaacccacaatgacgactcgcgatcgatggctacactttacggcaactcggttcaggcaaagcacgaacccgagccggaagaagctgatggcgaaaaccttgatcccatctacagacgattcgacgaacttgatgcaaagctcgatgcgctcctcacccagagagagcataccgctcaacagagcatttctcatcgagtaaaacctgccgacaaagacgtcagcaatgacgaaaagttagagcaacgtgttgactttggagacgccggtagagagaaagatgggacatctactttgcttggacgaccatacaaagttgaatgaacgagtactcacgtcccatgaatctgtctacccaccctatttatcttctttattcctgtgtagatctattcaagcagacccagcctgtacctaaagagattctagagcttactcatttttccctaaccccttgatatggtacttatgaatccatctataaattatcattaaaagtttatcgagaatcacatgtaaattagtctttgattgtgtctctttcccttcctcttcctctttctgataaatacctggtagccgtgatgactttcaactctctgacctgattagtactcaatatattttcaacggagaacaacaagaatcgtacaaatatttcacattattatcgggtcgagaaagagcagaacggaaacatagactaaagagaacacggatgaacaaaccaaaagaagagggaagcggaagaggaacataaggtgatgttggacaattgtctatccatctatcgagcagccctggcttgacctctggcccctctagcctgtttttgtctttccttagcagcagcagcatctgctcgacgtttggcgcaagtaggacaatgccatgttcctgccggaggagcatctagattgagacatgttaagtggaactttgatggaaagttcaagagatgacaagtgttagttctcgttgaatcaagacggatagaaaagatccagagaagaaagagacgaacccattcgatctcgcaatccatatcgtcacaaccaatcatctcgccgtaacttatatcgttacaatagcagtagttcctcttgtctccaccttcaccaccttcaccttccgtctcttgcgaagctcccgtcggattcgtcgaccctcctccagctggtccgactccgggagcaccagaagagccggcggcaatggcagaagcagcagcggcttcggcaccatgtccgatgaatctggatgacgggaagggtccaccacctgatccaacgacagccgataccgtcctcgtcggtccgttttcatcagaatcggatgaacctcctcctgctcctccgcctgtggccatatctacatcaggtccaccaggttgggatgaagctttggctttgtgtgatccatttctcttcttgactcctgccgggtttcgtcggtgttttgaaccgccagcggttccagtattgctgtttgtgttgtcgtcttcatcttccaaagctctagaagtgttagcagtgctcgtttctggagaggagtgtcgactgttcttctgaccagcgccagcaccagcaccaccactactaccaccatttccacgaccaccccggcttctagctttctttccaacgtcaccggcatcaaggttatcgatccctgcaccgtaaccgtcgccaagggaagtcacagaatctaccaggttgagatgttcgaccgcgtttggaatttctgcgttcttgggttgagaagactctgctcggtttcctctgggctgacgcgacgttggctcggcatgagagattcggggagatactccgctcgttccgatctgggaaccaagggttgaaagtgcaggtgaaccgtttctgctaggatcactaggggaaatgaaaaagcaagcaagaaacggtcgaagttgttcccattggcactgagatcagtctgcaagcctcagataccaaaggaaacaagtcaaacaaaatattacacatacgctttcttcttatcttttcggcgacctccagctgtggaaccattcgtctttgccggacttttcgtcccggccggtagactttcatcccagtcatcctgccttgatttcactttctctgcggcagctgcagcggcagcggcggcggcggccgctcctcctgggttccttctctgtttcttctgaggcgtacccgaaccggatgggtcagcatgagcgtttgcacctcctcgagtcgcccgagttcgtttgccgggaatagtcggtggaagaaagagagtgccttctgcttgaacagcggatcgggctgtgagaagagtggactgagagagtagattgagtagatgggtttgatgagaaattacctgaggaagaaagcgtcagaaatccatccatccatccatcagttttcatcacctcgatcgaattgagcggtcgtttcgcctgattgaaacacgaattccatcccaaaggcaacgggcgacggtgaccaaaacaaagcttgactcactccttcacagactccacccacgactcggatcttgtcttctcctccgagtttgaaccgttgagcaaacacggctacttcccggaggatagctaaccgttcggcgggggtggccgtcgggtctagcaagatggatgtgagtgccttgatggactctgtcagatggataagcgaggctatacgtagaatcaacagatatcatgggtctgtgagtttcatgtctagaagtatccaccaatggaagtgaggctgaagagaagataaaagcgaaaagccgaattgagaatgattgaagtgaaagagacacgaacaactaagaacagcgtccagctctcgcaaatccgagaatcccctcgtcagttcgagtggaagggcatcaagagtgtctgcaaagttagcgaccgtgatcaggtcatgagaaatcggagagtgagccatctcgaggcgatgagtggtagttgttcaatgaatgctgatccagcagaaggcagaggatgctttgtggtagatgatctgagccagagcacagctttcacgtctggcctatatgttgcatatttctgccaaacatccaagctccttcttcaccatgatcttgtgcatatttcattgaccgtgtggaaaaaccagatgggttaaataacatgtagatacaacgtcgttggcattcgtcttttcttttgttggcaacagaaaactacagatgaggaaaataacattaacgacaacaataatcaagctagttccttccggaccggcggttgaggaactccccatcccaactttccaaacctgaatccgttttcatcctcaaacgcgccgtcatatgcaaaaaatgagacgagaaggcctgttccgatgataggcactagagcccaaacccagaagaacggaacgagccatcgccaaagctgttcttcctccaggttttcccaccagaataggatactcgccggcctgtcggccctggtcggagggagccccatcttttctcgaaccaggacccagccattcggatcgtcgacttctgcatcaaacatatcccacgccttctgaacccagccttgatctttacctttcacaggcctagccatgatacgagctcggtatagctcagccatcgtttctggagggagatctctataccgaacagtagggaggtgatctacaggccgaggggatgatgggagcaccggttctgggtaggccggcacgctaatcggtcgagggaacgtcggtaacggattgtgccgttggtcatttgggcggattttatcatgaatgctaagggattcccacgggtgatccggagggaatgctagaggtacgagattttcttctcgtagtacactcggcttgaagagttgcctaggatcatcgggcacagcggcgaccggcacctcgatatcagcttcttgagcgaaaggaagtgaagtcaggggcgatgacgtcggaaggagttgacgctgggcatgaaaagattcctgacgccggtataacgatggacgaggggtatctgacgaggaagaatgcgatgagggagaaggcgaagaagctggagaagatggagatggacttggcggaacggatggatctttggaatagcgtacgtggcaggaagcgaatgtacgataactgggtatcgagctatccatgatctgatagataggaaagtttgagcaaaaagcatcatgagcaacatgcgaggaagagactatcgttcttacaggtctgagtgggaatctagttctattgatcgacataaacgtcgaccgggcaagacggcttgtcgacgagacaaacatctagagtaacacatagaaagacgagaagaatcagagaatcagccagtgaattcgatcgatcgattggccaaataggatgtcaaactgactgcctaagagttcctctggactgataggaaactggagaggtgagcgataggtagtaattcctaagtgatggtgttgatggctcgaatggtcgaatggcgttagcgacaaataagcgcagtaaagtcgatcgaacacaacattctccatcacccatcgtgctcaccatctcatacgatgagcaacatgtcggactgcaacacagatacagatcaggagccaaatctactcgcaagtcttacaccaacaaacactctcgagtgtgacattgctatcgttcatttgtacgtctgatattgctgggtcgatcgagactgaccccttccgtgccaggtcgtccatccgtcactcactttcgttctcattttggctggatgatcctcttcacaaaatcatgggactagtcaactgagggatctgatagtgtgtccaaacaagcgaggggaattgtactatgtcggctcggagaaattgatgaaagggacgttcaagtcacctactaagcgttcggtacgtctgatgctgctggtttggtttgacagagcgttgaaattaagctttctaattctcacgtcaggcctgtgtatgcatctattgagtagaagcagcagctacaaatgacaaccgatttcacagccaactgccttagctttgggtacaaccactttctttcttcgtagtcttgaccgcatccacacgtatgtacgcacgctgacctggacttcgcttaaacactttaatatgcgctactctacgtggcttggccgattgattggttcacccaatgattcagctgtggccatctagccctaggaggctctcgatcggacattctgctctaccctgtcaactcgtcccagtcggtcgcctctactcaggtcgtccacaaacagttgcgctggccggcgacgatcaataactcgatctttctgactgatagtctgaatgagcggcccagtgatacgcaggatggctttcaggtgtttgtgagcaataacgatgggacagtgagttcctctatatttgatggctatctgtttgaaaatggcatgggcatgaaaaaatggaaatggaattgaaaccatctctcacttccgttgaccaactgagcatagatcaaggttttgacgcttgatgaaaagcctggctctgcgtccacaccgacgaggacgctctcgaagtttagcgagatcgagatcggtgtgtgtgtcaaccattgtgtgtatcaggcttcttcttgactatttgccaaagcagccttggaggagatgcaagatactgatctctctttccgcttttcgctcacgatgataatccatgcagcgtctctctcgcctgatggacggactctgttatctgttggagatacagctgatgtgtttttggtatgagttcaaccgcaaagctcgctgatacgattcatgcatgccaaatctgactgggcgatcatcattgtcgttacagcaccaagtgatgcctggaggtacatcgttcccacagattgcaaaatatactggagggaacgaaggcgggttttcgtaagtcattatcccttcttttttttttttgttttgttttgtataacttgtgatctaaacttgtttattgttcgtgtacctaccatggggcgtttacacgtgcgcgaactcgtctcgaacaggactgcttggtctcatgatggaagaaaatttgctgtagccaaccaaggtaagccttgtctgattacgaaagttcgaaccgattagtttcaaaggataaagctgtctcacagagtatgtccggtttggttatcttgatgcgtcgaacacagatgggacgtgagtactgttccgacacgcatacactcaagacttacaccacgtttgaaagtgttgacaactccttttcttcctgacagcgtggccgtgtgggaccaacgatcctcccatcgattagctacgttgacaactcgagggacgactggtgatcgagcaccagcggctagggttgtcaagttttcgccacctggttcacctcaagaggtcctcatctttactgatgagacgtcagggatgacggtggctgacggtctgtctttccagacgatagatagagtatcgattccttgtggaacgaatgcgcagactggggaggccaagactctgcaggaacgagcggaccggttgattgaacttggagagaaccggtccagggttggcggtgggggttacgtcagaggttctgccggttggagtggaatgaatgtcgtacctgggaccgctggttgttgttttagtccatgtggccggtgggtgtacgcggcaaccgaggtgggaataagtgagtgggaattggcagccgggccgggaactgatggggatagaggcgtgggaacttttgcattctgaactctgtcaacaacactgggccgtaagggttttaagccgtgagaagaagaagaaaaaagaacgagaaccgggaatggggcgcaggcttatctttcaacagacgaagggcggaggatcacttaatcgtagtctgaatttcggattcattcagagcctgttgtatgttcaacattgtttgactcacggtcacggagataattaagttattgcttttctagagcatccatcatcctggttgctttttttttcttcgtttgtaaagacagacggatcaactgatgatcgatgtctatctaaatcactcaagctttcggccggtatctgtcagactatcaccatagaagaacgaaagacaaccaggctcaaacttgggtttcacgtgtcctcaagtatcttataggacccgaggcgtgggcgggtcaagatgtagagggtgttcgttctcaagagggagagatctgggcgagtgggcactctgcactatctttttatcagattatactcttgtctttctatgtctttctactgccatgttcttactttcgatccatgaagttttccctttctttctatctttgttgaatagtttcatctggttacataaaaggagatgtacaaaccagatcatccaagcatccaagcgttggcctaggtaactctgcagccgaccggaacaggcggaccagacgaaccagacggaccagacggaccagacggaccagacggaccagacggaccagacggaccagacggactgaacggactgaacggaccaaacggaccaaacggaccgtccacgagccggatggatggtacatgtgagatcagctgagctggaagatcgactacctctcgttcgatctggatggaggcctcatcgacgaacggcaaaatgaaacatcgaacggttaaatgaagggggaaagaagaagaaactcttgactaattttagctttgaccgaattctggtggcggtttactctgaatcttccgttcttaggccacgcgcgcgagagaacacacaccacacacacacacacatacacacacactctctccctctcgcacacccgagaaggtgacccggtaagtttattctagtcgtgtgtctcgccacgtatctacatttcgcttactaacacctacggttgcatccgtcccaagactgacgccgagactaatgctgacatctctaatacatctctggttcaaactctttccttgagccgctcccggaccggattctttccggccgagcccctcatgtttcttgcctcttctccttcggcggttgagatctactgacggattcgcccgaagagccatcctccccatatactctccacattggtaccacaacactttataaagctgacagaccagtcggtcgatctacaagaagcctctctttctcttcatcagactctgtcttctccttgtccttctttcgactttcccttacaattcctttgaatccttctcccgcatcatacctacccctcccttgaggccgtataaagcgagactcgactaagctataaacgcagacaaactcgcacacacccacccacacctgcacacacacatacacacatcatgggtttgtttggcaaagccaagcccgacaatagggtctactcttcgggtgaagattctagaactcagaattccagggtgtatctcgttggtaagtaacacactccttgccgtctgtcgtggctgaatagagaattcgttcacttacccggtcaatctcttctgtcgcatgtagcattaattgcgtacatgggcatctttctttttggtacgcatggtttctccgctccgagtcacgatcgttctcttctctctattccttgttgcggcttcatgccgcagatttcaatttctttcatgcgataagcatcggggtcacttacgcaaaaatctttatttgtacttcttctgtatgtttaggttacgattccggagtggccggtggagtgatcagctgtacgtatctttcctatcaaccgacaaagcgattgccacaatactgatatcacaccgttcatctattcaaatgtaatacattattgacagtgacatctttccaacgagacttcaattacattaatgacactgcagttcaaaaggcaagcaagggttccaacgtcgttgccctccttcaagttggagccttcttcggagcgcttggagcagccccggtctgtcagaagataggtcgaaagaagagcttgttcattggaacaattgtctttatgattggaggggttgtctccgtaagtctttcttcccggtttgtttccatagttggttttttttcaaacgcggatgatattgactatatgttatccgggcatctgcagaccgttgccatgaaacatatcgaaattatgatcgtcggtcggtaggtgttctcattggagtgatcgttcgactgaatagatgaaaactaatccagtcatatcacgcatcatcttgttttcttctagagtgatctgtgggcttggtattggtctgctgagtaccgtttggtaagtttccctgccatctttatcaccctcagggttgtcatcattctaacttctcgatcttggtccttttcgactgtcagtccgacttacgtcgccgaaatgacccctaagaacgttcgaggaagaatcactggactctttcagatcatcgtcgtcattggagttgccttcaggtaagtagttcagggaatcgtaatagtcttgcgcgtccgagcacgactgatagtattatgtacgtttctattcaatcccattctagttattggatgtgagtacctttctcttcagattaatacaccacgatatttcagacaccctgtgctcaccttgagtggtacactctgactcggtactctctcttcacaacagcgaatacgccatatctgtcaccatgggttccacaaagtctgccacatggagaatccccatcgctttccagcttgttccctgcggtctgatgcttatactcctcccattgatcaaagagtcccctcgatggctcatccttaaaggcagaaacgacgaagctctggcaaacttggcttgggtgagaaaacgtggaatcgaagacccaagagtagttgctgaatttgacgagaatgtcgccgccatcaccgaggagcttgccgtcactagcggagcttcctacaatgagctcctcaagagtcagttccctctttccgtctgcttcgatcgtccataaccccatcctgactgttccaatttgaaaccctgtggttggttctatcgattcaatagagggaatgaaaatcagagtcttcatcgctttcgcatgtttcttcctgcagcagtggtctggtcagaactcgatttcatactacgcccccacaatcttccaatcgatcggtctccgagggacttctgtcagtttgctcgcctctggtatctacggtatcggtgagtatctctagttcttctcaaatgcacccatcgcgcacactgaccaacattctcaaaacatatgtctcctcttctacagtcaaaatcttctccacctcgttgtttatcttcgttggtatcgagcgagtcggtagaaaatggtcgcttgctttcggagctcttggaatgagtcttttcctctggatcgtaggtgccatatttgtcactcacgtacctaacgccaaagccacctcaccatccggcgcctcgatcggaatggccgctatgatctacatgtttgtcgtacgtcccatgatgcgcttccctcatatgatttctctgggtcatcgtcatcaccaagcttactcaagctggattgatattctggcgaacatcagatcccgtactgtttctcttggggacctgtgccatgggtatactgctccgagattttccccacccgagttcgagcacaaggaatgtccatcgctgcagccactcaatggtgcttcaactttgtgttgacaaagatcacgccttacctcgtactcgacctcccgaacggaaagatcttcttcctctttgcttgcacaaacctgctttccgccgctttcggattctggattcctgagaccaagggtttgagtctggagcaaatggatgtcttgttcggatcgattacccaggaggaacgagacaaacacgtatgtcttctgcttcgtttcttctctgacctcctttgtttcaaattctctctacttggctaggagctgacctctttctctcgactaatgcttgtctccttaaacagattgccgaggcggaaagagcccgagagttgcaacaggctggcggttacctttcgaaggagaaggaactcgagatcgatcatgtcgagcacgtcgaaggtgtagatgcttcctctagggtataagcacgagttctcttttcaacgctcttcacaggcttctttctctttgtttcgttttcttcttattctcttggtatttagtaggttactacacaagttgtattcatgtatctcctggttttcaacaatgttgtacgattcttgacggaactttaatgtatggtttttgtatgtgcatgatagtcaagcatgaaattgattgcagaaagacaaagagagatcgtgttatagagagcgagagagataactagttatacaagattcacatctttttctgaaaagcctcatgatttctttctccccccccctcctccccctcttgcgccatcagccaaaccatccagacccttatctcacaagccaaacgatcaa

SEQ ID NO: 1780 - DNA, 15949 bp, Xanthophyllomyces dendrorhous
ccaaacgatcaaagctcgacccagatgacttgaaaggaaggaaaggggttttttttttggctttctcttcaccgctgcctgctggctccctgttccagccgctcgctcaccatttctcggaagttggcaacgatcatcgattctcgtttctgtttgaagattttcatgtaatcgtttgttttgttaggacgatcaaagcaaaggtcagaatcactttgcgaaaagctagagaaaacaacgacaatgcaagtaaaacaagatgaatggacgaacggctttttcttcggcttgcatcttcaagataccacgcctattagatgagaaagaaagagttggaaataacgcagggtcaggttctctcactaaaaagccgttattcgaggcaagcccgatgaaagaaagagggccctcaaaaggggaaaaaaaggaaagggacaaacttttcctcggcactgatgacttggttctcctttctcattcggactgcattcatcctggtatgtctcgaaccagacatgacataaccggaggcttcgaattgttcaatcgcggtcgacgccaaaccgatctctcctcgtcgggggatacgttgtccgtctgagacgaaagcggccatggcggaaccttctcctggtcggagatggcctccgaaactagagacaacggacagtggcgacaaaaaaggtaaaaagcgtcaaatcaagaactgagtctactggagaagtgaagagagaaacatactctctggaatttcctctttcgtctttggattgtgccaggacaggtcccactacatcgtcgtcatcgtcttcctcaacttttgtaggagggacaaacgcatctcccatctcgagccttattctgtcctctccagcctcatctttactcttgatgacagcttcctcttcgtctgatgaatcgtccgagtcagacgagtcgtccgtcttacgcttcttggacgacctacgacgagatcgacttctatcttgtctatcagaagctgtatcagcatcagattctggatcagatcgtctgctagaactggacttcttataccgtgacgatgacgacttgtgtcggctagatcgagacgacttttctttatgtcgacggtatcgacggtcggaggagtcagaatcagtatccgagggagttgttcttcgttttctgcttgactttttggagctatgctttgtcttgacgggcttgtccctcctgagaattttggtacgcaagacattagacacaacgaacggcacagagaacgacgaaagaaatgatagaatggaaaaggaggacaaacgcattggacgcaggccctttgggcgaaggaggccaaatcgatagcgggtttgcatctcgttgctttcgtcgactataatttgcgatccgagcgaaattgttagtctcgaccggcaagtgtgcgtttgaaagcaatcgatgcaaagggactcactcggccaaaaaactggggccttgcaccaagaaattgccaggtcctccgccaccacttcttccgccatatcctccacctccgttgaatccagaatcttgatgaggtgctgattgtctctgccagccgcctgctccaggtggtccggatggaggaggccctcgagatctatcatcctctcttctgtcgtaaggcgcgtatgatggcgatgctcgtcgttcgcctcgatctcgaggtggataatctccggatctaaacacacacacatgatacagtggcaaaaagactcagccacgattctttttggacgtgatataattgacactgaaggtgttgaactcaccttctattatcacctctgtcatcatagtctcggcctcgacctccgtccctatctctttcatatctctccctatcccgatagtcagctcgcctatcgtcacgtctgtctctgtcttggccatctctcctagcataagaaccttcccgacggtcagagttagatcctccagctccttcggtggcatcgtgggatctatggatagcgtttttgacgcgctctttgagatcagcctcccggtcggttccagactgggaaggctcgacagacgacgccgaaactggcggagcagaatagtggggagtggacgccagtgatccctgtgggatgtttgccagtctagacggatgaactgacatggttctgcaacgctcgttagatgatgggtgtatgctaagggagaagccttccaacaggctaacgagagaaggcgagaggtgaccacataaatactgtcaattaaggtagatgaaaataaatttcgaatattttgtttgctttccatctgctcttcagcgtttgctttcccttggaaactctcacccttgacctcaatcccgacacacatacactttccctgttctttctccagcagaccatgtttggcggaggaaataatacctggggacaacagaaccagcagcagcagcagcagcagcagcaacaacagccaaccggaggtcttttcggtgggggagctcctgccaacacgggaggaggcttcggagcacctgcaaccggttcgtttgttcttcctgatcttgtttttggttcaatttttcctcgtatctctatttttctttcttcgcttcgctctactactgtcgttgagtgagatcgctggcgatagtgatgacgatcgccattaaaaaagtgattttctcgcaaaaccgggcgaaacagtccggccatgttgaaggattcaactagagatgatggccaaattgatttcttcaagaaaatccatgcatcacttcgcatcattgcttggatttcaaggaccttctagactgaacaagaccttatcaactacacatcaaacaggctttggagcaaccccatcaccttttggtcagccagctcagcctcaacagaactcgatctttggaggaggtgctgcccctgcatcaactggtttcggttagctctcgatcctgctcaatcttgtttcgattctgttgtgtttgactgactggctgtatttctgactttcacgcgcgctcttgtgattaggtgggttcggagctagtaatacggccgccaggcccacttttggagccgcccaaacccctgcgttcggtgctcctaatccccctagtggaggtttgtttggcagcaaccctggtatgtttttctcactcgcgtttcctcttcggaaccttcgtcttggactggaaatctaaggaaaattacgtgttcccacatcgcagcccccacgagtacattcggagcggctcctacctcgacttttggcgcgcctcaggcaaacactggaggagggttgttcggaggaggctctaccggcggatttggtgctccggctacaagtgggttcggtcagcctgcggcttcgggtggcatgtttggagctcccaagaccaacgcttttggttcgacttccagtccgtctgcttcttgtctgttgccctaagttcttgataatgacagatgcacgtgctcacgcttctcttttttacgttcacagctaatgtaattccgggcgaagtcccagcgaatggtacctcggctccagcctggattcaagttcaagatcaggaccccaacactggtgtcaagaataatgattactatcaaaccatcaccgccatgcccgagtacaagtttgccagtttggaggtatgttctgacagatttacgcgtgattaatcagtttttttcgtttgccggctacgagtctgaatcaatatacgaattactggtttggccaacataggagcttcgtttgaaggactatgaacaaaaccgaaagacccctcagcagcagcctcaatcaacctttggggctcctgcttctacggggttcggaggctttggatccgcccccgccgctccttccacagggatcttcgggagctcccacaccgctgcgtcctcccctttcggagctcccaagccggctggaggcctcttcggctcttccactccagctgctaccccaacctttggtgcccctgccgcctccaacacaagcgggggtttgttcggaaacaccggttctggtggttttggacaaccccccgctgccgcaccctctacagggtttggattcggtcagacgagtcagcagcaacagcctccgaaaccttctttcggattcggaagtcagcccgccgctcagcctgctacaaatgcgtttggagcaccagcggcgccagccacatcctcttccttctctgggttcgggcaacctcaacagcagcaacaaccacagccacagtcaaccgggtcgactttcggcggatttggacagcctcctcagcaacagcccgcgactggctcttcgctcttcggaaactccaacactatggctcctgcctccggaggtttattcggtcaagcgcccaaaccggctggaacaggacttttcggagcttccacaggagctcctcctgcctctaatggcatattgggtggtcagagcaacacaggtggaggttgtacgtacatgggtttttgcctattgagaaaagtattgatctaacttcttgcccaactcctttcctctcccgcgaacatcatcacgtcacagtgtttggaaacacctcctctgccccttcttctgggggtctattcggaaacactaacaataccggcactggctcctcgcttttcggagggcagcaacaaactcaacagcaacaacaacctgctcaacagagcacttccttgttcggtggaggtgctgccggaggaggtctctttggcgcaaagccagctgccccacctgcttccggcggtggactcttcggcaacaccgcttctcagcctcaacagaacactaccggaggtggactctttgggaataccggcgcggccggagggtcaggcggccttttcggcagcacctccaccaacacgaaccctgcgccgaacaacactagtctctttggtgcccccaagcccggaggattgttcggcgggggtagctcaatgtttggaagttctcaaccacaacagcaacagcaacaacagcagcaacctccccagcaatctctccaagcctcgatcgatcaaaacccgtacggtaggaaccctttgtttgaccagcccaccactactctcccgctgctccaggatctgcccgagaagaagacgcctttgcccaacttggctagccgagctcgatcctctccagcttccaagagtttgactcgactccgaggtttcgccgtctcgcctgctgcctcaaacggtcggtccagccctggactaaacagctcatccggtcgaggatcccccatcattggagaggagcccttcgtaccacgagcgagtgtcaaaaagctcgtgcttgatcgaagagacggctcggactttctctcgtccagcggaggccacttgaactcgtctggctcccgaatttcgaatgatagacgatccgtcacattcgaaaatagtctggatgtcgaaagcatcttccgaaatgactttttgaacggtgtgcttcccaatcgacagcttcccaacgatcttcctgttgagcctgttcgaaccactaccgtcgcttctccagccgctcatgtccgaggcctttcctcttctggatcagcagcctctcccgcccctaagcaggcgtcatcaaagcctgcttctcaaaaaggacctctactccaacatggtgactactacactattcccgagatcagtacgcttgtcaagtttggctaccaggacttgacctcgctttccaacttcgttgtcggtcgaaagggttatggtgaagtcgcgttccttgagccggtcgacctgacttcagtatcttccattcaagacattcctggtcacatcgtcctctttgaagaaaagatgtgtgaggtctaccctgacaacgtcgctaaagccccgagaggaaccggcttgaatgttccggctcagatcactttagaaaagtgctggccacttgacaaagccaagagagaaccaatcaaggatatcgctagtccaaagatgaagcaacaccttcgagttcttaaaggaatggccgaaacggagtttgtgagatatgaagcagagagcggaacatgggtgttcaaggttgaacacttttcccgatacggtcttcttggcagcgacgacgaggatgaggatgaggtggatgaggaaaccgctgtggtcgagacaaagtcggctgagcctttcaaggctacttccaaacaaccgttcgttagtcaaaaggctggaagcgtgaaacgatcgatgtatcctccttcgtccgatgaaaccgaggcttccgacgagaccatcggagaaactgatcttcctcctgtaacgtacggctcagaagacgaacaaagtggtccggacagtatgtcaaactccaaacgaccggccgatcgacattcatctcgaactggctctgtttccgataggaggcagcatcaggattttcagtacggccgtcgaacaggttatgatgaggagatgtacgaccattcgacggccggacagagtgatgtaggaaccgaagatgaggaagacgatgatgaggctgaagagacggaagaggatgagatggatgactcggagtacgacgaagaagaggaaaggcgacacagagcttctcgacaggattctttgcacccctcggatctggatgaagcccctggagattctattcggccgtggggagcgttcgttggtgtcgagccgcgcaaagtccaggttatgcaggcttccttcttccgaaatgaagaacccgaatcgactgaatcaaccataagatcaaaccgggcgccgaggttgcgaccgaacaccttgtccggctcgttcgctcagtctagaatagataggatcgggcaacacgatcacactgatcgtcagacttcgttcggaatgtcccgaaaggtggaacagctggatgaagaagacgaggagcctcccttgagtcgaccgaggaagaaatttgctagaattgagatcgggagagacaccattcgaccaaacgagggtctcatgcttgatgctggagcttccatgagaggctccttcagggttggatggggcccagacgggacgattgttcatcttggtcaattatgcggtctgcaccaatctgcctcgccggctcctggatcttccgttatacttgaaaaggtgcagatgttttctgctgctgcttctgttgaaaagacccgatctgaacatctcctagacactcaattgagaaacactgagatctacttcgaagacggggttccttccgcctcgcccgcgtcaaaccttcggttccgacactttacttcctctctcgcccctgacgatcaatccttcgaggcgcagctttggagattaggtgctgccttgtttgacgagatcgatcttggacttccggacgctgctagcgcccctctcttcgacagagttcatcacatccgacgtaagctggccttttcgaaatggcttgccagcgctgtcgctcccgcggttgatcatgatctcatcaactctcaagagtctggcccctccagagcattcatctacttgaccggtcatcaaatcgagcaagccgcacagaccgctttgagtgctggcgatctccggttggccactcttcttactcgagtaggaggaaatcaggcgttccgagatgagatgttcctacagttggagaagtggcgagagcatcggatcgactcggacattagtccagattatcgaaagctctactgcttattagctggtatcgtggatgtttccgaaggaacccgagttcgggacccggtggattcctctcctcaactagaaatagcagagggacttgactggaagcgagctcttggcttgcacatctggtatggatcctcgtatgatcttgatctttctgacgggctaaggcgttatcaacatgcgttgacaacctcagtcgcccctgctgccccgctcccctggtatgaagaacgaccgtccttggtcaagaatctcaccaaatggaaaactcctcaaggcatatccgacgctcttttccttctaatcaacctttatgctgatacggccactccgatggaagacgtgctcgatccatctgcattcggtccaacgcctctggattatcggttgccttggcatctctacactgtcttagctctagcattgaggactagagactttggggatcgacaggagcccaacgaagaaaacaacgtggatctagggtacagtcggtcggcaaatgcactgacaacgagctatgctacccagctcgaacgactaggactttgggatcaggcgatctttatattgctacatttggaaatacctgagttgtgagtcgacttaatggattcgactcactgcatataatttttgtttgtgtactgattttctactcattcgttcattgcagacgtttgagcgccatcaaggaagtcctgtttcgaaatgtcggaaccgatgcaaagaaggagaaatttgttgtggaaaagcttcaggttccggctgaatggatttcagaggccaaagtgagaaagaaacgtctgtcattatgctgcacgaaatttgttctaaacgtttctctttttcttcataggccaatatcgcaaactacgagggagatccttataaggcttatttccttctaattgagtctaagctctacgaccgagcttgtgccgtcgccgtgcatgatttggtacctgaggtcctgcttcgggaggactttgcgttggtcaaaaaactgttagcaccactcaaagaagtgaaggtgaccgattggcagataactggccaggtaggtttctctcttatacgcgttgcgtttcttatcttgttttgaattgggttcatggcagttgctcaaacgttccatgtgctcctccgttcgttcgatcaaacccaggttttccttgatctggttgaagctctcgagcgtctgcctgtgctcatctccgagacgctttctgccccagatgcggctcaaatggacgagctctctcgcttgagtagtcgtctgccgacaatcatcaggttgcttccttccttgtttgctgattcctcgttgcagtcgaacgtcgtcttgtccgacatgttatcaaggttattacgccttggtagcagtttgagcgtcagcaaatgggtaagatttttctgcctgtcttgattcacgctagaactcacaggctgaacctcaattgttttctattcctcaagttggatgcccctccagctattcctcatggagatcatttattggagagtgacgagctctcattgctgcaatctgccgctcttgatcggtacgtgcaacctcgaacgtttgcccttttttattgcgccgcgtagtgacttcatcgtttctttctctgaatagtttctctatgtccctggaggcattcgcctagataatcttttctttcatctcccttatgtctcacaaatttgtctccttttttccttgcgcctatttctatctttcagtccagccatgcaatgagaatttggatcaaactgttttattagagcccaaaaacaaaacaaagcagatagtctacattgtgattcgaagagaacgaatgattgtttatattgtgatctcacttttgttttcagtttcaaagactacctgttctcattactctgacagatgcttgagatggcaaaacgcaatagataaagagaacatgataaaaacgacttccttgtacttaatttctaccgaaccaaccaccaagccaacctttctttttcggctccccattcgcaatctcttcttcatcttccactccatgctcctcctcctcttcgtcttgagccttctcattcttagtggctaccgaagatttggtttctggttttacgagctccccatcttcgggttgatcgtctcctcgctcgagttcgacgaagttgaacgctagatccaagaaagtcttctcctctccttcatcctgggtcgactcccaaaggctaactttgacaacactctccaattgacccacggaccgttcaagcgcagttacatcgtcctcggataagggtgttaaatctgaaggataagttgatggaaggccgtgtatctgccgaagaaggagagatgctcgggacagaagaaggagggcctggaccaaggaagttgaagtcgcacccgaggaagaagttgaagaggtggacacagaagaaagaagatagtgcaaggttgagagatagccaattcgtttggctcgatagaacgcgatctttttctcgatgcattctcctacttcaacctcctcatcttctccatcagtcggctggatcctcgccttctcaatcgtctgtagcacccgaatcttttcgaatgatcctatgactgaatcataaagtttcaagatccctggcaatgctctcatgaagatttctttttgagcaggcgtttgactgctgagagcgttaacatgtggagaggacaaatgatgggggacaggatcggggaacggtcggaggatagctcgaatgagaacaagatctcgagtgatacgttgggtgagaaggatgtgctgtaggtagtcaagtaagataggcaaggtcgacgcttgagaggtggagttggtcgagttctgggcgttggtctgtgaaagtttgttataacgacagcaaaataagaattcaacagcaggtacagtgagaatgttatcaaaggaggtctggtttgaacagacggaacaaaaattgaccgacctggctctcatccaaaattcgctgaacaacacccacggcctcacccagcgatcctaaagctcgatcgaatgccttcatcttgccacctctctgcttccccgctttcttccttccttcaaactcatccaacctggcaagtgctttgctgactttggacagagagctcacaatgtctgggtttctaacttcaatctcttctcccagccaagaaatctttctctcacctccaaacgctggtccttgctctattcgtgtgctcgacgctttgagcttcttgagatcttccagcatggccttaacaccctgatcctccaaaagtccgtccatctcgtcttcgaagtcggcgacaataccctcaaccccttcggacgcgctatcagacctcctacctaacttccatgccccgtaccggatcctcggatcgacttgctcatcgacccatccaagcgccagagcttctttcctaccactttcagcagcatgaacatcagcgagggcgagaagcagttgtcgagtcacaataaacaaaggcaaagcatccatgaacgactctctgaataaatggaggtgaatcgcctgaagcagaaggtggttgatcttagcctgggcgatcgtctgaaggcgaacggaggcttcggctgggagtgcgatgaggagagcgtaaaggttaccagagtggaagagtgaacgctgagatcgcatgcgtactcggtgcatctgagctgacgttcgtcggtccgagggagtctggagccatgcttgatgtaatgcgagggaggtggtgtgagctcgctcggcttcaagcaaaaccatctcaagatatctgatgatgaagtgaagcggtatatatataagtgggcatgcttaatccgtctaaactcatgcatgggtcaagcagagatagagggcgtacctaacatccttgacctcttccggcttgaggacctctgcttttttgaagggcttgactttggcaccatttcctcctccggacgagtattgcagtcctaaagacgctctaagtttagctaatcgggatgataggtgtttgctgagtaaagcaagagaggtcgagcgaatgagcaatttgcacatgaagacagagagaagccacccttacttgtatcggtcgtaatctcccgaacgaaggccgaatgtatttcgctcctgatggaggatctcgaaaactacggatagaaagggtgaaggagtgagaatgacaatcgaaaaacaatacagagagcaagaaagagtgcggactgactgtccaggtttagatctgtcgacatgaaggttctggaatcaagagagatagagagtgtaatgctgaaaggaaagagatgggaaaaaaggcacgactgagggcgcacaatgaaactaggaacaggatttccttatgtaaataggtgaagtatatgattttctcgtcgtcaacccaaacggattacgtaacacatcacctcctcccggggctaaacgaagaatttcgtttgaaactttcgtctggccgatttcaaccagcgagcaaccacacataccagaccatagcaaacatgtcatcccaagcaggcccatcttcgtcctcttcaaagcctcaattcatctctacttccagggaggatgaagagatggattccgatgatgaggtcatgctcgattcgaccgctcttccttccacttctgcctctggcaccaacacacctgctgaaggatcagtcgaggacccttccttgccctcattcaaacctctacctgctcacgctcaggtgatttctaagaaggatgaattccgaagaatccctatccctggtcaccgaatgaccccactcaaaaaagaatggatcaacatttacactcctttagtcgaaatggccggactgcaggtcaggatgaacgtaaagaggaagagtgtcgagatcaaggtggggcctgttcttctgttttgttctgctgccttcaggagtttccttctagtttctgtttcactgccgagttccactcaggataaggctcttgtgtgtaaacagagctgtaccgaaaggcaaagctgtcgaagcaatcggtgtggggcgactaagaatgaagcgatattgcagacatctgataaatggtgtagtgcttttcaggctaatcactctctatattttcctctccgtttttgtcaatacagacttcgaaacacaccgatgatgttggacaaatccagaagggagctgatttcatcaaggctttcactctgggatttgacgttgctgtaagtcacttgtctctatttgccatgtatcatcgattgatagtcttctttattaaatatttttctcaatcatcgaaattcgtgcttccacctttttgtccttatcaaattacttcataatcaatattgtgcacttcttattcaaccgccgaataggatgctatcgcccttctccggatggacgacctgtacatcgatactttcgagatcaaggatgtcaaaacgcttcacggagaccatctgtctcgagcaattggtcgaatagcaggtcatgccggaaagaccagattcactatcgagaacgcctcccgaactcgaattgttctcgctgataccaaaatccacattctcggaaatgttcagaacatcaagattgctagagacgctattgtcagcctaatcttgggtagtccaccgggaaaagtgtatgctggtttgagaacggttggaagcaggatgagagagcgattttagacgtctacattcgtccttgttctatacacatcaatttttgctttcccttctctttgctcggtgcagcttcctcctccacacatattcctccggctctctttacctccttcatccatatctcccctatcatttcttcttcgttcggggctctcattcactactctttgattgtctcttttacttaaagattcataaaatatatatatatctcttcctaactgttcttgttcttcctcgccacgggcttgctcttgtttctcaaaaggttcctgcccatatatcttcacctcatcctcatttgacatgtgctttaatcactttctcttctttccttctccgaccctcaatgttatggttcatcataaattccaaatcctcgtatacagacagaaacgtttgattttgcgctaacagtaacgaattaacctcacaacttgctttcccccctcttcccacttagatttgcaaatccaacattattcggtttgcctttaccccgtttagagaatgtggctatggcctcagtgagatcttgggtttggcccatcacagagttccagagtgcagtgtattctaaaccttcttgaattctttatcatatggtatcacaaaacaagaacgtatttaaaaagggatcagttagggtagttctagacgaggagagttggtaatcagacatacgaatgctctcttccatctatccgtccggtatgtttgacccagagggtattcatcaatgacgagtgatgtatacaaatgcaaatgttgtgaagagttaaggtgaacggcttcctacaatcagcatcgcaaatcgacgacgacgaaggagaagatttgatgttagaacgcacggtcgagaaggtgtttggtccccaagacagcgataggcgagttctccgcgatttgctctgccagctccagcgctttttctgagatcacgattgataatgaaagattcaagtcaaattctagagaatccgtgaagaaaacaagaacaaaattagggacagaccaaggacctctttctgactacctggaatgatccgactaatcaagcctaattgaagagcaacctctggcttgaagaatcttcctgtcagagctagttctctaacgagggaatcatttcccgtgatttttggaacctgaagtcgatattcacgaatcagaaacaagttgagctagtgtgctggttttatgctatagatggatccaacgctcactcgctgtagagaaccgatgtctgcagccatagctatggctacttcctatgagtccgcaccgacgcgctcaaaacaaagtaagaatcgcttgtttcatatcaagttgagaagagaagacgctgagaagatatgctcaccctgatagcgaaggtagtgtcggcggctgccaaccttatatcacacgcggatgcaatatcaatacctaatcctacacaaaccccatggatcgaagcgatcacaggaactcgagattttgatatcttggtgatacactcttggaagtcctttttcatcaagatcgtcgacaaaaatcattggattcagaagattaactcggttttcttcccaaaattgcggtgaaacagagtttggcctactagaacgtgatgtcgaagcgggatcgatgccctagctggatctttgagtcccttcgttccacctagtgaaacgttttcaggagcgaccactagatgtatagttggtatcaatgtatcagttgaagcttctcagctaattgaaatttcggaacaatgagacgtacagtccagcccggctgagaaccctttagaaacattagacgccaggacaacacaccggatgtcatccattgagttcaccttgtcaaatacccttcctaactcttgccaatattcttcggaaaatgcgttgacaggatttcgggaaagcgacaacaggagaacatgaggcgatggattagaggaaacgatgtaggatggcatggttatcggtttagatgtgtcaatgtatatagtagtctagttggtcgatgaaagttgagatgggatgtgaacattggctagtagccggttaaacaaatgaccgtaaagccgagaatagatatattaagattttgagaaagattctcgatatatcgacatcatcttcctactcaaaagtgatgaggtggttcgagacagtgttcacactcacagaccgctcaaagcaatgaatcattcataatcaaagagaaacacgaaacccatgaatccatcacctctagcctcctcgagtcatctcggtccactccctagcaaattctccccgtttgaccagcgaaaccacctcctcgaacttaggagtacttgatgaggatagtttagagagctggaagatagttcggagggcactccgttggatctcagccttggaaacagaaatataacgaaacaaaaagtcaaattcatcaacgttctgttctatcaaccaaaatcaaatgaggacatacctttcggtcgaaatcctccttgactgtatctttggtaccagtgaactgtagaataaaagatatacac

SEQ ID NO: 1781 - DNA, 8565 bp, Xanthophyllomyces dendrorhous
cagatgacgaattgtgggcgaaaaaggcccaagacaaacctgcttcatggtttcctggaagctttcgctgatattatccaagacctggataacagacgcaggggccacatgtgcaagtctcgtcaacgacaagaaacagatgacttgaaacaaacatgaaaacaaaaaaaatgtaagtcccagtgatttcacctctccccaagcaaacaaagaccgacctttgatctcatcggcatccgtcaacccattgacgaccttaagtaaaaatgtagagatgtctatctgagacaagcaggtgtccaactacaaagatataaagtaagcgtcctgatgagtcatccgaaaacgaaaaaattaggcagtgagaacttactaaagtatacatggtctatcatttgaaggacaaatgcacattgattagaaaatgtctctttagtaatgacacgacagctgagagaaagaagaggtggagacatgacaaacctcaaatgccgtttctagagatgatgagcaaaatatcttgatcagtcagaagtgcacaatacactatcaagaaagtatgagaactgacttcgagtctcgagtccgtcatcgaaggtctgcttccatggtcccatctggacaactcgtatgagttcttgcttgatctcggtttcatcgtacagtaacgggagcaacgttcccagatgtgtccgaataagttgaggcttgtgctgagcagccgcgttgagcgatccaagagaaactcttcggacagtctgtaaacccaaaagtcatattgaaaatgcagtcgaatcaacaacacgtaaattggaatctcttactaggtcggaatcatgcatcaaagataaaaattggacaataaaaggcgctaggattccatcataagaaacatcagtgtcggcaaacgtgtatcggatggccgaagcgacggtcgctcggatatttgccgaaggagattgtatctgtgcctatataccagttggtatcacatatattgaatattagaagcagacgctgttgatgataggaaacaagacgagaacgtacctcgagtaaaggaagatatttagcaggattcgaagtcgtcaactttccaatacaagacgcattgacaattctgctctcttcggcctgattctcagagtcctcaaacagaggctcccacaatgagtctgcgaggttctccagttgcagattggatgaatgaaagattgcctgtcgaggatatcacataatcagaagtacagatcatcagctcggcagtttgacatagaaagaggagggacctgtcaaatgtaagcaaacctctcgcagagcttgaagtgacaaaagtctatcagacttgtcactagacgtttcgaccttagataagataggctgcaagtactgagaagctccaacagcgaaacaccctgacaactcaaattactagatcagtattgcagacatcaaatttggctgattcagcggagagcatttatacatacccgcagcgaaagcggcagaatttctgatctcaggcgtagaagcgttaaaaagctccaagactcttttgaaaacatccgaatacgccgaaagatctgtagctcggccaatctctcccaaagatagaagggagaccacaacagcagattctgaggatgtattggactatcagcagttaaagaaatacaacacaggcactgtcaaaattgattactacaaaggacacaaacaagaagattcaagactgaccgatatattctgcgcaaattgaagcacaattccctttgggtctcggcccgaagcgctcacaactgcacctacgcattgtgctcctacctgaactgcacctgcagagctgctccccactgatattcgaaccaactctggaacaaccttttctgtcaaattttgatccacctcgataagagcggtaaagaatgagagaagagcctcaagggacgatccagatattgaaggagattgaaccaagctgataatctgagagagtaatgtctgttcgacagtcgatttagcagatgatgagatgctaaggagcacgacgagaaggtccagcacggcaggaagataggtcaaatcggtctccatgatgaatggcttcatattctcaattaggttagtgatagatgtatcgggagctgagcctcccaagctgaagacaaaagcaacagcaaacgtgaataaaagatatttcttgaacccgaacggaaaggagaaacaaaggagaactgaccgattggtgacagcttgcaaggttttgaaggattcaatcttaatcgcccgccctcccttcctaatcagaccggaaacgatctctaacacttctcctagccagctctcaaaaatattcccgctacagagcccacttctcgcgaccctaccagccgatttgatcgcttccaatctaaggctctctttctcaattgacgtcttgacgagacctagagatgcctcgtagtgagcctccaagacatctccctcgtaacacaataggtctgcgagagtattcaatgccttgactctcatctcaaaatcggccatgttactctccaagacagcttcagatgccttgtagagttgctcgatgatgaccgacaatccgacaggaagagggccatccgaaacagattgcaagctcttggcgagctcggatgatacaaccaaagcctcggcgctgaccttctgcgatttatctctggtgaggacaacgatttgtttgacaagttgaggaagactagactggtaaactttgagggtatgtgtagcaaagaactgagctaaaaaggagagagtctcaatggacaagagaggggatccagttatagccaacgtctcggatactctggtgaagatgacagcagcttgggcctccagtcctcctcgaagtacggtgacaagttcccggagaagggtgaatccagcctgcttcgtaataagagatttcgtgccaagttgcttagcgacgttcttgacaagagagttgacttgaggaacaagaatttcaacaggtctgcaaatcaaaagtttgtgagtacaattaatgccacaagtcgaagtggttctgatagggagggagacaagacttacgtatcttcggcatcgatcatgtcctcatcttctttccgtcctctatcatctctcatagccctcttcctcttcaacgttccagggctcattccgccatcctcttcaatttctttagtaatagtcgaggcaggtgctcccttacccaacacatgggtttgtcggaggagtgtcgagatgatgccaaaaatttctaatcggacagattcctctcgctcggagattcttgtgatcaacactggaaggacatcttggtacaggctcgaaaggatttcggacctctgttatagataaaggcacgcaggtgtatcacttagacactgagagaggaaacaaacattggttgattgagacacaagagcaggttgttttgcttacagtcgagataagagctcctagaaccttggctgctccccttcgagtcttccaggtgatgtcatcatcgtcatcgtaacttaatgaacacgggcgaatgcgggttggtaagaatagtacagtggtccgggacaaaatgtaaaccatactcactcatcctcgatctcgtcgtcttcatcctcgtcgtcctcttcatcatccatatcctcatcgtcgtcctcgtcgtctgctcctgcataattctgccaacaggagaataagttgcaagacaattttagtgttgaaatccaactggacaaaaacctgagagagaaaaaaactgacaggatcgtaagaaatcagtcggatggcaagatctgctattgaagaagtgaaaggaatgatttctttcgggcactggagaattaagctttccaaagtctgtagagttaagaacatagagcgcatatatgagtatgtatgcaatgccatctgaaaaagaacagccttactgtcaacccggcttcccggtcctcctcgcgtccatcttcctcttctccgttttcaagctcgcagctctgcaatatcacgcccataacatccttcaaaattccgcctgtcttctgaggtgaagatctagctagcgtaccaacaagctgaatataggctctgatgacttcttcagattcggaattactagaagcggaggaaagagtattcgtcaaagattcggtcaacgagctaaaaatggcaggagttgaggcaggaacgagggatcctgtagggcgcgaagttggcttgtgttcagaaaacgagctccatcataggttgaaatcgaaatgcacacaaaccaacctaaagtgacaatagccttcttcttgactgccggtcgaccactgagtaacagaccctgaagaactcgcaaggactctctctgcagctcgatttgggtgatgatcaacggccgaaacttgatgaacaagtccgataaggtatccaatgtctcaagagtctgttgagggggaagtagagcctgacaggtaatataggaggaaaaaaacatcgagtattaaatacacatcaaaacatatatgaacaggataacaatacatacagagtctagctgttcaagaagcttcaggggaagtttctcgatcacggtgaaagcgatgggagattcagatgtgatattgtttgtcatagttttcaaagctatgatagttaagccataaaccatgtagtcagactgatgaaggcaaagtatattcaagcaagcacgagtcgagtgcctacctaaactagccacatcccgtagatcctcgccttttccactctgagctccagaggacatggtgattaaccgatcgattactctagctagctgtgcttttctaagcttcggagagatttcagcaaatctattgggtttcgaacaaaaggatgagagaacaccatggtcaatagctgttgcaactccaggtgctgaaaggtactggcatatgccgctaattagaagaagcttgcttacgccctaacccctgcatttttgacctcgccatttgagtcttccatagacttcagaaccatctcattcagcttggtttctgtggcctcgtcaacggaaaaagaaggactagaagcttccgagatcagatcgttaagggccatgaaccttgttggacgtggagacaaattgtcagtaatcgagccatagttaagaatcatacgcttagaggatcgagaaagatgaagaaagtagcagacctgagatctggatcatcactgtttgccttctcaagaaggctctgaacatgaaaatataccatatgtgggaggagcacgcaaagagatggtcagttgggatttattcaaagatgagctgatcagtgaagagattccagagatggacgatctgtttccattgacatgctgactaagcaggtcgtcatattatgtagctggaatcttaaccttctcatcatttcctcccttagagcatatcaatctagcatgtcagaagggttaccaccgctagagttgttcatctcgacatccttagagtcttctctaggagctcctgtctcggaggataatattgaatacatcgctcgtcttgttgaagaagaggtcggtccttgtatcaatcttccaagctgtattccttgcgcttttcatcctgggagatgagtgatattgaaggaatcctagagtttttttacactgctaggcattggaagatgaggacaagatagaggccgtgagaggtatcctagaaacggagttcgaaggaagagaggtcagtcaagtcaagccatgttccttagattgacgctaatatgcttttctgacgaacccatcttgctgacatcaggaagtagttatcgaacaagctgttcttagcattttagaggaacaccgacggttgttggccgagattccctctcccactttgtctgaatctgagtcttcagaatcggaagatgacgactcatgtttgtccttctttacatgatcgttcacagtatcgtcctctaataacctaacggcctcatttctctctttcgttatctgatcaaacccaaatctctttgggccctatattagcaaataatccggcaattcaggatcctgcatttcaagaacgactgcgaaaggcacttcttatacaacaatacggtctagtagaagacgactctgcttctagctacgctgtgagagaaggtggtcctggaccaggagagggaaagaagccggcagaaggagggattgatgaggctttattgagaagcgaactcaagaggatgagtatgaagaagaagacaaggaagaagtatgatagcgtgaatgaaggtttgtttgttgttgtttttccatataaggaaggcaattgacctgaagtttgacctgcacatccttagactactttgcgtctggaaatcttaacagagagaagatgaagtatgaagatgctcaggtgagctatccagcttgcacagtcgcttgtatctcctgctgacatgaaggttttctcatctcaaaatagaaacgtgccgctgctaaagcgacagcagctgaaaagaaagttaacgacaaggcaggttatgcaaaacaaaagtgaggatatttctctgcttctaaccatgtccttgtcttgctcggtattgatatgttcatgctaaatccttctctatcatcgtccttcagagctgatcagcaagccaaactagaagctaggaggaaaaaagctgccaaaggagagcgaagaggataaatcttccttacctcatctataatctcatgtccggtcacaatcattcacctattactacatcttgctatcaattcaaaaacgatactcatacacaatgtaatcaaaccagatggaattgaaatttttagtgtatgtagtatgttattcctcttaagagcatatgataatcttcaaaatagatataaccttaaccaggccttggccagttcagagcgtctttgccgccgccgccgcccaaaaactctgaaggatccatatcctcgttccgatcaatctctacatcctcatccgaatcaccccacatcgcctccccttcttgcccaccagttattctatcctcattatcatcatcaaactcattattccacgggtcatcttctctgtatcgatccctctgaatgattccgtcggcatcatcccctggagctcgtcgagcagggcgggcggagttggaggaaagtgggttagatagattcgggttagaagcggaggtagaaggagagacggccatgtcagccatcaggcgatccaattgggactgagcgaatgcctttttcttgtcctcctgttgtaatcagagcaaaattctgcagtcagaaatatgaaaattttagatataaacaaagcgaaccaatgtccaccttctgcttggccagcttttccaactccggacggtaatcgctgcagaatcgacaaatggagcagaacatgagccaatgctttccgacgaggcagagtctatgaggaggaatatgcgacaaacatacctctcgtactccttccgagcttcctcaactgctgtgaaaaactcctccataccttctccagtcattgctgacacaccgaccgctctcaaattcttatagaactcgtccaacactaaactcatactgttcatcaaaccatgcatgtaccctggctctccctctctcccttccttttccctctctctaagcgcatcttggaacacctcaaagtcgctcatccaatcgagtgcgaagccgtgaccttggacatcaattttgttgaacacaaggatgaatgggagtttggttttataaagaatcgagcaagcatagagcatgttcgacatgaatgttgctggcgcggtcgttcgaggagtatcaatgatgtatgcaacgcatgtcggtaaggaagaagcgatggcgtcagtgataatggatcccgaggcagaccaagtgaagatttcgatctggcccggagtatcaatcaaaacatggctaggaaatttgttcgtgaatatgtcaatacttgttaaggcggttttagaaaaaggcaaggatgtatcgagagacacttactcgaccgtctctgctcgtttctcaataaactgaagaacctgatcaaacttagtagtaaatagatttaaagcagtcataattcctccattcggcccaaggttatatctgtgtcagaagcaggagttcgattttattagacaacgtccacccagataaataatattcgaggaggcttactgcttcatgacctctttgtagtcaacagtatctcggatatcaatattggcttggtagggcatgtgtgtaaccgccggatccaagttaacgacgtagggaggtttgccctgctgatggaggtacgcatttagacgctgcattaaagttgtctttccagagccagccatacctgaaagaatcaccaaggaaggtaatcaggtcaatttccatttgccgggatatatgattataacaggcaaggtatgaagctaaccaatacagagcacgacggccggtgttttcttctcagtagatggctctacatttgaagaagccggagccgggctgatttcagaagcagctccctttgag

SEQ ID NO: 1782 - DNA, 2222 bp, Xanthophyllomyces dendrorhous
ccctttgagagttcagatgccataagaataattcttttgtaacaagagtggaggagcaggtcgggtaaggaggagaacgataaaagatggttgctgcagctaaagaaacaatttggtcgttgcgcctccacttcgtgatgactaagcggtcataggaatacattctttcagcccttccctctcattctcatccctgttctcgtcctctaccattctatccttttcagtcgtttaggtcaaatgacgaaattatcaaacaagaagaggaaggcctctcaacagccctctaatacgggaaagaaacaacatgctgaggcaatatcttcaacgcccgctactcatgagcaggccgagctgaaggacgcccagagtggagctgaagaagaacttattggaggattgatttttggcgaagaactcgatgtgggtgcaatcgaatagctctctatgtgtctcttttgcggaaccttatcttcgaccatcttgatatgtactgtaaccctcagtcgactgtcgaggtccttcagaccctagctcagaatcccgccatcctgaagtcaaaatccatgaagcctttcaaatctgcaatgtacgaatgctggcggtcgatgcaggaagtctctggcacaggttagtttgtaatagttgtttttgattagtattctcctgatatccatgttctgttgctgacatgatgttcatctggatttgcgcgtctcaacaggcacgagtcttacctctagaatcagcaccactcttcaatcctctttacatcttgagtctcttgtattgctctcagaactgcgccttcgaggacaaactcctaagttgggttctcttcaacgttgggtccgagagtgtgatgccgctgctattgcaactgcttcttcaaccagaaaacgttctaaagcggaggaagagcaagaggagcgtctagtttgggaggtcttggatgcactacttaggagctgtacaactctagctgacgatgttgttgcggaggtgaaggatggcgaggttgaatctgatgtgaagagaggtggaaagggagtcagaaggtggaagccctgggatgtaaggaaattactgggagaggcgcacaaacacagagccacgggtcgaaactatactcgtgccgtcgaagaggacacactggtttgtacgtccgttccttttcatttaaatcgcccatcgttaaggatgccctaacgccctcatttacctcaatgtatgaatagcttctgaactgaaggagttgtacagaaaatctgttgttcctcttgacgtcactcctggaccctctcggcggcctcctaatctctttcccgccatcgtttatcacgttgcgtcttcatctcctgacacccttaccttggcatctacacccacgcaagtcgccaagcggttcgatgttccaggagttcctggggctttaatcatcactgatttgctaagcaaagaagaatgtgaggatctgatcgggatgagtgagacaattggaatgattgaagatcaaccagtcggcggttctgctgctgagctcaattctgtaagcctccttgtgaattgcgtggctcatgcatggatgttctggtcgaatttctcatattttctgctcgacttcgcgctttcaccaggtactcgcacacaacctaattctcctagctccatcccagttctcaacccctctgtttgaaagagttcgaaatctcttaccaagccacgtttctgtacctaatggctccaagtctagtggagcgctcaaggggataaaccggaggtacagaatttataggtataaggagggaagtgtataccgtccgcatatcgatggctcttggccttcgtctgcagaacttccggcttcggaagatggattatcacctgcaaaatatgtttacgattccgatccaacagtacgcatcatcttttcatacattttacgagaactagatctgctcacatcgccttcacgctcggactgcagttgtattctagatacacgttcttgatctatctgaatgactcgttctctaacggatgcactacgttcttcgtcccggatccggacagagacggagtgcttgacgcccgacctgttcggccgttggccggttccgctttggtctttcctgtgagtgtttgtcagccttttctgtctgatttctttcttccgttaggctcgataatctcgaatcgacagctgacatcggcctttgcat

SEQ ID NO: 1783 - DNA, 5417 bp, Xanthophyllomyces dendrorhous
acatcggcctttgcatatgaatacctacagcatggggctacgctaggaagtcttcttcatgagggaagcccagtgttccccaatgagttggagcatgccaagtacgtgatccgaactgaggtactctatgaggtcgaccgaattgctagtgctggtgaaggaggcgtcgtcggtggtcttgtgtaatcattgtaatcttcttccatacgatctgatcttcctgttgaacaaaatgcgcattctgctatcttaccgaagatgttgcacgtgatctttgaagctctggattgacgttagggttatgttatctgatcttttccgttacctaattagcggatctcctcaaacatcatagttttgtttttcagttgcaacatcatttccagaaaacaggagtgatgtctcccatcaacgcaaacaccgttctcataggcgagagagtattgctggtgccatacaagtgaggttgtcgatgcatcttttgtccagtcatggctttgttggcttatccgaaacgtttgtgcgggatttctttgttgttcctgcctcggacgaaagaaaaatccatgttgacgtgagtatatgttttaattgaatgagttcaatccttcaatcacacaaaattgagtttgtcctattattcctcatctcaacttcattcaatgagatgtagaaataccatgaatggatgatgagtgcggaactaagagagatgactgcctcagagcctctctccttagaggaagagtacggaatgcaaggtatggtctgtcgataacttcagtcatgtccatcttatcttgcatttggaccacttactagtccctccttctgacctgttgtctgtttgaatggaacatcatatatgcggttctcatgggaaacagagagctgggccacggacgaagacaaattgacattcatcgtgctctctcgaccctccgccaactcgtcggaggatcctctacctttgtcagaagagatcgagaaggctcggatgattggagatgttaacatgttttttcatgagccggaagaggaaggtagtgtgggagatgccgagtgcgaggtgatgattgcaggtgagtttctgttgcctcttcctgttctgtacattcagtctcggttgatcatcattctttttttctttctttttcttgtttgcgccgacagaacttgatgccaggtagatcttgaaatacttcagactagcttacctcgagattgaaactgacaccattctcatgtgttcgtcttgtacagacgtaaaggtctagcctacgaagccttgagtgtattccttcgatatgctacctcgccgcctctgtcaataccaacctcctcgaatctgatggccaaaatttcgacatcgaaccctagcagtcttggtttatttaataaacttggcttccaagttgtcaagttgtctgaagtctggcaagaatgggagttgaggtatggggtcgaggtgaacggaaaggtatccaaaggtgactggacagaaggaatcatacagatcggcgtatatcagtgaacacaagactacgaagaaggatacattcatagacaaatgaacatgaataatgaagcaaatgatgctcagttgctcctctcaatccctagatttgcagatctataaccatataatcgtgtaaccgtgtaatcatgcgcgtcatcgttcttagtcacagcgactctcataagaattcatccacttcgtcatcattccatttccacccatcatctcgttccaccattcgttcgtacaacatctacaatactatcatgagcaaagcatcattcccccaagaagatcctactatacgcaggtctcatttatctaaggatcttgttcagggaccagagttattcccggaaatcaaaacggtctacgatagtatgtttctccccactcattcttgtctcctgtcgcatgtagtcccacacattaactcatgcagaaacatgcggaacatccacgtctactctgtgtagtattccctgctttagcaaagagatatggagacaagaaagcagctgcataccgtgatgttgttactatcgtcgaggaagaaaaagaggtaacgaagatagtcgaaggaaaagaggtcaaggagaaaaaaacgtggaagtagtgagtgctgattatttcatgttgtgcttccctgattaatcacccgatcttcgttcgttcaacgtgtcagtagttgctgacaatctgatgtcatccctttctggaacgtgtcggatcgactgtctggcagcttcacgctctccgagtacaaatggctcacttacaaccaggtctatgatcggatccaagaaactgcttccggattgaagcatctcggcttgcaagagggcggccgagtcggcatctatgccgatactgggtacatatcatccatctgttcgatactttgatcctgttctattacataagctgaaatatctcttcggtgcgtaacaacatatagagtgaactggcagatcgctgcccatggttcaaccagggctctctacactatcacgagtgagcgatatataatagttgtgaggtgtaacctgtttgaatcttaccagattccttttggaaacatactatcttttaccctctatagctgcctatcccactcttggtccttccggtaagctggtcacgcaattaagtagatgacaagagatcattttatctaaccgtataagtgtatcttcacatccatcaggtttggctcggtcgttgactgagccggaagttcaagcagtcttcacgaacgcttccctgctttctacgcttgccagcgtccttgagaagggcgctaagaatgagggcaagcaggatagtgagaaagatgaagagggaggtggtgagaatgtcagatatgtgatctatgacggcaaattggaggatcaggtttgtatcatccattcctatactacactttgaagaaggcggaggttttcaattcagatcgactcacactgttagtgatttcttttctggcgtggttgtaggctcttttgcaaaaggtctcttccgtacttgaggcccgacagggtaaactgttccatctggacgagctccgagcgctgggacgagagcacccgggatcgtttgaaaagaagcccacccaggacgacacgttctgcataatgtacaccagtggatcttccggggcgcctaagggagtcattttgtctcaccataacatcatctcgtcgcgtgagcaattctttcttttgtcgagattgagaacatagttgagaaactgaacactggttccctaactctgataacaaaaaaatgaagtgggaggaaccaccctcctcttgaaggacattgtcaatcctgaggataccttccttgctttcttaccgcttgtatgtgatatcgcattcgaaatttgttcatacccttcactcggaagtaactgacccgtctactaatcgctctgacgcatagtctcacgtcttggagttgctcgttgagttgactttctatactaagggtactcctgttggatatggaagtaagaccctcattttcaacgttatgtctaatttctctgtgctgatccactcaattcattctcaggccccaagaccctgaccgacgcctcggtccggaactgccaaggtgatctcaaggctttccagcccagcatcatcgtcggtgtccgtaagtattattgtttatcaagcaaaagaaatgataggaagaaagataagctgtcatattaacaactcatcttcaacttcatatagccgcggtatttgagactatcagaaaaggaattgttggaaagatcaacgcgtacgtgtctgtttcgaaatagttaatcacttcccaggaggctcatgttttctgtcccgtttcgctctcagcgctggcgccgttaccaaaactgttttcaatgctgctcttgcgttgaaaaagaatgttcctcttttgggaggtgtagccgatagtgttgtcttttccaaggttcgtgacctatctgctccaacacgtagactgaaatctagctcacaacgcctcttgtccaatatttagatcaaggaacagactggtgggaaattgagaatcgtcatgaacggtggaagtggtctcagcaaagttcgctcgttgatcccttttcttccgaatccctgtgtttacgttactcatcaacattctcgattgcttttacatggccacatatagcctactcaagaattcttgaacaccagtttggctatcattttacagggttatggtcttaccgagacttgtggaatgggtgccattcttacgcctcagttctatcaagtaggtctatccagaatttaacgttgcatatatctggtggtatctaatcccccttggtttgctcttggacgtgtagtacgagtgtgttggtgtacctgtcccgtctgtagaaatcaagttgttggactaccctgatgcaggctacaaaaactccaacaaccctccgcagggagaggtcctgctcagaggaggtagtgtcaccaagggctatttcaagcgagaagacctgaacaaggaggtcagtttttgttctttttatcgaggtgcctacatacttagatgatttgaaacaagataggtctgatctctattttgtgtctaggcctttacgacagacggttggttccgaactggagatattgggcaatggaacaaggacggaaccttgtcattgattgatcgaatcaagaacctcgtcaaattgagctctggagagtatattgctttggagaatttagagtcaacctataagggtgccaacttcctcaacaacatctgcgtctacgctacttcagagtgcaatcgacccatagctttggctactctgcatgagccgaaccttcgagcgttccttaagggtcactcgatctctgatgtgaacgcagactcagattcgctcaacaagcttgctgaaagcaagtcggtccggtcagcaatgctgaaggagttgaacactgttggaaaaaagaacggtcttaagggaccggagacattggccgggttgattctggacgctgaagactggactgtatgttgtttcagccttcttccaagtcttggcatattggtatattggcaaaatcgttgacatcagaatctgccgactgtttgtcttgcttagccggataacggtcttttgactgctgctcagaagcttgataggaaatctgttgtaaagaagcaccaagatgagattgaagtgagtccttgcattctctcttaaatttcctggagtagaagtaatttgcatgatcaagaacgctgaattgttggtgattctatcttttttttgtgaaaacagaaattgatcaaagcgacttcgtcataaactatctcttctccataacaaacttttctacacatcgccatttcgttcccttcctttggc

SEQ ID NO: 1784 - DNA, 11396 bp, Xanthophyllomyces dendrorhous
ccatgaaatcggacttggtttattattactcttcgaatgatatttaattttctttgttaatgatattttgtctcatcgtatctacgggtttccacgtcaagaaccggttctcgtttctcgtccgatctgttcttatatgatcctgttatcatcatgatccgacacagactatagaagaaggggaattttacttatgatacagtagatcatcagagcgcatgtacaaatccacatatgcacgagtgatacttcagttcccaggggcgaccgccaccctaccctgctcctcagctctttcagtctttgcttttgtctcgctctcgacttttttcagcctaaccatctctttctcagccaactgagcctcctccaactcttttgctttcttcgctgcctctctctccttccacgtcccctttctgtagcgcaaaccttcccaaccagggccaggaagaatgacacccagttctcgtcggagatcgtccatgtcttgctcccatcttttctcccagtagactccgatcaaaggcttacattctgccgctgctttgagggcccaagggaggtagtctctcaagagggccgatcgagtagtggatgtaagagtattgaaaggagagagaacggtgagcgaggaaaggaagggcataggaagggacgtttgggaggcttcgaagatcttgagtgcgagttcagggaccaaagtagagggaaggtcaaacagaacatggccaaaatcatgcgtttctctgagacatttgggtatttgaaatgagacggtgccggaagcaggaggaggaatcagaacagacaaaagaatcaagagtgagttcgtatgcgctcatcagaatccattggcgatcaaaaagaacgattggttgagaacacaagatgaattcgagttgaagaatatgcttaacgaaccgatatctttgaagaacgtatgccaactctggatcatctacgtgatgaaccggcaacctggtgtctggactggtcccacatcgttcgagccaatcgcaatatacccgaccaaccgtgccctccttgagttctcgaaggtaatgcaaattgatgacttccgagtggattcgaggtcgctcgtgaaggatcaaacggccctcctcggtggaaaatagggtgtctcgtaagcctggtaaaaatggtgtcgaagtcgtttctgacagagcggcgatcatgtctgaaaaggttccaagaggcgtgtgtcagataaagatagagtagatcagaacatcgattgacaatgaaaaactgcttgagagaccagatgcaagcgataaacacaacgtgtagagaaagcagataaaacaagacaaacctgcccgacgagggttcaataaggctgctgccgcacttccgatcgtgagcacgaccttctcgaccccagtaagaggaatatgcccagggtacctaggaggcatagaagacaccatcctacgagcggtgatcgccggctgtttagatagcacacttcgagcgagcttcatgattagaacaccaagcaagaaagagaagtgacgaagagtgatgaaagattggggatggctgatggctagaagatcgatgacggccgacgaaacgggataccttccttaccccaatctattcgccgccatccaaccacccaccatttctctaaccaactgtatcctttcgtacatcgacatcgaaggaaatgcacacgcatgatatagtcatcattggtggtatgtcgataacagtgacccggttatctgcttgcttgactgttcaaatcgatttcatctgatctggcctagtcgaacttgacctactgttcgttctttgcaatgctttcctggcggacaggcggacctgctggtttagttgctctcaagacactcaccgaaaacgggttcgatccaatcctatatgaggcagaggagaaaatcggtggaactttccggtatagaggatatgagaacgctgagctcgtctcgtctaagtatgaagaaagcttattttctgttcgattcataccacgatctcatcatcatagcttatccctttcttgcattaacccccttctctatccacagacaacttactgcgttctccgatttcaggtttcctccagaacagggagatcatgtctccttgccagagtatgtggcttatcttgaacgatacgtcgatcacttcaacctgcaacgcaggattcgcaccggacaccgggtggttgatgtgaggaggttggatgagggaggccatgaagtcaaaattaagcgcaagatgtctgaaggttggcctttctctcttcttaatactggagatggatccctagatgttgacgattgttatttgcttcgatttgaaccagatactcaaacgatcagggtcaagtacttgtgtatatgtaccggacttcacgttttggtgcgcaacatgttccacttctctctgctgtatttagtgtggatgtaaatgtcattgattggatcccgtattatggtagcctcaaattcctaccatcagaggtatccaggttggttttccttctctcaatatattttgcatctgcgctgcactgactcaaaccgtatctggcttggcgtcaagaagcatatctctgcccattcagataagcaagttcttcattcatcatcctataaaggccgagcacaattggcggggaaaaaggtttgcatcttgggtacaggggagacagggatggatttggcctacgagagcataaagagtggagccaaagaggtctggatgtgtaccagaggagggtgcgtatatgtctatcgagatgcaggatacatcacaccttgcaacaaatcactcatctctaacgggtgtgcacactcagatttctttcgttcccaaaagtgttgaacaatttctcgattttgggagtcacctttgacggtcatctgcccatcgatggcctgattacgaatctatttgaggtgcgttgctcatcttggtctatctcttatcgaccgacgactaatacatcttgcacaatttttgatctgccaatctacatagtgagtctcagttgccggtcatcgtattctgtcaatttcgttgactaatcgcgcttgttcttgattttctatttttcttttagcgtgcataaatgggtcgcggcgtctcatcttagatggtatgtttttcaaaagatcacatcatgttcaaatcgtctattttctaagcatcgtttcactataccttggtcgtggccaaataggtttgtatctgattttgtcatcaaacgagtactttggctgttgacgggtacatcgggaggatgcaatcaatgggtaggagagctaccggaggaacgacttggaagggtacgtttctctactcatctcaagtgacatatatcactaaccatcatgcaaatatgcttttatcttcttcccaaaggcctacgtgtttctcaacaaatcgcatgtgcgtgatatattgcttttgttggtcataccgactgttgatggagtcctttcttcttttcacagaaagcgatgatgtacttgaataggccatacaaatctcggtctcgattgctttctttcctctcatcttaccatgatccaccagatgatgtggcgacacctggaaaggttgaaattcttccatggcctattggggtggacgaccgtggcgggtttcgattcgattggggaaccgcccgggctaaaggaggcagctggaaggaagtcgagaaacgattgggagaagctaaagttgaacctgagtatgtcatatcgttcagtcatatccctctctgtaccatggtttttctttactgatatccattggtttcgtcattcagtttggtgctgatggctacaggttacactcaagaagtaaggatttatcagctaattgatcagttcgactgattctaaatctcgacataagaacttaacgcaaaaaccgcctttctgtgcattgtgttataagtttgatgggtggttgggtcacgagtaccctcgaccatgggaagcaaactcccgagacatcattcgagagggttctgaggacgtatctttcataggtttcgttcgaccgggagtaggtcagtcatctttttgtttgcacttgagcgcgtagcctcttacttgaattaacctcatcctgcttattcgctcatcactaaaaaatcttggtgttcgcaggcgcgattcctccaatcgctgaacaacaggctatgtggtggacacttctcatccagaagcggatgaagctaccaatgacccccccacattactaccttctatctaagccaacatctagaattcagtacggtgtaagtgctttttttaataaatatctttccgagacagttaagtggttgatatgaagatgttgattgttgttctcctcttcaggttgatcactcgacgtacatgtcaacattagccaaagatatgggttctgctccagggttactagatctttggtggcaacatggatggttcattaccttggtttactggtccgattgtctttcttctcatcttgaactgggtgtgtgtactaatcgagttaatcattgactccatagcttctcggccgcttttacgacgaattaccgtcttgtcggtccatttgccgatgtgtccgctccagagatcgtccgaactgttcgtttactcaccattttcctcatctttcgatataaagctgaccactctgcttcattgcgcttttcgcaatcacaggaactttgggaaacagtgacccggcggggtgcgcttggcaatctgtttatgggcgtcattccgatgctcttttactgctctatcaacctgacagcttggtttctagagattatctggattcttctcggtcacccagacgtcattgggtttgctcgccaatggggacttatcaagccagagacgttttctgactctccatcttactcctctatgagatcggatcgttcgaaaggaaatgtccagacgaatagaatgagaacaagatcggacaacaagacaggccccatctcaggttgtgaaagcagagagttgaaaagtccaccaggagggaatatggagttagagctaaaaccggaaatgtagtcctcatgctttgtctacctctattctatattcatgatcaacgagattgttcattgctatagccccagcacacttgttgtcaccgttgccattcttcgtttgcatcagggaatggacaaacaagaaccgattttttttgaaagcatcaggaacgcatgaacaagaaactacagaagataagaaaacgatccaccattggagtatcgtcagactaatatctatcattgttttccctaccaaatctgcgctcgttaccaccttcgtagcctcctcttcgaccatactcatcaccacccctgtattctcgaccaccagggaatccttccataaatccaccttgcctctcttcttcaaatccgcctggaccaccgaacctaccatccggaggtgagccccctccatacctatcaggcctcccgtgaccaccccgacgttcctcttcgtattcacccccatatctgttttgttcttccgcgccaaatctgtttcctccctgagatccatattgctgttgaccatggcccggttgaggaggtcttccattgaatcgatcttctcctcgaccgtactcatcaggtgatcgtcgcccgtgaacagtgccacctggtccaccagtgttacgatgaggttcttcgtattgtccctgtcgaccaaattcgttctgacgaccaaatctttgctgatcaccatcgccaccaccgttgttgccaaaagcctcatgaggaacttgaggcttgtgatgttgcctttgaggagaggactggtaggtagactgattttggccatggaagggtcgactttgttcataagagagctcatcagtctcgtccgacgtccgaccttgcgtgtacgacgattgggtctgactgtatgttgccgacggtttctgttggccataagaaggtctgttgtcattctcgtcatcatcatcttgacggccatgcacccgatgctcgccgtaagcaggtttggactgtccgtaagcaggcgtaggttgactgtaggaggacgtcgtctgtccgtagacgggctgatcatcataggaagtcttgctctggctataagatgtctcgttttgagtatttccataataagatgcagcctcgccttgagaaaccgtagcattctgaccataggaagattgctgaccatgggaagattgctggccataggaagattgctggccataggaagattgctggccataggaggattgctggccataagacggttgctggctgtgtgcagattgctggcttgtttggtagccagaggatgccggctgaccataggaagccgtttgaccggaagagtaactctgatacgaagtcttggtgtcgggcttggactggttgtcgttcttgtttgaactacctccgatgttgaacactttgctggcaaagtcagaaacgagagaagtcatggctgcttgagctaggaaagaagaaaatcgagtttgttatagcacaaaagaatatgtatgatagtcagccgaacaagttacaggcagacttgttagaattacgaacgagaaggcacgaacgattattcgcaaactcttgaagagttgggggcttgacactcatctataaattgttcaaatataacatttagcgctaacacatcagaaaacacgacgatgagagagatgcaccttattgtcttccccaagatcttcaaatgatctgatgtttccatgcgtccgaatactagatttgattcataagtggtgattcaatcagaaacttatcaaacggagattcaaaaaaaaagatggtaagatcactgacttttccttttgaagccttcggatcacgtcgtcgacatcagaatttcctctaagccaggtctcagtcgtctggatcatatccttctgaatctgagagttccgatcaatattctctggatggaagctaaacagaagcagaaagaagggaatgaaaacgttgttcatatatcaagtgatctcgttcatgtcgtttaaaaattgacttacaacacctcgagaattttatcggctacatcgtttggatcctgtctacggtcggtccaagcttccgtgatgagtccggcaccatacttgacaatgacttgcgccacttgtcctgctggatgattgagaacgagacctgaagtatgaaggaaggcatgatgtatctgatcggctaatcattctaaaaagactggaaatttcaggcgagcgtaacgtaccaaaatgatctttttcgaggaaaacatgaaaagcgcaggttcaacagttatttctcacggcgatgatactaagagagaacgtacctttgcttaagaacgaatgagtaggatcggaagcgttgtcattgtgaaagacttcttcctgttcaacactattgtgtggaaatggggctcggatcaggcagtttgcaaaagtaaccgaacaacatgaactgatttacctcttgatcacgtaggatccaccttctccaagaacctccgtaaagttctggaggatgggcaaaacaacactgatatgaggaaacaaaagtcaaagatagggggttaaagttggtcaacccacaaataacgaatagcaaacacaatacatacggttcgaggcaagtcaacacataagtgtacgtattatccgatatctcctccagaaaggcttccaggaatctttataaaggcagaaacaagtcacgtattttcagtacacatgaattgaatagatacaaggtcgacaaacagaagactgacggaatggactcgattatggactcaatctttttcatcaagtctgacaagttcagtaggaaccacatatgtcagttagctttgtgtatctttcaaactgagaggacgatgcaaatcatggccgcactatctctccactcaaggatgctccaaatctggtccctaatctccttgatatctcgctcgctcaagccagcgccgcctctcattcgctgacccttctgcgataaagaatctttggtaccatcgatccggtttagtttttcttcggaggtagcattgttctcctgctcgttgtcacctcctttggattccatgaatttggagatcaaagttttgatcaaagccatattgcccgagtcaggtttcttcttggccgcctccattttttcataaagattagaaaccgacatctataagatgaggtatcataattatggaacccatttgagaagtgagtaagtttcagttttgcgcaagtcaacgaaggataactaataaaccaacctgagtgatgtgatcggtagtctcgccaagtaatgaatgcctaacaagaattgatggttgcatgatttagtatataaaataataccggactgaccggggagtggaaagataaaagagaaatatttacaagaagtcgctagaggcaaacgttcctgtcaccaaggggtacacaaccttgccgttctgtaggcggactttagtgtttgctcctacatgaggaaacacctgcgcatcaccaatatgaaagacttgagaaatgagtagcgctcaaacaacatgatgcaattcgatcgcacctgagtataaccgagtttaatcagagtgagctccaagaagttggagtgggccgagaaatcttcgagagtatgcaacaatgtgccgagcaatctaaaggcctcatatttgtccttatcattattctgccttcctttggagatgcactgctgaacaagccgtcggacaaggccagcagacgaatcgtagtcttgattctcggtcgcgatataattcttcagaccggttttgagattgatgtcaagctcctcaggtttgacctcactatagaattccaccagatcaggtcggtgaaccaaataaactaatcgagagacagacgtacgctcgtagccggggatcataatcggtagccttgacggaaggattggtaggatctgttatctcagcaagtcaatgccagacagttagcattacagttgtacatgtgacataagcatcatacttaccaggatatcctctgtagcaagaacaaggagatagagtgagtggtggcattgcaaacagagaatgtgagacacttacttggggttatcgatatgctccgtggtcaaataaacaccaagcctctcttcggttacctgagcgagtgacggccgtcagatttcatatctcgaaagaaggaaaagaaatagaaggaagaaaagggcgagtggatgtagatgctttatgctctccgcttcatagctctcggagtagaaaacgaacctcaaattcttgagtagcatacccaaagctgagaaatcccaacaggccaatgacgagaaggattgtttgcttggaaactttggacaaggcacctacgtccatcgcctgggaatagtctctgttgaaggttcccagttgagaatgatcgagtcagagaccttccctcgacaaacgatcttgacacctggatcagagttcactctaccttagccagttcccaaagtagacccggtttctatcgagatctttcccaaaaagatgtttgaatgcgatagcgagcgcagcctcctctaagtggtccaaggaaaaaatcgaagatacttatcaggtcggccgtcctccgacgattacaaaaggagaaagagtgaaaagacaaagacgaaccgatgtcaccatgtcgccaggcctctccttccacgaaggacttggcaggaatgttctattatggattaagatgactctgatcagctatttgtagcctaattgactggatgaagaatagttcataatgctagtgtttactgatccctgccccgaacgcacgaaccgagggagcgaggcaaatcgccactagaacgagaacgagagatagtttgaaaggatttttgtgaagaaccataagaagacgatgggtgagtgaagtttgttggtggttggaattatggaagtggagatggaaagagaggggaaagagagatctccattttatatctcctgccaaaaaaacgaaggtgcttgcataaaatgacgtttctccctatcttcaccctctatgttcacccgctgtacttcttttgtagcttctcttctacttctgaatatggttaattacatatgtatagagtataaattgggtctcaaccataacgatagacaaaataagaaaaaagcccaaggcaaggagaagattaagtctagaggtactatcagcccgacatccgctcacaactctacttttcctaatccttcaactaccgaatcatcctttgaagcagagccaagtagtccaatccaacgggctaggttcgaaaagtcctgagtgtcgatgattgatctagactcgtctcccttgatgtagtatgccgctcgtcgactgagaaagccgacatgaaccggaagatagaataagattgcgaacgaaaggagggatagaacgacgagaagtatagaatctgtttgatcattcacatttgatcgattgatcggttgacgggaggccagacaagaataaacgatgataagcattagtgatgacgctcgttttttagttgaccttttgattatacgttccagatttacaagcagaagaaacatacaaatgatgattatctcccaggtgtccatcatggcgagtcctagggaagcctcgaaccagacacgttgcctccaaaggaacagacgaagaccaggcttgttcgtcggcggccgatgaggaaaagtcatagtagagaacaagctagagtcgacaaacggaaggcaatggaaggaaacctgaattggatggagaacgagggcgagcttgagtgtttgcgactagcaagactcgagaaaccaggtagaagattctgtaaacagaggtgaaggatcagaggaattatcaagcagacgatcaagttaacgacaacggagagagaacatcaagcggttaatcattcttccagagatccaatgaagaaatacaacaagacaagaacaatagaaacgcacccagattagagacgattgatgggatccaaacaaggaagcagggtatgttgatcgtggtggaagtcgtcttcagatgatctctcgaagtcggacaaacaaataggaaaactgtgcgcattttgtttatcgaatttcttatttgatacatataccccttctcatcagacatcgttaaaaaatgtgtacatagtattataatctctaaaagaggcacatggtgggtatgtaagattgtatagatcgcaatcacaaaggataaatgagaaagcccaaaaagaggatagaagaaactaagagaaaagcccatctgtacgaaagaggaggaagcaaaagagatcacccaagcaggcgaaggaactacaaagc

SEQ ID NO: 1785 - DNA, 41171 bp, Xanthophyllomyces dendrorhous
gcatgtatgtatatgactatacatgttcatcagaaagcaacgcggaaactgcgacgatctgttgatactttgctttcagaaaccttaacgattctaacactgaatcaggggtagatggatcgccttcttccaatacccttctttccaaggcatccacgtaggacaacgcgaccgcctctgagatgatcggcggtggtgcagcctgcagatcatccatcacgaactgggggaaaccccctaggccttggtcgtctactccgtcatgcgtatgatccgggtgatcgtcttgctgaagttcgtgctcctgatgatgtggatcctgctggtcatcatgagattggtgtccttgctgttgatggtcatgctgatgatgatgttcatccgactgaagttcttcatgttgatggtcctgagggtcatatacactcggtcctgcctcagtatctattgagagatctaggtggtcgtctggttgaagaccatcatgtttcccggattctgatggttcggtatttgcagtcaacatgccttcctgtttaagtctgatcttgggtcgaagaccgtgtctgatataaaataagtaggaccagtgacacaattagcgcaatgtgtagatggttgggggatgaaatgaggcgtgtctggaaggaacagcatacacatacgtcgacaaaaatgaatctaaccatccgttcgtgcccttcagcctctcttctactggcacaccgagctcaatttgaaaggccataaatcgctccttgatgcgaagacctgtcggtctgtattctccctcttcaatccatctcaatagagcggcctcaacatctggaaatttcactttacgggcccgcttgaggctgcgcccattatgagtcgtctctgcacgttcctcgatcaactggcgtttcttgaggttccgagagagcgtcgcctgattaaaaatcagagaaggacctgtattcgggaacagacatacagatgatgagcctggattatcgaagaaagatgagagtgggtgtcgatgtgatgttcaacgaaccatctggattgttcttgaaatgctcaaccgttcgaagctgattcgattttgggttcttatccatccaatcaaatacaatcaacctacgaggtgatgtagacattgaatcaatagaacagaggattttgaacattgacccaacataagattataggatgttatgcaaagacgtggtgcacaaacgaaaatgacgagacctaccaatctcctgtggtaagaccagtcctgtgcaactcttccttctccttcatttcaaggtgattgtccataagggatagcgcgccagaaatgtcacctagtgacggactaaaaacctctaattgatggcaaacatcttgctccagttgttctcggtcatgttcttgttcccgatttcgctcctgatcgtgcccttgctcgtgctcgtgatcgatggccggaacgtccacaacatgaccgatatgtccgacattaccgtcttgccttgggtcatcatgttctatacagttcaattgatcatctgccgcgaccagctcgtcggtcggctcaagagagagttgagggtcatcatggggaacgagaatatgattcgatgggattggttcgatctcaaacggttcgtccgacggagaaaccatttcccgcgaggaaggcagcactagagagggctgattaaagtcctccgtggaggatgtctccgtagacatgatgagtagactaccacggacagagagcagaggtcgatgagggtggtaagaaggaggagaggatggacgcgtcatttgccatctaatcatgtttcaccttctcaacttcatcctcatccattgattttgaccagacctttctgtgaaatcgacactcatcatcttcttgtcggtctatctagagctcacagttcttggaagcttctcatatctttgctttctctctacagatgacaccaattccagttatccttcttcgagaatcgacccggtcatgttcgtccaacacgccggatccatatgcttacctgctatcccaaccttcttccaattcatctcagccgtcttatacacctttcttcttgcctgtatttgaaactgtgttctctaatgagtcggctctcgatcaaattgttgaacaaggtggagataaatggcgaggtgtgattgtgactagccagcgctcggtcgatgcgtgggagagcagtgcaaacagggtgatcaaattatcggctgagaagtctggcaatgtcaaagggaagatgaactcggtcgaagacgagagtggtgagtgctcatgtacttcttttaactaggtcttttatcaatgactgactagattcggctcttttggtttccgacgatatcgtgtcgcttactctatagcaacccaatcaaattggttatctacacctttcttcactgtcggaccttcgaccgcccgagctctggccgatctcggaagaacaattccctcctgtctccgtccttctgcaaccaatatcgtcggaggtgattccgctgggaattcgcctgctcttgcgcagatcatcgccgaatatgtggctttaccatcgccaaacctatcatcgtcatcatctacatcatcttcccaacgttcgccaccactcttgatatccgaagacctgtcgctgcctatccaggacaaccggccactgctgtatctcacgggagacaaaaactctacagtcttggccacccatctctccatgcaaactcctccagttgatgttcaacccctggacgtgtaccaaacaataccttctccaacttaccccgcgcgctgttcgaatcttctggctcagctatttcggtccgatatgcaggtgtctttgtcgcagaaaccatggatcgtgatgttttctccttcgacaataccgttgatcgtgcaagagctcgaagcgaagggtctgacgagccagtttcgatatgcggctattggtcccactaccaaagatgcgatgaagaaagagcctgcgttgaaatcagtatgggaagacattgtggccagtacaaaacctacggcgggcgatctgatcagtgttttgcgacgtaaggatggattgaattgaatatcgatccttccagccattcaaaggatatacttggtcgtatttatcgagatatatgagtgattacgtcgtctaggctgagaccagcaatagatgctccggttggctatgaacagagtaaaggaagagacagtgaggaggacctgagatgtgacgaaccccgctcgtgtttttctttctgtgttttttatttttatttctttctttccttcttcccatcgtcaacatctctcttccattctttttcttttcttttgtaaacgagctggactagtttaggaggaagatacggcgtgaatagaatcaaaacgatcggatgcacaactctccaccgacggaaactatcagacagaggaggccaagtgccatctcatcggagggaagagtagaaacagcgcgagcgattgcagaattgtccgttcttcctgttcaaccaccatcgtcccactctaatccccctccgtcgaccttgtcgtcgtccctatcgccgtcgaatctctcttcctcggctatccctcctccccaactccaaccttccctgcagctagaccagacagtacagcaggatatgcctatcatcaatagagcccccaggattcccggatccaacaacaccaactatcggacctttttgcccaggcgacccaaccttcaattcaaacgaggtttccgttcttcttggcagcaaaagagagaagagtctgatcctcttctcggtcggaaggctggagaagagggacccaagaagaaaagacgaggcatgggttgtacgtgttcttcaacgatcattctttttttctttcttttccccctcttctccccctttcgtcctcctttttggatccgctcttcgtaagcggaggacaccgtttgtctctgcatcgtccagattcacccgataaatccacttctacacttcatcttcttgttaaatcgaacatctgttcaatgttttacgatgattgtcgatcggttcgcttatgttctcttgacttcattttcggtcacaccccgcttggcttgaatagcccgcttgcactcggcttggaagtcgacccccaccagatggtatcctatccctatcggactaggagctttgtatctaggagcccaacaggctaagaaaaagtgggacggtgacaaaggtgtcgtcggcatcgatggagacaacgacgaaatggcagtcaagctaaggggtccctggcaggtatgtgaaatcgttaaaaactccaactcatcttgtttttttctcatccacttgaagaatatcataccctcgcatgcctttaactctcgatattccaccgctaatcacacacatgcctttgtttcggtgcttttaggttcatgtcatgggtgctctgcctttgcgatccctttcaagattatggggatatttgaattccctagaggttggtgtaacgttcttgtacaattcttgaaggccgaaatagctgctgaagcatttgtctcaatccgattcgatcctctcttccaatagcttccagtgtggtctcgagaacccggtttcaaactctattcttatgtgtttggctgtaacctcgacgaacttgaccagcctgatctcaaatcttacgctagtttgggagactttttctatcgaaggctgagggacggtgtccggtcaattgacgacgaacctcttgtatgtcattctatctattgtgataaaaccgtcttgtgcgtttgcttcaatatggatctaaccgagtgtcatacttcaaatttctccatcataggtttctcctgccgatggtcgactgctccactttggtgctatcaatggagcaaaggttgagcaggtcaaagggctgacctactcgctggatgccttgttaggtaagactggtggaccgggcactcctgccgcagaggatgtggaatttgataccaaccgagccttcgacggtaagccatcttgtttttgtgtcccaaaacttgttcctacagtttcaaactttcacccacggtcatggttcgataattgtactaatcacctatctccgatctagatcatgattttgccaacatcaacgacattgactactctctgggtgatctcctcgggtcttcccaacgaaaggtcgatgctaactcgtctatcaaggacgagcaaagttccgaggatgagtcgtctagcatgcggtccagctcgccctctccctcgactcctgggtctcccaacgaagacgcctctgttcctcaggaatccaccaccgacaatcttgttcgtgatgcctcggtggccttatcaatgggaaccaatgttgttcctgccgatgccagtagccctcgaagctcagtctccaagttgagagaaggcaacggcttgttcttcgcggtcatctacttggcacctggtgattatcatcggttccacagtccagccgcatgggtcgttgaacgaaggagacactttgctggtgagtgtcttgctaagatgatcagtgtaaccttctagcatgctgacggatcatcatctatctcactttctgtgtaggtgaacttttttctgtctcgccgtatattgctcgtcgactttccaacttgtttgttttgaacgagagggttgcacgtgagttcaaatcaattcgaatactctattatttctatagagcgccatgtgcttattgcatcacttcgcccattcagttcttggtcgatggcgatacggcttctttagcatggttcctgttggagctaccaatgtcggtagcatcaagatcaactttgatcaggtatgtgatttcatcagtcacgatgtcaatccaattctttccttacaaattaaaacccgatattcttatctttccatctctttcaatttttaggctctacgaacgaacgagcgacgacctcgatctcaccctgcaggaacttacatcgaagctggctactcaaaggcctcctcgttgcttcgaggacagcctttgaacgccggagaagagatgggtgggttccggttgggaagtactgtcgtgttggttttcgaggctcccaaggactttacattcaaggtccaggaaggacagaaggtcaaggtcggagaggcattaggtaagtcatcgctttatatgtttaaggctgcgagtcaaactccagattcactgatgaattgccgctctatctcaccgttggttaggttacgtgccgagtgatgccaaatctaaatgatcttctcaagatcattgaggacgatctagtctactgtttccctttcttctgttcttttccgttcgctcttgatttgtttcttctttgtctcaagcttcaactcttcggaggatacttttctcccaaacaaaaaagcatatcgacgcgtctcaacaccgtgcattttttcttttattgtctctgcgttcttcttttcacatctttttccatctgaaagattgactactttttctgatctactcacacacactgtttaaaatcatttatttgtttattttctatccgctttatccacagttgttttctattcttaccgcgacatcgttcttttttcttttctcccttattgttaacctagtcttgccatactttctctctcttctgttttggtcttttgtgttcgtgcggacggcgttctggatggtgctgagctatacgataaatccagctgagaatgcctcaaacaacgtgttgaacggctagacgacacgagtttccgaaatcatgattgatcgatcacattgatggaacgagactcttattccggaaagacatgatagacgaattttaaactctcaactgctaactttaacccaagccccatctcaattctttctcgttgatcaccaactatggaaattgttgacgtctgggtaataagaagatagaaaaccgatcctctcgcagcgcaaatttgcatctgcctgtttcagttaacataggaggaaattgaggcgaattagggaaaacccctcgaggaccagaagaaccgtctgggatatctgtaagaacctagagaacttgacccttcatctagtgagtgaatcatactccatccttttttaggacctgtggagctaccagaacacgaagatttggcaacattattagtggtgatcctcatataagtcgttgacttgacacgcgccttaatcaaggttacacctgtctgtaaccatctgacattgggcttggaaatgagaaacctcaactttttcctatcatcatcgaccttccgcactctcctccaaagataacctatccttctgaatccctcttttcgtgaatctgcataacgttcttgagcagatctcgacaaccagatggctgactcgaccaacgcattcaacatcaaccagggtttcatcgcctttgaagtttcacccgagcctgaagtcgctccaagctccgttcacgcgtcgacttccaaaccatcagacggacataatgcggtccggtcgagcgggaagggaaaggaaccagcgcgagagtcgaacaagcgatcaagagaagacggagaatttgacccgaacgatccagacgcgtatagaaatctgaaagaggagaggagagcagctgggaggtttacgccttggacggagggccttgactggaagtgagacgaacatcttccctttctttgtttctatcggggattcttatgactctctatggaggtcttcgagaggtcaaatcaactgctatcttacatagcgcttgataagggatccatcactctgtgtagtttgctaattatgcgctctttctctcaattacggtcgatcttagttcgtgtaaaaatccggcagaactgtgagtgacttgataccgtcttgactctttacgcatatgtactgaaagctcattgttcgcttctgttaccgatgatgacaaaatatagtttgaatcgagaaattacttccttcgtgtcgtatatctcaccaactgtcaaagagcatgcaactcgaacacatatcgtggagctgattcggcgggctgtcgttaatcaatggaaggacgcaaaggtggttccatttggaagttttgaaacgggtctctatttaccaaatgggttagtactgatcctatagataactctcattcatatggtcgttgtcggttctgaatccctcagctgctttgtttccgttgcgcatgctcagagatatcgatttggttatttcttcaaacacaatggaccgtcaaaataaggtcaccgtgctgcataccctcgcttcagtcttaagaagggccaatttggcagagaatattcaggtcattgccagagcaaaagtgccaattgtcaagtttatatcatcttatggtccgtcgggtctgttatcgctctttgacgcgtatttcgaggataacgatctgattcatggtctaaatgcccccttgttcgacaggtcgtctcccaatcgatatatcgcttaatcagttgaacggtatatctgctgggaagattgtaaacagttatctggcagcgcttcctgctgttagacctttggttttggtcatcaagtcgttccttaatcaaagagggatgaacgaggtctactcgggtgggttaggaagttatagcgtgatttgtttagtgataagtttccttcaggtatgtggttcttcttttgtgacaggttgaaacaggactcatcgtcaaatcacgtgtatacctacctaggttcatgcaaaagttcgaagagcagagatcgaccctctggagaacttgggtgtccttttgatcgagttctttgagctatatgggaaaaacttcgggtatgatgatactggtatatgccttcgaaatggtggttcttatttctccaaatcagaaagaaactggatcaacgagaagcagcggtatctactttcgattgaggatcctcaagatcagagttagtcaatgacctctcaatagcacttcgctcgtcctgtctgaacatgtgttcttctctttccccttcatcaacaaagcaaacgatgtagctcgttcatctcatggtattcttagagttcgatctacatttggaggagcgtatgaggttctcacttcgaggctttacatccgagccgacgaaatggccagaagtcgtcatggtcaaaggcacttgagattcactaatagtgatgaggcaagcatcctgatgggaatcatgggagtgacgcctgaggtgagagtgtatcctacaagtttacctggtttttcaaccgtgcataaattaatgcgcctgcgcgttgttctatacatcctctaggtggccaagcaacgacgattcctcgaagatttacacaatagtggggttcttcaaaactcacttaacattccaaagaatgcaccccttccagacctgcctgcttttcttcaaaacgccacaactcagtcgtcgaaagcaacaaagccaaggtctcagacatcgtcgtcctccttctcggttcgttcgcctccgaccgtgaaggcgccaaaacaaagcatggctgcgatcatgattgaggatgacaccgagtctgaagctggacacatccgaaagtctatccaagcgggttacgtttcgtcagactcagagatttcattcatcgacaaaccattcaaacctgcctcagccgtcgtttcgcataccgttgtagaacaaccgagatcgagatcatcaagcgccaatccttactctagatcgtccctccttcaacgcctgaacagtaattctgacgtcaaggaggattcaagatacgctgccacgcagtctcctgcctcgaaacgtcgtcggatgaagcaagatgctttctcgcctgcgcctccgtcgccaataacgaagaagagccagaagaagatgactagaaagatatccttgggctcttctgattcctctggagaggaaggagagatcaaggagattgaggctttcaatgagaacggcgatgacgacgatgatgattcatcgagtcatatcgagggtcaagaagaacttatatcaacatcagacgaggaaataaggaaggcaacggccaaatctgcgagaaggaaagcaaggcagatgaggagagatttttgggcagccaaagggggagactcgagaatggatttagcgtatggatcgttggatcgggactgatctcttggtccctttgatcaatatggaggtctgctttgttattgcatgcagttctcctttggcctgatttgcgttccctattcttgcagtttaactcgcttgtaggtctgggagggggcgtcgtttggtatatggttaggctgagacaagtgcgcatatagtcatccgtcctgtcagccgttcctgagacggcagtaacatgtcaaggacatcaccccttctttttttatctactcgcaatctttcacaaatgaaccaccaccaccgtccttgttcctcatcatgcctcctaggaaagtacttcagtcaagtaagaaatctcatacaccttcggaaattaaggaacaaacgataagtaatagtcaggtgtgtccatttgtcttatcatcctaggccccttcttcgtgagtttctcaagttggttcagctctgtgaatcatcttgactcgacagactagtgaggtctctgatggggggtaagttcaaaaatccaagaaaagcctctgtagatgttttctcagttgaccaatttgatcactacaaagggatctggccactctgctgtctcaactacaaggtgatcgcacttgaaattcatcaatctgaattggggaccaaatcttgttctctctactggatataaactgaccgagacgtttcttaacatctctcaggcgcggtcgccaagaaacagaaagcgagtaagaaggcactgatgatacagtcaacggacgaagccgctctctgggtacattttccctgttatattccttatcggagaaagaatacctgcccgacagttttctatattgacacagagcttctccgtcccttttcttcttatgttcctttttctctctttgatcgagtagatctcacgattggaagaaacatatgctgaacgaaagaaagctcagtaagtatatggagctctcgacacactcattttttcaaagctcatctgcccaatcaccttctcccttctctctctgaaatctcacaaacagccaagtcttatgcgacgaatcattcgctctgttggagaaggatcaagaagaagtgattgactcgatcgagaaacttatgcagctagaaaaccagttcaaggtctccaccattcatctctttctctatttctgatatcagaaggccatagcaataccgtagaacttactcttgttaccccctggcgcggtaacatcgcggcattcgtttaggaattctgtgaccatctcaagatcgaacaagtcgactcagcccggttcagggaatcagccgtgcatgggtatatggtcgatcttgaggaaacacttctaggtacgaataccacttgacgttctgcgcctcacatctgttggtttgtgtttggtatttcatactcgctcactatttgctttgagttggttcacgttctgccacgttaatcatcgtgcatcgtttcgatgccatgacacaacatatacacagccgagaaacatttaggatcataattagagtcatgcgggtacccatcccccttttgacctgcttgcttaaattcctctcgttcctgatagatgtcttgtattgtgtctgctgtcaagagcgaacagactgggcgatagtcgacaaggccatgagcggatatgatatcaaaaaaaagggaaaaagcgaagagaaagtaaaagacgaaagttcaacgatgtaagaaaaaagatggaaatgaaatcctagataaacgaaagggcaagaagtaataagggaagaggatacagagaaaaagaggaggttacaggaaaaagaggaggcttatgatgtttctccagcacctcgaatacaatcagacttggttaagtaacaaacacagacaccactgaagcatcctcaggctttgacatcttccatttcgacgtcggcatcggtattggtcttgttaccatcggccttctcggctatcgcctcgctctcggagatcttgtccccatctactactggcgagatcttttctttgctcggtgaaggcgacgaggccgaagcattagcagctccaagtgtctttgggggggacggctttcggtcatccgtcgacttgacttccccgccgttcatggtcgaatccaaatttacagtcatgcttggcaaaggcgaacgttgtggagaaacagctgttcggtccggcatcgctttcgaagagccgtctagagctgatgcaggtgtcgacggaggtgctgttgtcgcagagacgggtgtaggattgggtgacaagagacgactgagatgattgctactactgctcgacggcttagatgatggcgtcgaagtggaggcaggaacagcaggacatttctcgtgatcgctcgtcattgagacatcttttacaatcgataaagtaggctcagccgggatggtcccggaaatagagtcgggggcagatgtgattcttgtgggagaagaactagtagacgttgatctcatcggttcgtcaacctcctttgaacgagccggggtagaaatggagggcgagctaggcgttgctccgtttgcaccgaccttgtcttgtccggaacctccattgaaggcattagtagagggcagacctttgtcttcagtagattcgattttaggagatgtttcggttggcgaggtcgcaatagtctcatcgataggtgcgttcgtggccgaagcagcaacgactggagtttgagagttcaccagcgacgatgacctctttgacggggtcgaagttgtagacccagtacccagcttaaggtcttttgatccaggaacgacatccatcggtgttgtcggcctggacgatcgaagattcttcaaggcttcttcagaaaatccaggtttggtcgttggtacgtggatcgtcgtcaccgttgtcatctttgtcgtcgtcggttgagtctgagaagacaaggttttaggcgtcagagtagaaggcgcggttgtagacggaacagggatagagctgggactcgggctcgtcaaattgtggatcgacgtcacggatgggacgggaaacagaggaggcgcagggacagaagggaccgttggtttcgacactccattcacctgcggctgggtctgtggcgaagaaagagatggaagagggagcggagcgggttgagatggaggcggtggaggttgagattggtttgaagaaaacgaaaagccaccagcaagacccatcaagagatcggcagcgccgacagcgtccgaattagacccttcgtcctcatcatcatagttgtcatcgacgtatcgtagggcggcagcagcaggggctggtccggatgccgatcgcccagtggatgcttgtttgtgattttcacataagatgagatgttagtcagagaaccatttacccttcaagtaaagaccaagaaaaattgacctacactgggaatttttgccagacttgttgttgcccgagtttgcatttaacgtcaccttgagcgaagggccgtcccctcccttctttccattcttttctgctttacttgacccgttcttctctaccttgtccaccttttcggtccggtcgtgtcggcctcccttttctggtttctctgccttttcgcctccctcatcatccccgccacccgtcctgtcggccttttcgcctcgttctctctctgccttttccgctcggtcggccttgctgtttccaccggaagtcgtcgagtttctcgaccgtctggccttcttctcttcacccttcaatcctacctgggtaccattttttctctttcttgagcctcccccgccacctgattccttgacagcggcagcggcagaagatgaagatggtccgcctgcaggactagtgctcaacaattcctcttcggcagccattcgggaagagcctttaccgaccgaggaccttcgatgtttcggcacgctgttcggagaattcgatactgtgtttgaagatgggttcatcgtgggatcatacctccttccggcggaggcgccgacaacgctaccggcagcagcggcggcagactgtgagtcgtgcgaactaagaggtatgatgggtgatcgagggcgttcctgaccggccgggtgactatggaatgggtgttgagggggctgttgctgttgtggaggatggtggtatccagccgtgggaggataagcagatgggaacggagatctggcgcctgaacctcttcggtctcccctgtcttctgaagcagccgtactttcatccgatcgtcgacggtgatcaaagggagatcttcttccaccgtgagagcctgtgccagagtagtagcccggtccccctccggttgttgtacctgaggcacctccatgcattgccgaggcttctcgagatcgttcccattccatctcaacggtggaggaaggaagagctcgctcggatggaccggcatcagcggcaccggctgtgggataaccatgtcggacgcccatcgggccagccgtcatcggttgaatgtagggcggatacgggttggtgtaggccgcctgggaggcagggtaggtgtctgaatgtctagcatgaggcgaaggggcggccgaatttcgagcggcatcgaatggggctcgtccgttcggtagatttcgaccaccaccaccaccggaagagggtggtgggggtcgatcgacatccattgcggatccaaccgatcgagacgatcgagaatcttctgctagcccggcagggcctctatagtgagcgctcggtccttgtggaggtgggggtgagggaggtcctctatagtgatgaccgggaggaccggtcgggtaatatgggttgaaagctgatgcggacgaagaaggaggagctccggaagcagttgggtgtccctgagaatcatttattgactctgcgcgaccaggaccggactgaagagtggaaggaggaggagggccaagatcaattggacctgacctggatcccccaggcgcactggttccgttcccactaccaccgatgacgcccattccagctcgaagttcttccgagctattctggttaattgcgttattgtacgcggtcgggtgaacgtcttgaggcggaggtggcactggggacgggccaccattgatttgcaagtttttcaagagggaaagtctagatttgatggtctcgttcgttgggtcgaggtcaagtgcccttccgtacgcgtcgatggcgtccgcgatctggttgttgcagctctcgtagagtgagcccagatcgaaccagacctccgagatatacgggttcagtctaatggctcgagagtaggcatcaagggcgtctctgaactggttgatttgatagtaaaggacaccgatcgagcaccagaacgtcgggcttcgaccatctcggtaaacagcctgctggtagtactcgtaggccttgttgtaacgttgttcagacatgaatactcttcccagaagataccaagtctgagaatcgcctcggtctaatcacgtgccagaggaatcaaacatcgggttgttagccatactactcatgattttgatccagttggatgaggaaaagatgatggacttaccggcattaagacttctttcaagatacgagattgctaattcttggttagcaaaactggcctctctctggtggtaaagccaaccgagttgttgaagaaccttcgagtggtcgggattctctgcaagcacacgttcgtacgcttctttcgccaatccatactacaaaaagggaaggggagggagccgaaggagatcagttcacaggaacacccatatcaggtgatgatgaaggatgggaagagaaacaagaacgaggttttacctctttttgctgctcatgaacgtgaccaagctgaaaccagatgtctatctctgtgagcggtttcggaggcgatttaagaatgtatcgaaaacactgtgtgtggatgtggagagccgacgcgttccttttagtttcaatcactttgtagacatcttaatgaacgcgtaaacagatatactcacgtcgagagaagcactgaatttattttgctgtttgtagatgatgcccaacctaaaatatatttcattggctttctcgaagtctagacgaaaggtgatagcgttagccggacgaatgatggtgggagccacgaaaggaaaagaaaaaaagactgactctgttccattctcaatacactactgaaagcctcctctgcatgctccagacttccgtatcgatcatacagaataccaatcccgtaccaaagtttgggttcctacacgttgttaaggaaaaaactcgacatcagaagagagtttggtgatgtcggccgttgccgtcaatgtgattctgtaaaaaaaaaactcaccttgggattcggaagatgatacaacgcctgttggtaagcggtgtacgctttttgaaggtcatccatcatcagatagcaatggcctagatgattgtgagtccgttagcacaggatgttagtttggtatgatgagacgctactttggatggaagaaaaggaaacgcgacggacctagggctccccagatttcaccattatcttgcgagatgttcagcactctctggaagaactcgatagcctgtaagagattggtgaagaacgatgaagaaattgacatgtcagcatgagcttcagggggaaaagaagacgaatggaggacaatgatgacgatgacgatgacggaccttgacaaaatcgtccttggctcgagcgatcccagcgacttgagtaagagcactgatgctcatcggattatgtctgagggcatgttcgtaggctgcgagggcgcgatccaggtcggagagttgctcggcgaccgctcctgcgaagaacaaggacatatgaacacagcatgacaaaaagagcggatcagacatgactaaatgaaggagagatgacgattaaatgggaagctgcattgcaagagggacgtttgcgtgttctcctctcagaagcaacatccgtccattggataacctctcatgcaatctgtctgaagaacgggaaggaaggcaaagtatattaggacgtacccatgaggagccaggtggattcgttggccaacgcaagagcggggataggtgtaagcacgataggctgtgatgattgatggccaggaataggtggctgttgtgaaggctgctgttgctgctgggaatgagaaggaaggatccaaccgggtgcgccaccgttcatgttggtgctcactacactgtttccaatcgccatgagattggaattgggagacgaaaggagaaagggtggattaaggttcgctcgagcacgagaggtttcctagttgaacgccgaccaggagaatggctttttttttctttgtgacaaagacagatggaacggaggatgggagggttggatgggtgatctgacctgatcgattatgactgtgactgagaacggatgatgggaagaggacgatagatggtggcgtcagtggatccagacgacgagacagatgtatcagccaaagacataggccaggatggggattgcaggaacagaatcgacagtgtgcacggagacaattagaattggccgaccggctggtagatgaaggaaccaggtacgtaaaaaggagagaaagaaggaggacgaaaaagaggaaaggaaggaaccaaaagaaatagaccggccaagaagaaaaataagagaacggatggacgaacgggtatgtgtgtgagattgaacgagcagaaacgatctgatgtctgatcgaacgaacggacagataaacagatggatggatggatggatgggaatgtgaacagacggagaaggcaaaagagagagaaagaaaagtaggaacaaggggaacaagaatggatggagagagaaaagagagagagaagaagaggaaaaagatctggccgggagaagaattaataataaaaatccgccagcaaagaggaaaaggagagaagcggaagggaaagggcaaagagaaagagaaagaaaggcgagaagggaagtataattacctgggcaagaaaaaagagtaaagaagagagaacccaaagatcagcgccggagaggaagaagaccgcatgaagagcacagggcacccagtcagaggccggtggcagagagatcgggacagaatccgcccagggcagagacggatgatcgggatttccccggctttttttccattcttcaacgcacctgcatcagatggcgaatgaacaagaggacgaacgaggcgtgcgttcgtgggctcgctcacaacgcggcaagcaacaaacattcgcccccacgcgtggttccaaaaacgtagcagatggcggcgggccgaccagcgggagagtttcctctaaaagatctgatcgatgatcatctctacggacacaggcacaggcataaacatagatacagatacgcaaacacagggcacgccgatggtcgagtacgaaaacaaggcaaggtctgacgtaatttcggctcacgcgatccgccgttcgtctctctctctcaccaccccagaaaatatcacatgaaccccgcctcccccgggaagggcgtggaaggtaaaaacgcggatgattgcgctcgcagaaataaaacaaaagaataaattataaacgatcgcaaagtccgagaaaggaaaaagaaaaggagagaaaaaatatgctagccggcgattccgctcaaaatcaaaagagctttcttctttgttaaactttttttttctttctcggtttttcgcccttctctcatcccgtggttgtctcgcttgctttgttttcgtatcttctctagcttctttccttcgttgcactctctccttcttttcctccttgttacacccggataccaagtccgaaactatgtgtgtttttctctcttgcttttggcttgatttgttgacatctttcgccgcctacttcgttcatcgctcgctttgatttttttatctttctatcggtgtacgtaacgcatttaccatttatcttgtttttgtaaccaccggcattcgtccatttgcaaccgtgtccatggatgtaaccgagtatgaacacgtgctccaccaacagggttgttccagccggtcggtctcctgatttttagtcttcaactgatctcaagctgtgtgtattccgggtttcagtaaccacccccagtttgttcacacacgaaactcaagaatcaacaaagcaaagcaaatcgagacgacagaaaataactcacaaagctaaaagcgcacagcttggggtcctgaacgtgtaatccttgtgggttccacgttgactcgttcgctctcctcaatacgacttctagcccttcaagtttctgttttggtaaaagaaattgaagaaattttgagttttcgagattagagatagattgagacacacaaactaatcaaagcgcacgcatgtaccttttcgaaatgactctttttgaataagagcgagagatgcattgtcgctaccatcaacatattatcccacaccgcgtgacggaacgagttggcctctaatagtactgtattgacggaatttattaaatccagaaattcgttctgggtgatctgaagggtttggaaaggaggagaaaacaagacaagaacacaagaggctctagtcagataagaacaagggcgatagcaaaaagatcgaccaactcttccttcgagttctgagggatagtccggtaaaaaccttggccgccgaacaaaaagacggaataaacaatatgtcaggtaccactcaacgaaagagtattcagaaatacagtgggagtaatccaatatgtactgggcaatgtctcctgtggtccaatctctctgtattctgatgacagcctgtggatgttcgactctttcctcgcgaccctggagaggtccggctcgaactggtgggctgtgatgacccattttcaaatgacaatctgtccttgcatcagtctcttttctctttctcaattttggaagaaggaagaaggggaatagagaggaaaagatcagaagtaaatgaaaacaaacacaaaagatcgaaataccgaatgatcatcgcgagatccagtcggtccaaccgtcccatccggtacatccatctccaacccatccgccattaccagatcttcatcttcctcttcctcttcctcctcctctccaccatcatgactactcggacgtccagtcgaaggaagcggccgttgggcgagaaattcttggatattcataatccggtgttcggctcgtgaatcccgttccgcatgagtcttcactggaagattgtcttgaggagagaagacgatgtccgagcgaaacaaatgaaagggaatttgggcgggcaggggaccggggtgactaactgtctcatcatctttcagatcttctccttttgactctcatcgtcaaacccattcgctaccttcttgcgtcggtgtttttctttcgtttttccttttatcaacatagctcttcgccatgccccatctgtcttgttttgttctcaggaaaatctttcataacgtcttccgacactccgttcatcttaccatgttcgccaatacaaaaattggtgtaaaacatctttctctctcctccctgttaaaggcgcgaaagaacgcatatatacatacaaacatacatacaaatattgagacaaaacaccaacggtgatcaacggtgaccaacggaacataaaaacagggcacgatgatagcatagaggggaaaaaatagaattaaagctcggaatgatagttcttgccgatctgatcaacggttgacaatgtaaacatgaggtcgaatcagatacgatcgtccacatttgtaagcggatagacgagatgaacgaaactgaccgtctctctgatatcctcaacgtacgcaccaggattgtcgacagcggcaaaatgacctcctcgagcatgtactttgtagttgacaagtttgcacgaagacgccacccacgatcgagggtattgactacgacgatcaatcagaatgatgaaccccaaagaaaagactctctcccgtcagtatccgaaagttctggtcgtcatcgatattctctcggtcaaggtactaacgtgatttcagctgggaagatagaaaggcctataggccttttcttgccgactgcaacagccattggagatagagtgtactctttataaggtctaaatcgagatacaaaattagaagtccatgggttaagtcttcaactggtttccttaacgaatattatgcaaaaacatgagataaggcttacaagaaagaggtgtggatcgaaccggtcagaaagtagagggcagtaacggtgacgatatggtttggagtgacttgagagggggcacttggagctctaggctagattcgcatgttttgattgatgtaagttgttctccaagatacaatcccaccatgcagaattgaaagagaattgatgataacaaaactgcgctgacgtacatccgaccagccatgatatttctcgccaatccaagaaaggattccgaccggactatcgaatagcgcagcccccagtgtcatcggctttgagccttgaattttttgatatcccaatccttctttccagaatttatcggtccgctctagtccgttgatttctgcctcagtataaaccaaagactgaagccatcgggcgactcccttgggaacgaacggtatctttcctagaaggattgggagagaatagattggattcaagatagggaccgaagccttgatcattgtaaagtgcgcaacgacagcgaactcagagtagtcgtgcagaatttgagctgtaatccagctcccctttagaaaccagcacagaagtacaagcctgttgaatattccgagcagaggatacggatataaagaaccagacagaatcacatacccaatccccagctccgcaggtatatgtttctattaagattggacccgactgattagctcctatgcatttcacaagcacgattttcacttactgtagccaagaacgttgaccatcaacgaattatacactcgcgcggtgtcgaccacggtccatcctttccgttgcggaccagaggagaatgtgtaacccggcatggaaggaatgaccacgtggaacctgatgaaaaggtgattgggatttgtacgcagcaccaagaagatcagccgcgacagatctatcgtagctcttcagagcatgagctaagattaaaaagagaaaacttcgtacgcaggctgtccagcctttgtagggtcaacgagctcatcaataacctcccaaaactccaaaaacgatgaaggccatccatgagacaggattaatgggattgcatccggttgtttggatttgatgtgcacaaaatgaagcgaaatttcttcgatatcgacccgaaagtgaggatatcttataccggtcgttattgggagttgataagtagaattgttgttatcatcatcatcgtcttcgtctgaccagttgtggtgtaaaagaacgtattccagacccacttgttaattcttttttcggtctcttcccagctccactcgttggcccagtacttatgtagctcagtgagccagtcgagatcaataccatagtcccaggacgcgcctggcacgatcggtgctgttggcagcctggtgtccctgattttagccatcattcggtcaacatcctgctgagcaaaagatacctgaaagggggtaggaatgttcgcagacgtcatgtcgggtcgtagctatgaaggtagatgttgatcgtcagcgcaagaaagctatgatcagtcatcaacgtctttgtgcttttaaacgcgttgatggacatcacatggggcgaaggacatcgacgtcactgctcggtgtggttacgggagcttaccttagcaactgtaaccctagtcacaagttgagttattggcaaggtctccctctttagtttgatctctctttcaatctcgtctaagacctctactccctctctaactctctctcacgaccctcatctagtcttcttacacttcgctcctgtccttattttccttccatcatggacgtggatccaccacttcctgatcaaacgcaaatcgctcaagagcctgctcttcaatcaacaatagaagagccttccgagttggaaatcctgaaggcggaacaactacggaaagaagtcgaacaagaacaagccgtcagtgatgctctagccgaggtcgccgaattaaaagcaaagcttgaggctgagaagaagaagggaggagaggtcctagctgataaacaaggactcggttagtatcagcgtttctttcttgccatatgacacaaagagaacgtgcgatgcttcttcctttagttgaatgatcaaagcagaaaagtgttgatatgaaggttgagaggacatcgtggcaactattgttgaaggcgatactttctagtactgccctgtggccacaagctgattgtttctttcattgaacgacgctggtttcatggtttgtagaacaatctcttcaacatctccagcaatctcactcttcccttcaacaaagcctatcgtctgaaacgtctaaagctacgcaaattcaaaccgaactttctaatgctcaaaatcaaaataaatctcttctatccacgatcgaatcgctgcaagtcgagagagataccatcaagactgaggttctcgccgctcggcaaaaggtgacagggtgggaacgacgtgttggagaagtagagggtgaattggaggtcagaaggattgaaggacggaaccataaggttagtctcatcttttctctctgtgtccttgtacatcctacccttatatatgttaaacatcaacggaacttcaaaaaaaataaaatcatgcgcaatatagttcaaaatcgaggctctagagctcaacgtcgagttggccaacaaggacaatatgtcattgtctgattcgttgactcgcctaacatcagaatttgccaagtatcgatcaacatctgtacgtatactttttctcctagttatgcgtagctcatcagaaactgaagtctcctccatgaatctcagcacgctcaaaatcaaaaccaggctctggagatccaatctctccagcaatcactatctaccgctcaaatctcactcaagcaaattgagaactcctctgctgctctccaaacccgattaaccacttctctatccatcaactctcaactccgaactactgtggccgagatcaagtcaaactttaaacaggagatcaccgctcaaaccagaatgttggaaagtgctgagcgccgatcagatgaaggtcgtcgtagattggaagaagtcgagcgagaatgggaagaagatcttgagagaaggtcagaaacggagaaaagggtcgagaaggagaaagaactgtgggctgctcagcggctggagttagaaagcaaagtgtccgaacttcgtgatacaatcgagcgacttgtcgaggcatccggaggcaaggatgatggagacaggaccggagggttatcaggagcatctcttgatggagatggagccatgggaatgatgtcacccacagcctcgctagctaattctttgatgagaaagaagggacagagtgtgaccgacttgtatgtggaaaatgttcgggttaaaaataacctggtcaagcaggaggccgaaacaagaagactggaggattgcttgcaggaggtcttgagagacattcaagaacgagtgagtgaccctaattcaacgttttgtctagtcaagctatattgaagagtccagccaagatcgcctaatacctctccacctgtcacttcgacaaattcaggcccctcttctgaaagagcaacgccaagaataccatcgactagtcaagaccgcaaacgaactcgccagccagttatccgttgtgacttccgagagggattctcaaacacaagttattcttgacctgacttccaaagccaagcagatgtcgtctagcatcaccgatctcgaatcgcacatttcagatctctcccgtcaaatcatcgcactctctcgagaaatcgccgtccgagacgatcctgctatggtcaactggcaggatttcccggtcgaaactgagagtggcgaggaaggagacgacatggagagtatcatctcccgtaacttgattatcttccgttccatccccgaacttcaagcgcaaaaccaaaaacttatcaagatcgttcgcgagttgggtaaaaagatggaggccgccgaggctgctgctgcgtcgtcatcggcatctttcgtcgaggatggactagcagagggttcaaagatagacgtcgatactcttcaagcgattgaagaagccaacttgttgatccaatcgctccaacaaaaacttctcgaaaaggacgtccagatggaaaagttcatccgagagagagatcttttctcgaggatgctttcccaagctggtgtcagcttaccttctggatcagcgctcgatgaagctgttgccggtggagctggaggggcaggaggtctgttggatgtcgtcaaggccaatttggagagctacagaaaggagctcggtttggatgctgatcggctgagggaggaactggcaacagccagaaaagaacttggaactattagtggaagtctggccaggttggaggccgaacgagactttttgagtggtgagcgtatcttcatataggtattaaaatcagttacttcctcgagatgttcaaccatatcatgcatgttataatgccttgtttatcctatgacagagcgaatcgtaggtctggacgagtccaatcgccttcagagggtacagtttgagggtatgtcatctcagaaccaaaccctcaagacagaactcgctcgggtcaacatggaactccgatcggtatgcaattttttccccctctatttgatgatggtgcttgcctctatatggagattcttgttcttcactaactcaaggggaaacatctgtcttggcttctcttctaaatcgtaataataggctgaggataagaggatacaagccgagggagttgccgaacgaggtaggacggatgctgctaaccttcgagctgagaaggaactatggaaggttcgtgtctttgtctgaatgaaaatcaatcctttgttgatctcgttctaatctgcttcgtgaacgtaccttgttctctctttctcgccacggagtagacgattgagagtcgactccaagcggatcttgccaatttggctagagagagagcatcccttcagtcacttactcaaaaccttcagtcagtggaagccgagtcggctaaggtgctttctgaggccaaggctcggtctgcagctgctatcactgctctagagacagaaaggttcgtatattcttgtgtttttccttcgtttcttcagaaccgtcgtttttggcctaatttattgtcgttgaaatgttctcaaccaggtcgaaactacgaacggagatctcaaaactcaaagaggagaaagtgacagagttgtcgtccctcacttcagagagggactcactcaagactgctatcgagacgttaacagccgagctcgaggccgccaaagtgagacatcgttctctcctttgtagatatcggtaaattcgcactaacacgtataatggacttttttttcctcgatcaaattgaagaatgcgacagcttccgagaacgagagtcgtgagaccactctccgaaaagcatttgatgaagagaaggaaaaatacgtagtgttcgaacgaaaacgaagcgaaaggatcttccgtgataatgtaagtctctttcaattgtattctaacttcatcagtattcctcatgagactgactagtgtattgcaacaaaaattatagaaagcattgttaaaagatcggaaagaatttgaccaaagcaaggcgacgtacgaagctgagattgcccagctcaagacgcagttatctgaggttgaacaaaagctttccaccgctacatctgctgctcctcagccggcttcggaagaattgattgctgccgccgtagcggctaaggaggctgagcttcagacagcccattcagaagctctggaggcaaaagagaaagagattcaatcagctaaagaagctgctgccgctgctagtgcttctcaaccctcggctgtgttgtctgaagccgacgagaagtttgtgagtatcccttctttcgtttgtctcacaaaatgaccgcctgattgactcaaagaatggacattggtcatcacagacggctctcacctcggagcgagacgctttggtggctcagctggcatctgaaaagaaagcttacgaagaagaaaaggcgcaaatcattcaagccgaaagaaaacgagttcagaacgtgcataccgataacgtttgtcctattctcttcttttggataggctgtgagacgttcttcggaattatgagctgattcgctttatttctcggtctaggtcaacttccgaagacgtctggccgaaaatgcgacgaaggagaaaacgctgactgataagatcaccgagctcgaggccaaattatctgaagccgagaaagctgtggagtcagctccccaaccttccgctggcggtgagtcctccaccggtgaggtaacgacggcaatcggtcctccttcggagaaggtcatcaaatcagctgtagacactgctgtgtcggttaaggaggccgaacttcaagctgctcacgctgaggcacttgctgctcgagaaagggaacttaaggccgagtcagaaagaaaggtggctgaggctgtcaaggccgctcaagaagctgccgctgccgctgccactccggcttcaacggcggctgagaccgaagcggcaatcaagacggcggtttctgctcgagaagccgagctgactgctgctcatgaggaagccttgaagactatctctgcttccacttccggccctgaatccgctgtgtcatcagcggacgtacagactaagatcgacgaggcggtcgccgccgctttggctcgagcggcagatgagcaagttatgaagaccaaccttcagaagacgactatccaacgtgaacgaaagaacaggatcaaggcagagacagagctgaatacactccgatcagaactcgaggctcttcggacttccactggaacggttgcagtcgattcttcagaagctacggctactcctagtgcaactccaacagcaacggctgctagtccggcatcgaaacctgggctgactcggccgtcgaaaccccgggtgagctcaggttcttcatcgacaactacggctgtcgagagtgggccggctggtagaacacgggcggcggctgcgacggggggtgcggctttaggctctgcaactgcgtctggagcaagtgctgccactgaggcggctgtggcatcaccggcgattaaaggcgcggccggcggaccatccatcagaggtgcagccgctgctggacgaggtggggcctcaaccaggggtgctagaggtggacgggcgccgacgacattattcgcaggtgcactgggtaaagcccaggcaagtggaacgggcacaaaacgagctcgaccggaagatgatgcggcggcaactggttctgggctggggaacaccctattcgaccggttgaatgagtcacaatcggccggcagccctgctgcaggcaccggcgcaagtggctccggaccgaagcctcgccagcagttgatcaagcgaaccaagccgaacaatcctggcgcgcctggaggagcgggagcgggaggagcagcaggtgatgcatcgggtggacagaatcagtagtgtgtgtgtatgtgtgtagtgtagttgggttgtcccatgtgcttcttcttatcatcatcatttctttaaaatctctacattgaatgtttaccggaacgggctttgatgatactacggaccacgttgtgtaaccagttcgattgagattacgattagatagccgatccgtcgatcagatctcgatctagagcgacatctggctcgatcggtccttgccgaaaatcagggcaccgatcagggcagaggaacgccgaggccgaacgagacagacacaccatcatcatcagccatgtcttttttgtgatcgtttttacatactacccgtcgattctaaccttctttcttcttctcttgccatctttgcattctctatctcgtgtaacatcgatccgattcttgccacctactttctccatatgttcatcttggtcttgctcacaggtgctttaggcctggctgctttctcatgggcatccatagcgttcttcagtctttacctcgctccgaggcgatcttcactgtataaccttcagggtaagaattgagctctggaatcatgcttgtgtaaatcctataatctcattcatcctattcctcttcttcatcctctcttcaggcccgaatcataccaactactttacaggcaattttttagacatcctctcgtgagttttcatcattggctcagtcgtccaatcttaacgatcatcgctaacgacctttcggacgcgttcttctttctatgtgaaatctgatctttggtttgttacgagagcacagagctcgtacaggtgaagagcatgcgaagtacagagaaaaatacggaagcaccctccggtttgctgggatcgctggagcacccgtcttgaactcgaccgatccgaaagtcttcaaccagtttgtccatccgaaccctcatcctcctctgctgatcaattcaactgtagttaacgcactttgaatggacagtgtgatgaaagaagcctacgactatccgaaacctggtatggccgctcgagtgctcagaattgctaccggagatggtgttgttacggcggaaggtgcttttcaagttctcttatatcacatctaatccactcggcgcgattgaactcaacatttctgacgagcctgtcaccttgttttcacttcatggtctcggtgcatcttgtctcatctcataggtgaagctcataagcgacatcgaaggatcatgatcccctctctgtccgctcaggccgttaagtcgatggtcccaattttcttagaaaaaggtatggaacttgtcgacaagatgatggaggatgcggctgagaaggatatggccgtgggagagtcggccggtgaaaagaaggcaaccagactcgagaccgaaggagtcgatgtaaaggattgggtcgtgagtacccgcctattccttcaccttgatggacgaagcatatcaaggaaaggttcattgactgacaaacactatcttaccagggtcgagctactctggacgtcatggctcttgcaggtcagtctactctctcttataaatgctccacatatgtatgcatgtactgacatgctcttcctatattcgatacgacgtcatatgtccaggatttgactataagagcgactcgctccagaacaagaccaatgagctctatgtcgcttttgtcggacttaccgatgggtttgctcctaccttggactcgttcaaggctatcatgtgggattttgtaccttacttccgaactatggtatgtctgccattctttgatatccaaagattatggataggttacttgctaaaatttcacctatcgtgaacagaaacggagacatgagatacctttgactcaaggattagcagtttcccgacgagttgggatcgtaagtgccagatcaagcctctctgaatattcttggtcatcatcttaacctcctaggctcattcatccatggtgcgcaataggagcttatggagcaaaagaagcaggccgtgcttggctcagcttccgatcaggctgttgataaaaaggatgttcaaggtcgggatatcctaagtctcctaggttagtaacgtttttaaacgtatatacagagcggcgacattctttccctgacaactgtcaacatgctcgttactagtgagagcaaacatcgccgccaacctgcctgaatctcaaaagctgtccgatgaggaggtactcgctcagatcagtaacctgttatttgctggatatgagtgtgtatcctttcccctctctatccttagctgattaaaagcactaatagaggtctttatgtttcctgtttgatcagaacttcttcgacagtcttgacatggatgtttcaccgactctcagaagacaaagccgttcaggataaacttcgagaagaaatttgtcagatcgacacggatatgcctacgctgtgaggatgtttttgatgctaaattacttcttcttgcaaatgactaaaacggccttccattcttgatccattttagagacgaacttaatgcgttgccttatctcgaagcggttggttctcgattcttggtcttgtcttccaaatacaatacggattattgctcatctgatttgcgtctacgggctgtggaatttaactagtttgttaaggagtctcttcgtctagaccctcctagtccgtatgctaaccgtgaatgcttaaaggatgaagacgtatgttggcttcatcacgcataattttcatttcatattcctttgtacatacgcatacaggctgaccgagctcaaattccggcttcctcttctgtgcttctttttctggcctttcttatcttcattcttcaaccaaaatttgtcacagttcatcccacttgccgagcctgtcattggtcgagatgggtcggtcatcaacgaggtccggatcacgaaaggaacgatggtcatgcttcgtaagttttcctttatttcatctcgtccatgaaatagtttctgatagacgcggaccaattcagcgttgttcaacatcaatcgttcaaagttcatttatggagaagatgcagaagaattcaggtacaattcgttttcttttaaaagccaatcggtttcgtatcgtaattgaccgggctctcttttaatttctcgaaagaccggagaggtggcttgaggacgtaacagactcgctcaacagtattgaagcaccctatggacaccaggcgagctgtatgttttattgattttatctttgtgaattttgcaaaacgttgaacttcgcgcttcccttgttgttgaaatcccagttatctctggacccagagcttgcttgtaagtttcttctcatctggcgccttagcagtatccgatcagccatctagttctttgtacgattgtttctgactctctcgactttcgcagtggttggcgatttgctgtcgccgagatgaaggccttcttgtttgtcactctccgtcgggtccagttcgagcccatcatctctcatccagagtacgagcacatcaccttgatcatttcccgtcctcgaatcgttggtagagagaaggaggggtaccagatgcgtttgcaggtcaagccggtcgaatgagttgattcttcatatgttaagagaagttctatatctgagaatgtgtgactaggacaatgccttctttgtatcgatttgtttctcatacccgggcaggcgctatgacttctacgtcgtctatcgtcgctctggactctcttcttaccctatatattattccatccgtctgtatatttgtctatcacgacgtctgtgtcgtcaactcaatattcagcctcttcatgcttctgtgtctccatagatgtgatcttcatgtttgtcgactgcagaggatcgagatcatcaaaaaagcaagtgatcgggcctgaccgaagtttctccacaatccggggaactccatccagacaactttatcttcctttctctctcaccatgtcgatctaatcgacctcactttcctctctaagaaagaagatattagaccttctcaaagaataaacacggatgtcggacactcctgttcggatacttgtcctccacttgttcttactccttcacctctcaatattcatcttaggtcttggtactatcacttggataggagtcgtgtggagcagagatcaggatgagagaggaggtagaccagagcacactactttgcttctatgcagcctgagtgtggggctcgtaggaatctcgttagtccttttcttgattccttcccttgtttcgtatcagaaactgtctctacggaaaatattcgtctggattgaaaagagatgcgatgccaagatgtatacttttttgaggcctactaactcaccatcatttcctgaactttcttcgctcttccttttggtgattgttacatgtcggggcgactaaactccgacagccggttgatagatatctttcgactctcagaatggttgacacttgtgaagatcagagcagaatttgtcatgaccggcttgatgacaatctcttggatcggttcgtctaattttcgatatgtgatgttttcatatcgttgtctggtatataacgagagataaggtaaccgttgcctaacaacttctttgcgactaacgatgaacagcaacaaacggagcgcttaccttgtcatcactttctcaacgacctccttcgccttacctatcctcaccaccttcatccccaccttcacctccactaacgaacaccgaccgattccctaagacgattctctttctctccatcgcttttcaaaccttgttcttcctctcttcgacatgtttgctggcttcaggtctttcggcgcttcatcaggctactcttaaagggctcgatgtcgaatgggttatgtgggactttgacgttgagcgtgcggcaagcgccagagatgttcgttcgctggatgaagagacaggactcttagataatgttgatagggttctaagaggatcgtcgatgagaggtcgcgaagagacatatggagcattaggaactggtcaggatcaatctcacgaaggactactggatggaagagtagaggatgaggtaaagaagtttgggctggaagagcaggatgagaatgggaggaggagagttcgctgggtctggggcttgaccgggttgagtggtggtgtgttgatcggaagctctggttgggccgtcttgggctgggaaggtttcggtcggtcctcaaactgttcttcttcttcttggttattcttctctttctggttttgttgctgatacctttgtcttttgtctattcgtaattaaatgcaatagataaagcagatatatctctctgggttctaagttcgatcacctttttcctctgcttatcgactttgttcctaccctcattctatatctttaaaccgagtttcctccgcccatcgactctccgtactcttctcatcttacacatcattctttatccccttcccacggcattcttcactttacctctttcttcttcctcgtcatcatcgccttcgtccgagcaaggtgatccggacggaccccaatcggaattctcgaagccgatccttccgtcacccgaacaggtccaggcagccgtgagtgctctaccgggatttacgatcgcttgcgcttgggcagttgtcggtctttgcctatggtggcttgttcaagagaccttgctgccccctccgtcggcgtcttcatcacggaacgagggatatgatgatgggggagatgaggagggagacgacacgggtggaggacggagaagacgaaaccaaacccggtatcaaaaccgtcaaacttattacaggtcgggccggtccgacacacacactcaatcacatggacgaacgctctatgacccattggtgacgaccccaccatcgacgtcgccatcaccatcgccattaccgtcaaagtcgacgtcgagtgtatcacccctgaagaagatgacgacaaagacgtctggtggagaaggttggagagcgttcgctttcgagttagaacatgatggtgacgatgatgatgatcatgatgatgataacgacgatgacggagaagagtccttgacctcgttcacgagcgtttagagggttggagtatgaggagacaggacagactacgaccttttctctcagcttgcagtggggttcttcttctttctctttttacgtctttctcagcttggtcttcgttttctttttctttttcttatcttttttttttcttttcttttcgggctattctcgcagaatgttcttgtaattcaacacccagacctcctcccaccctctcttttttccttccttattcactcattttgaatttcttcctctcttctcttatctttttttttttaaatagtattccaccgtccagtccttgatatgatgtataacgtagtacagcgcagcgcagtgtagtctctagtccataatccgtatcatatgttgtgtagtatgtagtgaagtgtgtagtataggaaaacgcagtgtagaaagatgtacacagcgtacgaccgaagaacctcgttgcgctccagaaaatctgcttatcactttgtgatcatcttatcataaccttccatcgaattgtctgttcgttttggtttgtttcgtttcgtttctgactgtgtgatgcggcggaaggtccgcatagatcggaacggtatggacaaaacaagagatcaagcaaacggacggacggacgaatggagcaggagaatgagaagaaaaaaattaagaagaacggtgggaaagagagatttgggcatgattggactttcgtgattcgagagaattaggaggcattcaaacaaaacgaagggtgaaagacaaacaaacgaatgagcgaacaaagaggaaagaagaagggtggtgaagggggggggaaggaaagcaggcaagcagaaccaagtagggcagaaaaaaaggtaggtacgttgatcgaatgtttggagaataaacgagaggttgatctacatcttgacttcgtggataaagatgtcgtcctaatatttttttttcagggggattcagagaaaaaaccgagacgaagagaaaaggcgttcagtcgatttgaaaacaagcgcgtccaaggtcaagggggtttgaccggatggaacgaaacgaaacgaaaaagaaactcacgacgttcgtccaagggacattatcccttcctgcccgacttcgctctgaccagtactcgagctcgcccaattcggtccgtttgggtgcccagaccctctcgttggtgtccgggtcggtctgtgaagagaaccaacggggctgatgagggggcagttcgccggtctctcgtttctgtctcgtcgaccgttgtttcgcttcctgctgctgcttcccgaggttcgcttcgtcatactttgggtgcagcgatgaggaaagagtgtcgagggcgaaaagagaagaaagatcgtcagcacgggcatgtttgcgagggaactcaagtacaggatcatctcgaggtgcttaccttggcaagctcgaaggcccgttgatcggggcgtagacggcaatcggtaggagcgagccatctctccaggccggaaggaatatcattctgcggttaatgaaacaaaggacgaaatagaacccaaacaaacgaaatcagccctgaagtgaactctgggtgggagacgaatcattctcaagcccgagaggataagaaccggacgaaccactgcaacacacagtcataatattcatggaacaacagaatcagcacagacgcacacctcatctacaacatagacaaaaaaaaccctctttggaaacgcccttacaagtgacagcaaaaggcgaaagattgaacggagcagccggcttaacggtgttcttccagagctaaacggtcgcgcaagaaaagaaaaataaattaacaggagacgcaacgagaacaaaaaaaaaagccagacgaaacgtacaagtaggtattctttgggcatgtttgacgagagcacgcttgcgttcgctggcagcttctcatctggcaagagagagccatgtccggctccatgctttcgggctacgagctgagagttccatcctggaaaataagaaagcaaaaggaaaaggggggggggggacggggaaaatatatcaccaagtcaatgatgaacttggagaaaaagatcggctgattcaagacaagcaaagagaaagagagaagaaaagaaaaacgaacgaccggcaatttcccagtgagtctggccgcgcgcgtccttgacgacacctttgatctcacaagaatccctggccttccaacctctaggcttgaacgtcaggacacagacctcgccggttcgcttattggtgacctccatatcaccgaaatggtcgatgatcggggagcccatgataaagtttgagacgctggtagtgactttccgccagctgtagtgctcgagcaccatgggcttcgcgtccgagctcatgaacttgtcttctggataaccgggcgctttggcccacccggcgggtatgcaaagctcggcgtgggcgattcccgtcggcctgatctcgaacgaccgaccgaggaacttgtttttcgcgtcgacctcgccgtagtatctccagtggggggagtcagagtaacaggccgagatcgggggatggtgggagacttgttcggaaatgtatctgtactttttgtccggtcggcagtactcgaacgtctcgcctagcatcgggttgaacggcttggcgattcggccctcggtggacgagtaattactcatcgcgaatgctgccacgtacgccagtcgtttcaaagagtccgcctcggcggcggcagcgtcaactgtgtgtgtgtgttcgttgggaaggagaaagtcccccgaggcatacaagtcgtgagaaggaggacaaccaagacaaacaccggacagagagcagaaatcacttacgacactctgaatactccatatcctctgccattcgctccaacatcgaagttggctcgttgctgtagcgaaagacggatcacatcagccatggctctcactattcctaccactatcaccactgctatcgagataaagatcgggaggttgtcgacttacaaaaagacgggaaacctgcgaatggacgacagattttttaaaaaaaataaaaaaagacaccccgagtcagtcagtcagtcattcgttcatacagtcagctcccggccagacacacacacacacacacacacacagaagatttgactgacgagatctttgtgaggtcctttccgatactcgacttgaggatcgcccagagtgagatcggcggtctctcgtcactggagatcggcagccggctcctcaaccggttgtacggctcgtactcacccccgtccaacgagatcttgtctctgaggagttctttcgtctgcgttgcttcttccaatcggtcttccaactggggctgggcctgggccgagggttgggtctgaacttgagcgatcgaagacgggatctggagggggagggttccttgttcgattgcgtcgtaaaactcatcctcatcctcgtcctcgtccccatcgtccttggtgtcgtcctgggcaccgatgccatgctgaacggtgaccaggccggttccaaagtctgatacagatacctccggaaggtcgatcttgacgtctggggagctcgggagcgcgaccggagctccagcggtggtggatgtagccggaggtccggaggttggcccttgggcagaagagctcggtgtggtcaggtagttgtctccttggggtcccagtgggatcccgggtgacattaatctagcagctcgtagctctttttgtcttttggtgtgtttgttaaggattaattagagggagaatgggtgcgagaacagaaggggctttgagatgagcaaaggaacaacgaaagaaaaaaaagaaagaaaaaaagaaaaaagacaaaacgtactgcttccggttatgcctaccggcttcggccaactccctctccatctctgcctgctgtcgggcgacgtcctgcatgctttcctcccagagcctctttgcgtctacctctgcctggtatctggccatgagccatcgttctctgacggcgctcatggactggtactcgaccaccaggtcctggagcagcctgagggattgcctgatggaatccttgacggtctgctgcctcgagttgacggagggtgtacggttcaagtgggcgggaccgttgccggggatggcgaccggggcggtgggcgagccggggaagctatagacagacgaactggaggaagagttgacgatgagggaatccaacagttggtcggtgacctcgatgtgcgctctggtggaactggcgaggagctcgaacttgtcctggtacgggattccggggcagtgcagatgggtggacagcttggtggggtctcgcctgaagctgaccgagtctgaaggatcggcctcgtaatcgtcgtcgatcgtgtttgcgtcgtcgtcgtaggagggcgcgatcgagggcgctctgggggtggtcgatcgctggaaggacgtccgggaaggggcaggcatttggaggctgccggacgtgagtgggacgggcgagggttccccagtagtgagcgcgtgtagagaggactgggtgttttgccgacggatggtggtagaaggccgtttagtggatgtggccgactgattgtctagggtgcctccgggtttatagaaatcaatgtgctgtctgaaggcctggggttgagatgaagagaaaggcagagggggttgatggtgaggtcagctctagggttttatatatattttattttattttcctttttctttccccactgtgagagaaagaaagagcgcatagaaaaaggacgaacctgagaccagttggccgcttcctggggatgactcgcacggagggaaaactttgggaacctggcatcatgtccggcactttgaatgtcaaacccggtggaggacgttggctttagctgggcgaacttgagcgagaccgagcctcggcaggccctgttttcttcctcttggttccggtagtctgtgaggcgggagaggggttgatgttagtgtcttggagtttgtatcggagagtgagggagtgggggtaagagaggggatacttgcaagagaggattccgtgctcgatgacgaaccatcgggatttgtaccctctggccacgtttgtccatttcatctggggcggtgtgagaagtggaaacaagttaggctgatcaggacagagaggagagagagagagagaggaaagaaaagaaggagaaggagaagaaggaagaaaaagaaaccaaccaggtaacctctttgggtgatcggtttcccatccggtcggctctggagcaatgctttctggttattggaggctgaacggggagggcaagaaaacaccagaggtggtgagacggaaagcgagtgggagtatggggggtggcgagtgagacggtgagagagcgatggacgtaccttgcttgagaagattgttaatgtcgtcgttgccggcgcttccgtcgtaggcgctcttgcctttgcggtctttgacaaacacgtcggcgccccggtcgagggcgagaaacttgacgagggcggtgtcctttcggcggacggcctcgtgaaggagggacacgcctttgtctctgtcgagcgcgttgaggtcgaggatggcggctctgggggatttgaggagttcgagtaacgaaccggacgggccgggcccgtgttggggggcgttgatgtattgggacagaagggcgaggtactggttctggagggctgtccgggagtctgtgtgtgtgtgtgtgtgagagagagcagcggtgcaagtatagtgagtgagggagggaggagcaatcttggaggcgagatggagggaaagaaagagagagagagagagtaatcttaccgagaatgacctggacgacctcttcggtcgaggcgacgtccatgcaggttctgtcttggtcgtctttgatggtgtcatctatgatgggctgttcgagaaggagttgcactgggggcaaggcatgatttgtcgttgcattgcatggcattgcaaacaagaaagacatcgtatgttagccaagggggggggaacaaacgatgactgaatgaaagaccgactgcgaacggaccgacgtctgcccgaccgagctctgcggccagatggagggcgggtgtgccgatgtggggtttgtttgggttgattgatttgttgtcgagcacgatctctaccgtttcgtctagagagcaaggggggggggcatca

SEQ ID NO: 1786 - DNA, 473 bp, Xanthophyllomyces dendrorhous
aagaagaagaggaagaagaacgaatgaatggattcagtagaacgcccccgggggtgtaaagaacaaagcacaagagaaccaaagcaaagaacacgactcacaagatgcacacttgatcgccttgctcaacattgccgctccttcatctggggacgagcctggcttggagagatctctgaggaaaggatggatccgttggatctcacccgatctaagtgcctcgagcagttggaattgatagaaagcctctccatctgccactggtttgcctttttttgggggggggaagacagtaagaacacgatggacgacgtttgtcagacactttcaaccacacagccaacgaaaccgagccaagagatggggaggaagcgagggaaaagagggaagccaagggaagccaaggaaactaaacggaccgtctgatgatagcgtgttgaactgtctgaccgatccagcgatgctcattctgg

SEQ ID NO: 1787 - DNA, 639 bp, Xanthophyllomyces dendrorhous
tgatgagagcagaccaacgggggcgagcggagggaaagaaaacggaatctttccatctcggcttaatctttagcagcgcgggtgatgatgggatgatggccgtcgctgttgtcatcgttgctgccatcgtcggtaaggcaacaccatcagatggggtatcaccagatacccctcctgctggtctacatagcccacctccctttggatagagagcgtcgagggcaagaaggacaaacaacagagcgcgctcaccgtgtggccgttcccgagatgattgtgtgtgtggatgctctcgatggcttttcttgtgttcttgtgttcttgtgttcttgtgggtgatgctgtacttgccatcgctgctgtcactgctgctgctgctgccgccatgctctgttgatctatgttataaaacgcgcttgcatcccatcccccacagatgatgtgcagcacacgctctctctctctctgctctatcttgtgcgcactctctgttctctcgtgcttgactatcttgcccttgccatcgccttcgccagcatgctatccacgctctacctacccttcgtgtcatctgtcgcccctcccgatggtctctacatgctagccccccctccttgccacccccccccgggggggggt

SEQ ID NO: 1788 - DNA, 1255 bp, Xanthophyllomyces dendrorhous
ccacaagacagtacgggagatcactcgggagaacaagatcgctcgctctaggcctcaatctggcagcgagactggtgagagcatcacccatgttccctacagagctcacgggagcaaacgatacgttcatcgtgagcagccatcatcgggatccgctcacaaaggaagagtacatccttagatgtgcgatctctgtgaccttggtgctcaccggcggtgtgtttggtgagtgtttctctgttgttgtcgttgcctttgtcgttgcttccccccccctcgctcttccatccaacgttcgtgctcttcccccggggggaagaaacatcttaggatcattttttcttccttctcttcatttttttctctctctctttccttctctgtttgctctcagtctcgtccccgttcctccccttcgtgttctcatggtcgattgtgagcaatgacgatagctaacgcgcttgcgcttgggatccactctccgatggactccaaccaccatgctgccctccagccggactcacccttggtctcatgggactcgatccccttcatctccgagtgctggagaacagctcgagtgatccccaggagaggaagaacgcggccaaagtactcaagctgctcaacaaaggaagacactgggtgttgaccatgctcttgctcggtaacgtcgtacgtatccttctgctctctttgaccttgcccttagccttgtgctcactctttcgttctgtttctctctctcacacactcacacactcacacactcactcagatcgtcaacgagtcgttgcccatcttcttggactctatccttggcggaggaatcgccgccgtcatcgcctccaccgctctcatcgtcatctttggagaaatcatcccccagtccctcggcgtcagatacggtctctccatcggcgcattctccgctcccttcgtccttgcttgcatgtatctcttttcccccatcgcctgggtaggtccctttgccttgtgcttgtgcttgtgcttgtgcttgtgcttgctcttgctcttgtccttggactctgccgtatctgcaaccaaagcgtatccctctgtgtaccctcgctcactctctttctttcctttccttcacctctcttctctttctttccctttcccctagcccatcgcgaagctcttggacttttgcctgggagagaacgaagagcacgttagtacatcttcaactttatcaatccctccgctccgcacacagctcatccaatcc

SEQ ID NO: 1789 - DNA, 4287 bp, Xanthophyllomyces dendrorhous
ccttccccctctgcagacctacaaaaaggcagagctcaaatcattcctccagttccacaagaccggagaagagcctctccgggatgacgaaatcaccattctcaacggagtctgttagtctccagtccttgtttcgaaccaaacgtctcttcttctcacccaatcgcttcctctcctctttccagtgagcttgaactcgacccaggtccaagacagttagtcatccatcctatcttttgttcattctccttgtctcgatcactaacacatctctcagaacagtcatgacaccaatcaaagacgtcatgaccttgtcgtccgatgtccttctcgaccatgcaaagatcgacgagatcatgcaagttccttttcttcattcgcccctcgccctttctcttgctcctccctttcccatgctgaccgtcatcttactcacccaacagcctgagtgggttctctcgaatccccatccacgagcctggaagacccagggcgttcatcggtatgcttctcgtcaaaaaggtcagtccagatgtgtctctaggtcgaccttctccttgtccacggctgcttactcaccctcctgcccgtcccaactcacccctcttccacagctcctgcactacaacccggaaaacccgcaaaagattgccgccctcccgttgtcgaccctgccagaagcaacgcccaccatcaactgtttccaggccctcgactacttccagaccggaagagcccacctgttgctcatcagttctaccccaggcaaggaaggtggcgccatgggtctcatctcgtatgtctccctatgtcctgcctctcctcttcctttgtctcactttcctcattcccttctcctttcttctctttttcctcctctctctctcgccccgttctagattggaagatctgatcgaggaaatcatcggtgaagaaatcgtcgacgaaacgtaagccttaacgtttccattctctttcttctagttcttccctttccgtcaaacaccatattcacgcacccgacctattcgttccctcccttgcccagtgaccgttaccaggacaaccgatgcaaaaaagcggctcggcgaacgtccagcgccgagatcatgcaagggtatcgtccttgtcgtcttttcttttttcattctctcgtaactccaacggacttctcctccatctctgacccctcttttcgtctttccgaatcatccagaatcatcgagcgtgaacgaaaaaagttcaatttgaaccctaacggcgttaacgttcgtgtccatctctttcttcacattctcccctctctctctcttctttctggatggcaatgctgaccggcccgatcggctgatatcttactcatagggtctgagccgggcaaactcgatcgccatcattgaggagggcgaccctaacgaacagaccagtctgttggccaccgtgtctggtcctcaatgtaagcgtcctcttctttgtcaaacaccggtcgtcttggaatgctaaccggccgtcgttcgatcgggtagatggttcctcagtactcagctcgtcaccgaagtgataaggtaagggaaaccaggctctccaaagtgatatattttcatttaatataaaaaggaaggaaaagaactcgttctcacaccgacagctcaaacctgtccccttctctcagcccatatatcgataccattacccatcatccacaatcttcctccttctttttctattattatttaaaattattattcatccatatctgccccttgcatctcttccatcgtttcttttcgtcgctttagtcctctacgctcttgcttctcttcttgaattctgctatcggtcttctcccttcctcctccttctctctttcttgcgatccagcctcccttttcatttcattccatctttacttcatcccaatgtagcctacggccctcccgctctttgtcgtctttcggtatgtctgtgtgcgcgtgttcgttcgtgattgagagccgtctgatatcatgtcatccatgtttcgatcgagagagagagagagagatttctttctctcgcgggattttatcatccaccgttctacccatcatctataaacgaatcctgaggcacacagtgcatatctcctgaaagacgaaccctatcgatctgatcctgcgccctgcgctgtttcccctttctccaaccgacggactgtttcctgtgtgtaccgagcggggcgaagaagaagaagagaaggagcgtaagcgagaaaagaaaggggaaatggacggaaacggaaagaaaagaaaagaaaagaaaagacgaacctctagctcaaacagatatgcatcctgacaatcccccaccagacctctcaccgctcctgccagcctgtacagatactctctgtttggtccagaaggaccttgacagctcaagatcctcttggctagaaagtccagtggttcggatccaacttttgagaccaaactaatcgggtcagaagaacagcaagggatggggttcggattcgaggtagagcgagaaagaaaagggctacataccgaatgcctcgttgtcaacctttccgacatatatagttgcctgtgtttccatcaagaccattagaaaggaggcccagttcaaatccttaccgtctttcctccctcccttgtcaagaaaaaacaaacgaggacggactgacatcgggtacaatcacggtctccactccatccacaaggtcatagatggcgacctgctcgacggtgtatccgttctgttcgcgcgcacacatacaaatacattcagcgttttcatagtgtaaagcgctccgataaaaacacaccgtccgtttggtccttaccttttctctgtgatctagatcagctttgactttggattccatcgagccgtcgatctcccatccgactgtcgtcgaccgtaggacgaggccatctcgtgtttgattcagcttttgttttcctccaagaaacagaagaaagagaaagagaaagcaaaagaaagagagaaaaaaaaggcaaagaaaaagaagaaccacttcacgtacctccccagaccttggcatcttcttcagacgtccgttcaccagtgatcccctcccaatcctgcgcgctcaccagcgtgacgactctgcctggcctatccggcacccctcgatggtcgtttgacgactggccgattcaaacatcgacatacacacccacaacgacatgaaagagtgaattcggtttcagtctctcgaagcgtttcggttttgcctcgtctgctttcctttgcaccgcgcgtcggactgacctgggcgaaccggcggatgaaccctttgacgtagccttgtttcttcccgaccgtatgcggcgggggtctgttttgtaggtcgaaacggacgaacatcaccgccatgatgatcaatcgaaatatcggagggacagaacgctcgtggtcagcttgattccgcccggttcatattagcccccaagtcaaaggcggcatggctcgatcaacccttggggtcgtcgtcatcagtagtagtagcagcagtggctttggctcttggagtttctctttcaacacacaaagtcatctctccacgtacttccatacaagcgatccgtatccaaagaagaccagtgtcatgagtagggaagagtgaggaatgtcggatggacgtttgatgagatcgacaaaatcgtgtttctagcgcgtgtttttttttctttttttttttcttctttttcttaattattcctccctccgcccccatcatcgtcatcaccatcatcatcatcatcggcaacagcagcactatgtctgctaggtttctttcctctaggatacctatccatctatctcgccgtgccgcctcgttgcctagactaggagcgccaaccaagagactatgcggctatgggtactcctcgatggtcaactcaaatacaaccgttcgcccatatccggaagaatcgcccgaaccttcaagtccttataaacctcttcgtattcactacggttcgtgctccctccaaagatccgcatcctgtcagcagcatcagaaagaagatacgctcccgtatgacttttgactgacggctttgcgttcgatcggatgactgggaaacacctgaacactcttaggtcccctgccgaaacgaagccatgagattcacgagatcacctccggactcgtcggccagacggtcactcttgaaggctggctgacgacctctcggtaagagacggactcaaagaactcgttcctgtcatcctccgatcccacggacgaccctt

SEQ ID NO: 1790 - DNA, 35178 bp, Xanthophyllomyces dendrorhous
actttcacaccctctcagacccccagacgtcctcatccgttcagctggtccatttcggaaaggtcgctggggcggagctgatggaggtccctgtggagagcgtgctctggatccagggcgaggtcaaagagaagaacggaggtggggtcgaggtggatatcaagagctggaagctgttgaacagtgcggagagagagctacctttcaggccgaacggcagttacaacctggtacgtcttctttccttcctcttatctgtatccgcctttgcctttgctttgtttagtcgagatggtgaaaccgagtcggatgtaatctgattcataccactggaacgatagccctcggaggactttcgatccgagtacagatatcttgatctgagaaggcaggcgcttgctgaaaacatccgaaagcgaagtcggatagcccatgtcgttcgaacatacttccatgaacagagtgtgtcctttgtgtcctttctcttcatctttatttccctctttcatttctttttcaaaaatcacaagaagcgccattttcctgaagactttgtcgttcatcagaattcatggaggtcgaaactccgatcctactccaatcatctccagaaggcgctcgtgaattcctcgttcccacccgtctttcctcttctcgcatctcgtccgacacaatccccgagccgctcttctacgcgctccctcaatcaccccaacaaccgaaacaactgttgatctcgtccggtctgacctcccggtactttcagatcgccaaatgtttccgagacgaagacggccggaaggaccgacagcccgagttcacccagatcgatctcgagatgggcttcgtctctggtgcgccccggccggacgtcggccaggccgactggaagatcggcggaaacgaggtccgcagggtggtcgaaggcctgatcggtcggatctggcacgacatcgagggggtcgacgtgctgggtccgaaaggagagttcagcgtgatgacctaccgggaggcgatgactcggttcgggacggacaagccggacatccggttcgcagtcgaagtcgtttccggattagatttccttccagacccggcgcgggagaaactcgtcgagaacgaggagacggtcgatttgttggtccgtcctaacgattgggccggggtcggtgaggacaccctcggtatagaccgacaggtggaaaagttcacgatcggacagggttcagcacagggtatactagagggtgtagacttgagtacagaaggcaagctggctacacaattagggatcgagcagggtggcgtcctttgggccgctagaagaaaggcagagcctgaggtaatgttctttcctcattttgaatcagaaatccgatcaccgtccttttctgacgatttgtcggcttctctctctttcactcagggtggatggacggcacttggcagactccggttggctttgatgaatgaggccgttcaaaaaggtttgttctggctccttccttgtctgtatcgtttcgtccactgcagctcacactcatttaatctatcttgtaacctttcctcatcaattagaattgtttacccttcctactgctcctcacttcctctgggtcgtcgagttccctctgttcacgctagccgatcctgacaaagacttccaagcgcacggccggtggagcgcaacacatcatcccttcactgctcctgtgtgggaggacgtcgaagcgctcaaacaaggtcaggtagaaaaagtcagaggtcaacattacgatctcgttcttaacggtcaggaaatcggcggtggctcggtcagaattcacgaggctagattacaagagtgggtgatgagagaggttctcaaggtaatgtcttctcacctctttgctcttgtgcttgatccagaagcaacggaaataggtatgagaatgaaaaaaaagaaaaaaagaaagcagcagactgaaaaaggattgacttaaatcacaatcagcttaccgacgacgaggtcggccggttctctcatctgttgaaagcactttcgttcggagcgccccctcacggaggactcgcgctcggtaagaaaccatccgtttcctcttccttttcctgctcctcctctttcgccttctgtctctgctctgcacacatgaaaattctaaccttcagattgctcttatcgttggaaaaaaactttaacttcaggattcgaccgattggtgtcgatattgtgcgacgcatcgacgatccgggatgtgattgccttccccaaatctcccgctggagcggatccggtcttcagagctccaaacgcagtgccaagtgaatctcttagggagtatgggttgggagctaccaaggccgggtgatcggatgagcatgtgtggacgtgatgatacaacatatatagatgaatacagagctgtatgtctctttttcggttctaaggatctgaagtgatttaaaagaaacatgcgaaagaaatgagcggagaaggactttgtcgattgctcgcttgtatatgagttggaacgtctttgactaccacagaatgaatcgtcaaaacatgcttgttagtagagggcttttttgtgctatataacgaaaacaacagtatcgaaagttcatttacttttataagtatctctggcgttcaacgttcctctacgttcactccacgttctcgtccaaaaattggcgtatcatattctcgacatcgctcttgacgtctttcggtactgatgctgaaaggaacacataggaatgaaacaaaagtgagcccatatagaccaagacaagcgtagccggggaaagatggatgaatgacatacacgaagcggtgggtgtgattgactggagaagagcttctaggttgagggtctccatcgacctagcttgctctgtatatccgaaagaggtcagtgttggcgatggagttcggtactgatgtgagcagagattcaacttaaacgacgatacgagggatccatgctgccttacctcgggcatctgctctgactctggatgcaacaattgttcgaaagttaatgtctggttggtcatatatatagcatgttaacaatcacgaatgcttacttgtcctcccagcctgaatcttctaatctaatctttagtgtgcgtagaattcttgaatagatatcaccataaggagttcgtgtagaagtcagctggggtttgttaagataatgagggagtaccaacgattgacacgttagattcacctattccattctccagattcgatcattcgcttcttgatggcctgtgcgatgtcatcctgatcgtcattggcagacattctattctatctgatactgaaaagagacctttgaacagatgttgtaaggtgatgatgacgatgctgcagatgatgatgatgatgatggtaagtgagcaagagtccaaaagactaggaatatattagcttttctgtagttttttttgtaacctttcatcctactcaaactcactcaacatccaaatccactatcatatcatcaaccaccagtttgaaacacgaacataacattctcagccatcatgacctccgatctcacacctagaccgaacatcatcgtaaccggaacgcccggtacaggcaagacgactttctgtcaaatgctcactgagatcttacctccaggtttcaagcacgtcaatatcggagacgtcgtcaagaaggagggcgctcatactggatatgatgaggagtgggatacctatgatatcgatgaggataaggtgagctttcttggtctcaagttttctcatacatagaggtatatattaaattgtgcggttcgttttggccggtttgctgtgtctgattatccggatggacaaagctactggacgctctagatccaatgttccctgcatacgaagacgaggaggactcggaagcttacctttcgaaaggaggcatcatcctcgatcatcacacttgcgatatgtttcctgaacggtgggccgacttagtacttgtgctccgatgtgacaacaaaatcttatgggagagactcgagtcccggttcgtctcgtcgtttataatccattttgttcgttctcagagaaggaattgcttggtctgatcaactcgcgcactgggctcttctcttttcctcgtatttaacagtggctactcattgatgaagattcaggagaacaacgaagcaggtgggtgtccttcttacggctttctatcttgtcgtaagccttgcgttctgagaactgtcactgaccctctctatcatcatatacttcactctttttgtcttgtagagatcatgcagaccgtattggacgaagctagggaggcttacccggcagagattatcgttgaattgccaagtaacgaacaagcggatatggagagaggtctcgaccgggtaaaggaatgggtcgagttgtggaccaaacagcgactggaaagcttagaaaattaatgtcgatttagactctatagcccaagttctgttcttattcttttcacgagttcttcgaacaatacacacgaccgatcgtcttgcctatacaaacttgccatgctgacgagcgatgagaacaacgaatggcctatagatgggcaaacgacatgcatcggtatcaaacgactgcgtgtaaaccggctacctcccttttgactgtataaaatatatctcccgccccaccttcgacctctatctttcccttcgccaactttttgacagtgaccacttcgtccgactcttcgctctgatccacatccaccgtcccacagactaacattccttctcctacaaactcggtagcaatccccaatgtctgcagtcgaagcttcagcgccgtgagcttcatgtctccgatatagagtgatgcagggacaggtggaagagtgagcgcgagcgcggaggaagtcgcggtggatactttcgacgacggaacagccagtacaggttcgagcaccggaatattagagtttgatgggaaggtgtatcgtccaaagatctgggcgacttcgaaatcctcgaactaaaagaaaaacggacgtattcaaaacgcgcattcacgacagaacaagatatttgagaacggtgtattgagcagttggtagtacactcacttttgagaattttagactggccatcaaatggtctcccagactaagcgggtaggtatgcatgttctctccgatttggagtgcctgtccgtctgctggaccatcgatctcgcttgtcatagaaggcacagccttgcaagaagagatcaactcttcggacgcagagtcggtaccatgtactagtatctagattgagaggaatgtgaaaaaacaggaatagaggatcaacggccggttaaagagcagggctccaatacttgaaaaagaaagaaagaaatgtaacttactagacgccgggggttgatttgagggatgatcgtcttgatggctcggccgtcattcaatccttccatgtcgatgtagaacaaaccgcaacgcaattggattgtttgaacctccgagatgtatttcgatggtggttcttgcggttcctcctaccaaaggtatgcgagctaaggttagttcgtcttatctgggtacagagctcctcgagggaacgattagagaagagagacaggctttacctgtttttgttcctcttctagtttccgttttttggcatccctcaccacctgatctaccccgacctcctcgatctccttccctttcctcaaccaaacccccacatcaaccatctctccatactcgtctacttttctcaccttcctttcaacaaacggaaacatcctaaatcttggagcctggccctgtgcagtcttgtagaaagacgttgctctcgtagcttgacctttgacgtaaatatcgaacgagaattgacgggtctcatcctcccaagagatgtcggttgcccctcgacctctggctgagacatccccagctctaggctctccgtcctcgtcgagcccttcgccatcggcatcgctatcctcgtcatcatcatcactttcaacttcatcggcctctagaagttgctgggcacgggcttgggcagccttttgagcggcttctttggcagcggtcgcttgctttgcttcttggaaatcgataagctcttggtccgacaatgggactttggtgttgacctatcggaaggaaagaataacgtcgaaacaggcgatgagcacaaagtctcagcagcacgagttttgattgaataacaggaacaaatcaacaacggaacggacgcacggtgatctccaaggtttcgtccaatcctagtggaactcctgcctcgccttcacctgctttacgaccaggcgcctgtctctcgttccatttctcgaacagatcgtagctcagcgtaccaggctccgaacgagacgtcaagacgaccaatgtgttcaggttggaagccagttgggtgaataatgctcgggaaggaccgtgagacatggatggagggatggcaaggatgagttttggacgggaggcaggataagtggctgtcaatgcggcaacagagtcatagaaccgtagatgtctgaacgaaggcaagtcacatgtataaaagtatagtcgtgtccgcgcgagtttttttgtcagtcacacggcctttccccacgatcaagcagcaaatatgaagagatatattgacctgaattctaaaggatgacctctcatctcgtttccaccccctcctctaccaaagcccatggtagcctctcctctggcgacatcacctcccatccactccatcaaacttctggtaaagtccaccatttgcttccctgtactactcaccaggcaaagcggataggtccaagttgttccagtcgaatgagcctgagctatggagtaagaccaatgctgatcgagtaatatgagaagctcaatgagacgtgtagatggatcgacagggaagagaatggatgattgggacacaaaagtttttgtgatgagatctgagaggaaaagttggtttacggccgatggggagatgccggatggaacagacgtgaacatcgatatgatatgattagagaaagtccgaaagagcgcgcgcgacaagaataagaaaaaagaggcactcacccaacaaggttccatccctttctctacgcttcacgttcttccactgcaccctatcggcatcggtgatgagtaaatctggtcgaccaagcccttcatgaacgccttctcccttctcttttagtagcgctgttccgtcaagatgtctttctctaagatggttcatcccgaccgcgtagaggatggttccggacgaaggtgaacgaatcttccagatcgtaccaccgagagagtgaccggacgagaaagctgtgagagtgagggaggatagagtacctaaattggaaatacacaaggccaagtgaacatgtgtcacttctgaacattcaactcgagtgcgtgttgctttgtagcgagatctcttgtcatgcttccctaggcgctcgatctatgactgaaatccacatgatagggagcagaagagaaatggagaaagaaagagaaagaaagagaaagaaagaagaaactcacccatcagacgggttggactctcgtatttgactcttgttatcgactcaaatgcatcaagtacctcttccgtagtagcgacccatttgactcgcttcgtcaactttgtaccgtctatcttcccatcgacattacctgtttgtccgttggtatattcgaccccggtcatctcggtctcatcttccttcgctgattcctcagccggtttgtctctgacatcccacttggatccgtccatctcggctctccagccttcgacctcggacgtacaggtcactcggcccatggatgcaattgggacagtcgcgtataccggacacgtgagcccgaggtgaaaccgagcgaagggaaagtaaccaagatgaggtaaagacgaatgggtgagaaggagcaagtctatcgatggggcgtgtctgattgatttaagaaacgaaagtgaagcatagcgaaaaagattcggtagggttgatagcaaaaggtgagagattgtcacgatatgtaggctgacaagaaagggaagaaaagacaagactatttgtgttcgacctggacgtacaatcttaatgctttctcatagtctccctccatctctcctccttccaaagctttccgaagatctggacttccacagtcgacaagtattttgagatcatccagttgaatcaagtaggccaaaggcggaagagcagcggctgccgatgtcgacgctacacgagatgaagacgagagaggagtgaatgtgatcattggagtttaactgcaccgggttctaagcgatgattcggagaaggaggggtgataagctgagaagagaggcgtaggtaaatgtatgcgtggatgtccgagaagttcattaagaattgaacctatagaacgacctttgtgaacagttggactcctcttttgtaaagaatgaggcccagatttacggcagaatagaaaaggcgtctggatttgagcaagggactgagcgatgggtaaattgaggataagacaagaggatgaagttgattgatgggagcttattctatcaagatgatcgtaggccggagcggaagatacaaagcggtgatggttgaaggtgactgaaatcgaaacaaatctagtctgtttgtgtagcacactacttgccttcatcttcatcttcatcctcttgctttttctctttctcttgattccctctcctcgaattgttcagggaaggcatatgccacacatagatctttcataaaacagtatcatatagacggcaatgtttctgattgatatcagctctatccgcttcatccggagacgcatacagggataaaccacgtccgttgagaactcattgtattgtctcatattgttgtcaacaggatgcatcgtattaaggtatggaggaaaaaggaagattgaggggaatatcacactacacggagagaaaatagaggcagagataaagtttagacgagaagaggcgaagcggtctcgatgatggacaacgctttcgaatactcctccgattgtacaagttcaggttccgattcagacacagcctgagacatgtacaagccatagaagagaggcataatcagacaactggacccctgcgcaactggtcggagaacactcaaagagggtacccacgatgacatcttttaattgttgaagagcttctaatgccctcttctttgagggctcgatcatttgttcgcaatcgcccaggaccttgcgctgatgatatttgggtcccgacaggataaaagaggccaggatatgaatcggaaagaacaagaagagggtctgatgagtttgacagtcccatgaacgttgtaaaaaccggctgtatgctgaccgagttttgaacgtcccactcatccgccccctctttggcggccagtctctcgacaacagccctctgatcttcagtttccttctggtaagacttgaattcgtttgccaacctgaattaatttgattatgggaagatgaacgaaaactcaagtcagttctattctataatctcaagagcagccaatggataggtatagatagagagcgaaagataaaaaaagaagcctaggtaaagacagtgaaaaagatgaagttagagaagaacaacagctcaccttttaagaacaccacctttgatggcgagctgtcgtttggctgctttgatctcctctgcagacattgtggactcaacgacaaggcacggacaaagtgagatggtagtaggcctaagtaggactcttcaaaggggaagaagacctgtctagtgggaggaaacgtgtaaccaggatggatggtaaatcccaaatgaagcaagtcacgtgacccactatgccgtaaccactttcaaagtagtcccctctgacttgacccacgggatgaatcaaatcattcagacaagctgctgtacatatctatgtacttgcgcgtccacgcccaagttcacatccatactcacctctgcacacgttgtggttcgttggacgatgctaacgatagatagatcaactccttagataagattgattaattgagggggctgactggatggacggtactcatcatatatataaaacgatataaccctcagtatatgaacgagcataattaaccgtttgcgccttttttgccaagctatctgccctagccttcctcatggtgagaggtttcaggggtttaaccatggatggccttcagaatatgctctgcttcttccctggaggtcaacgccgataggtcagtcccaagatataccttggtctgggaggcacttttggatcggccgtcatcgtctccttctgtttatataaagacctcatcgtctgaacaagctcttggattcaccattcgatcatacacctgagacactctataaatccattacgataattctttgatctcgcccttgttgcaacacggaaacaacaaacaatgacttctctcaatcatgttggtatggatatggatatggatatgggatctagcacaatgacgtcgatgaagatgtatgtgccaaggcatcccctatctctaaatatgttctttcgaaactggaacaattgctttatcttcccctcttgactacaggtatttccacggtagtagaactgatcttctttggttcaaatcatgggcaccactttcccccggagcgtttgctggtgcctgtattggtctatttatcatcgggttacttgatcggttcatctgtgccgtccggggggtggcagaagttcgatggagaagagcgtgagaacagatttcttattatgatagaattctgtccgtcattcgagatcgaatttgcatatcttatctttcttgttctttctgttcggctccgtcttctgcttagcacacaagatgtgtacgatcagcaatctgttacgagtccatcactctcgcttccaggacctaaatgtgacggcgtccaatccaccacatctagtaccaatcccaacggttctgttcttttctctccactcgctactttgcgctctgccagtacaggaaaccggctagttccccctttcatctggagaatcgatgtgatgcgtgggttgctgaaagcattccagttcgcgattcattatgttcttatgtgagtctagcttccgtatatatatcgctttatatttgctccaattctgcaatgttttggcctgacgacgaaacggatgttcttttaaatttcttgattctttcaggttggcagtcatgtaagtctcggtgttgatcccctcctcgtggactgaaaataggatcgattacactaacaaacgatcttctccaggacattcaacgcgtatttcttcctttgtatcatcctcggcgagggtttaggcgaagtcatgtttggccgattcgcttcggaccatcactgaagtaatctagaaacagataaacaaagatcaagataagatgaatatcgataaggacaatatcttccgttatatacacttgttcccataatatgcttcacgagactcgatgctatgtacattataccatacattaaagagctcactttccctagcgcaagttctatgcggaatagaagaaaaggataataacccagtccagagaaaccaagttaccaagatagtattacccctttttacatggacatagataccctgggaaagattgtcgataacatctatgggattttggtatgaactgatcatatgctcttcaaaatgatagtcaatatatacataaagcatcgttctgaaggagaagcttgcctctgagagggatttttcctcttcggcatcggcagatcctcacaccctcgtagaggagttgagatattttgttcccttcctgaaagatgctcataatatcgcgcaaatgcttcgtcgactgatacaattcgggtggcaaggaacaattccctcttgtttcatcaacaaacccgattgcgtcgctcgcttcaaacaacacacaccctatctatctcatcttctcttctgttccctgcgtgaaccggtctagctttcttacaatcacaagcttgagcttccgagaaataactcatgacgtccgagtccttccgttctgtttggctagacactcacggaatccgttgaactctccgtttgactggaccccgtggtccctcaaagttgatttatttggactcgtttcgtgatcctttataagaatggctcgaagaaaagtggctttttccctcttctatattactgattcgttaatcaaacctctcttctgcttcatttctcctggatttattagttatcagtcgtcatgctctttcctgtgatttccctagctcttagcatgcttacgctcacgcaggtggcttctgctcattttacgttggactacccgcctacccgagggttcgatgaggacctcgagcccaaggtacatctccagcttcccgtgccatgtctgtttattatccgttgtgcccgcttcctgattactgctgtgactgatcaaggcggattcgggaatatctttttgatagttctgtggagggtttgacaccccttccgaaaccaggacgccattttcgctaggtaacacaacgatgacgatcaacaatcatcatgattcggccactggtaaattaatctcaagaatgcgttgctgattgatcccagttatgatactgatctgatatttcactgccactcttatcatctctgtgcagtgagcgtgttgatcgctctggattcagaccctacaagcttcttccagttctcgaatggaacgactgtacgttcctgcatctgtccatcaatccatctccccttcgcgacttgtcatatgcttatcatctctctactcttctaacttgcgcgcagcttccgtttgccaagacatacttcactgtccccaaagggatcaactgcttttacgtcgacctgtctaccgcgctcaaaaaccaaaacattgcgaatgggactttggcaactctgcaagtccggtttgacggcggtgatggtgatctcttccaggtccgtcctcttccccttcttcttgcccctacccagacgacttttttcccttcgttcttatggattgctcattggatgtatgttttttgttctgtttggatggacagtgttcggatgtcatcctcctctctgaagacactaccggtgttttcaaccaaaccacttgccctgctacaatcagcacctctgccacttcttctgccgctgctcaaacccaggctcattcctcatccgccatgtctgcctctgccgctgctaccgctgctgctagtgctagtgcgagcgcaagctcaagatccgctggtttcaagactatgtcttcttctgtgctctcagggctcatcgtgggtggactcggacttggccttatgatcatctcgtagacaaagaaaggaaacaaaaaaatgtactcagtttgcttccatctacatgtttgaggggtctatatgattatgtttcccatcttacttgccctctttccttttgttgttgatgttcgtttctctgtgtttatcttttcctttttcaattgtcttcgttccacttcttcagactcaaggtaagagtgacatgatttataacaaaagggaagcgcgctaggccaagaagaaggctcgagtgaaagagaacagaacagattgatgaatacgggatataagagcttctacggtatggcgttatcgacgtagggaacttcgtggaagaggtatctgttcagttttagagtttgttttcaaagaccgaaaggaaatgtttggtgttcggttagcttctctcactcttatgctatcagacgagtggtctttcttgtgtctgggaataaagaggaaaatggacgcacgaaacactctctccaaagtgacttctcctgatagtctctgccaagatcggtgagatatccagaacctccaacttgtccgtcacttccctcctctcctcttgcgggatcgtgttcgtcacaatcatcttcgataagcccgagttttcgatcacttcgagtgctttgccggacagaattccatgagtgacaatggcgagtacttttgtcgctccctgctcgaccaagttcttggcagcaagaccgatcgtaccgcacgtgtcggccatatcgtctaccaagatagcgatcttcccggtaactgtaccgacaagaaccattcgagactagttttaaaattcaagaaaatgttagaaagacgaacaaataagtcctagcgcaggatgatatatactagatgagaaaagatgaaatagcgatgagatcaaaactcaccacttcgttagccttctttcgctccttgtggaacaatgcaaaatcgatgttcaaccgatcagcgatcgacgttgctctgttatagagagataaagtcagctcttgccgggttgcttcgtccttcttacagaaaaatgaagaggaaatatttaacgaaccgcttagcacctccggcatcgggtgagacgatgatacagttctggacgtcgtagttacttcggatgtaattgatcatcgagggctcggcgtaaagctgacagcgcaaagtttgaagaaaagaagagaaagaaacacaggctcaatagctgcacacaagcatctatttatgacaaatgtttcttcaagagcttagcttacactgtgatcagagaagaaaaagttgcctggacatcagctcggctctgaaagaatttagaagagaacagtttgaaagaaagataccatacgtacttgtctacaggaacgtcaaagaatccttgaatctgagaagcatggaggtccattgactggattgaagagacaaagtataagctcatgcttggaagaagtaaacaaaaactgaccgatgaatgatactcacaattacatggtcacaaccagccttctggatcatactagcgacgagcttggcggtaatgggcgctctggatttatccttcttgtcctgtcgggcgtaagggaagtgaggaatcacggccgtgatccgtcgggccgaagcaatcttgcaagaatggatcaagattaagagttccatcaagctatcaagggtgataaagtaagggaagttgtaagatgccgttaatgtctatcatcccagatcataattttcataaaagcaggtggtccaacaaagaatgaagagaaacatacgaagtatttatctctccgcagccggtgttcaggatgtacacgtcgtactctcggacagactccaacatcttgacctgagattcaccagccgcattcttggtgattgtgcatttggcaaggggcacattgagtctatgtaataaagtatggtccagcataggatcgacatgggagaatgcggatgagcctcgggtctgcgagctcaaaccagacggagggctggaacggaccttttggaaaccaaggcagccaacgccgggtgtgacgttcctttggtttattacaggaagcggcagcagttgcacgtgccaaacacattccaaccaaaaccaaacacaagcgagagtgtcagaaggcggaagcctttgttgaggagaattgagggagagcgacagtacaggacgaggcgaagagaaatagagagagaaaaaaaaaactgaaagaagccaatatcgggcaggtccggaatggagagatgtttgtatgaggaagggaaggagtacaagcaaacagagttttaccaacctgcaaagagcttgatgttggcaaccgaacctccggacattgttctaggaaagaagagatgagggaagaggaatgatagcttgccgagttgatgagtctttcttgctaggtgatgagcaaccgaacgaatgaaaaatgcaagaatgcgatatttagggggatgtaacctttgtaaccatcgagttgttgtgacgatgaagcaagcatcagagaacagcacaaggaataagtcgtcaacacgaggcatgtcattgagaccaagactgagctagatgcatcaggatcttagagaactacggacgattttcataatcagacggcagtctcgaggaagcaagaggcttagggaaacaaaacgtaaatagcaaacgttatacacaaaggggaagagtattttccgacatttctaaatcaaactattcaagattactacgacgacaaaaatcatgtcagggagaatcaattagagatggatatcaagaaaagagaaacgtcgtctgcttcagcctttgtgcgcccaacagatagagctgatagtccaagaccatataacaagctcatcattatattcaaaagtacgcgcaatgaagcgttttgggtccaaagcttatcgggggtcagactagtaggacgtcccccattgatctatgctgattcgatcgtctgtgatcttctgcttgttcatgtatctaaattcctccgacagaacaaatctacgcgatgtgtgggatttgagtgcgctcttggtgtatctcgaaccgatcacatttgtcatcgatttttatcgactgatcggcagagcgactaacagtcatgaatcggagaaagactgcaagatgacatgcagacaaatgaggccaccatcagtaaaaaataagaggagtcagtcccttcataccgtcttttaatcttaactggcaaaacaacatcccatctttgaagcgtgttattccgctcgggatgtcatccttttttaaaaataaaaaaacttgtctgtgtttgtctaattcagttcatctgagaacctcatattcatgtctcgctctcttttctatctgcttgcatccatgttttatatgatatagcatggtataatttcgagaaaagtaaggaacataaggaatctgtaggcaccacagaagtcttcaacagtttagtttgtaacgcctgggtgctgactaagctcactctcgctagtgctctttttcgctcgtaccgttgcatcacttcgactcttttctcctatttcttttttctcctcttactctctatctcttctctctttcagcattcactttcatcatgctccctagaaggatctcctctgcccttcgatccggctcggcatcgttttttagccagcctttgccctcggtccgggcgattagttgctcttctcccactcatgcagacggtctcttcccttcctatacgaaacaacaggttgcgtcgttcgtgaccccagcgtcgtaccacttgtctgagctatctaagcttactcctgctcaagcagctcagcttccttccccgaccgattcctcccgacaaggagttccccagattgggtccggctcttctgactccccagccattcttccaccttcctcctcctcctcatctagtgcgttcatcaagaccgctatggacgctacctcgacctcggttaggaatctccacaccaggttccatttggccgacctgggaagcaacctaagccagctcgaagctgatcttggtttgaccactccctcctttccttcgaccgatacaatccggtcgatcccagtcctccgagtggccgtcaaggtaactagaaacaatatcatttccaatttgtcctggctcgaacacccgaagcttgcgggagtctcgatccccagaggaaacatctctgctggttcgcttggcttcaagaacgcggctcaaggagggtttgaggctggtcatcaggtctcgatcgctaccttcaagcgaatcgatgaggaaaacgcacgggtgcttgaggagagccgtcagctctcggccgacgcgtggagggcctgtttggaagccagacgaaatgagctcggagcggtttacaacgatctctcaagcaggcagcagtccattagtgagaggcaccaggccgttgctgatctggagattgaactcagaagagccagagaggccgaggagagagaatacgaggcagaaaaactcgaccgattgttgaagcaaagacaggctaaaggcgcaaagtcgtcgtcttcaagtgacgtcttcaagcaaagcttgaaagagggcacgtcttcctccattcctactcccacctcctcctcgacgcccaccggaaccatggcgtcttctcaagaagtggccatccttgaatccagactaaaggccgctcgaactgaggttgaaaacatgtcggccgtgctgaacaaaaacctccagagttacgatagcttggcacgaactcttcagcagaatgaggcaacgctggcaaagggcgatattcctaccggccaatacacccgaaagtctattctcacacctgggacgttctccaagccgatgggtatcaacttccaggtcttctgcaaaggtttcggtcagggtagagaggcattcttcaaggcgcttagctccccggagggagaaagcgtgaggttgttgttgactggggttgctgatactagtcctgtaccgtgagtctttttttctttgtatttctttcatactcatctcacgctttgtgattatcgtgacctggctcatgtttttgttgtgttctccttctgctttctatccgcatcagccgtggtacccgacgaggacgaacagcccgtcgtatttagatggatatcagaacgaatgagaaaaccacgcaatctatacactcacatatacacaaaacatacttatcacattcaatcacatttgttcacacgcctacatccgcctcaaacacagagaaaacgttcgtgaaaccagaggggagcatgatttctcaatgtcaacctcctctggtttgcaatccttttgaactgaatgggcgttgagaaaacactgagaagatcaaataggcgtgtgcttcgtgactgatgaaaggctcgagtcatacaatgtcgttcaaatagggctctgacgcacttggctggttgtattgccatttaagtctacagacaactaagtagaatagaaggcaaagcctctgtgaaggttgaaagaagaatagaaaacatatattcaactgagtcaaaaactgaacactcgatgcgcattaagatttatggcccgaataacgtggtaaagaatacgggtcgaaccatttgccgaatagccgggccattctttattatattccacccaaattgagtcgatcacgaggagaatctcatcttatcctctatctcttccatcttgtattgttacttccactcttccaccctaacttcaactcttcacttcatcagtagcagattgaccaatttcaagataataaacggaaacgatggcctctttgactagatttatcaataccacttcgatctcggacgccaatcttgcgcaggctactcgattcttctcgacgtttggagggaccgagtacgtattctttcttttctttgttagttgccttcagaaatagagtggctcagtttagtttccttctttgtctctttgtgatgcctttgttgtttagtaaggcgttgatgatccttcagtactttcctctcgtaatccttccacttcttcctcaggcctcagctacaggtttggccatcaaacctagaggaacggataggcttcggatcagcttgcaggctttgagctccactgtaggagactctcgagtgttaattagacttttcggtaagaggttttgcttgacttgaacgtttgtatgaaggatgcatacgagaagccgcgagaaaagcaagttattaacgtatcttatctctttatatctgcgcaggcctgattccgatccttcagtggattcggtccattcaaaaaagatacgcagctcgaaaagcctcaaattccgagatcaatgaaaagaaggaggatgttggaccaaagagatggttgtcggatgagaatctggaagctattcaggcactttcaatcctggcatattatcccatggagcacacctgttcgtttctgtttttcttctttgcaaactatgaagagatcattcattgacagctttggaacgtatcattgcttctgtcctatctatcttgatcagattatctggcaatgaagggtgtggttcctttggcagtacctaggattgtacagatcgctagatggagttgtcgatgctgggcgtgggtccccttcttctttattttactctttactccaagaaagcagaagagcttaaaatcttagactgcacattcaaaacaatcctatcagaatctatgtcgtactctcattggtgtcccttcgacgaagatacaaccttctcaaagcgagtgatgattcccctggtaagctacctggaaacacacggagaatcctttccagctctcgcgttgatgatatgtgttcttttccttaaaacagagattaaagcgaaacagtatagctcgcagaagcttcaggcactcgtagatctgtcgtaccttcctttgactgttcattggtctcttccagatggcgcttggacttcttctgtaagtggatctctatcttcttcatcttcatggtgtcatctttcaatatgagctttcatcaactgataaagacctcgaatcacaacggtgaacagttccctacaggggtgtttggtaccctcgctgctatcggtcagattgccacgagctggaaagcggttgctgcgccctagactgcctccttttctcttcgctttctttatttccttacgtcgtggcttggtcttttccattgaacatacttctgtctactcgcagaaatgtctcttctattgaatgcttgtttctcctcttcttgcaatcgtttgttttgaaagacaagaccaattcgtaccatcgtcttttctgcccattcagcaggcttcagaactggagggttgttcgttaactcaaaggaaagacatatatcgataacaattatccaaacgactatctgttatccgagaagaaagaatcttgaacttttttaagtctttcgtcctttgttcttagaagaaacagtacccgctcgggctcgttttgtaggtcgggactgggcttgttccgtctgttcttcttcctcttcagcctcatcgatttcttccttctttcctttcgatcctttcttggccttctttgctttgtcggcagaccctccaggagcgtactttgcttcgagagaagctatcagatcattggctctgttcgcgttcttttttaggatcaaagctcgaagagcgtcaaggtcagacgattcttcttcgttattcccagaggtggttgatgcctgttgatcaacaaaagagatgcgatttagagatgttggcagaatcgatttcgatatcaaatgaaccttcagagtcgtgttgaaagaagagaaattagacgaactttacgctttgcttttcctttgttatccttttccttcctttctccgcttccatagaattcatcccaaacaccgatatcctttgcatgttgttcggcctcactcgcttctttttcagcttccttctttctctgtctacttgcttttttatcgcctgaagatgatacccagagatccgttcgctcaatgtcgcccttcttgatggcttgattgatgagagagatgaatcgagcttcgtctacaaaggttgaatgaggtatatggtccatgatagtagggagcgagccggagctggatcgataggcttctaagaggtctgtgcgttcttcggatgattctgatagacaggacggaagaagtgtattcaaagaattagtcattgatttctcgcaataagggaacggaaccatatcctttaatcgagaggtgatcaataccttggtaggacttcttcatttcgtctaatgaagctctatccacaacgtcaaacacctcagcaaagtaggcttcccaacccatctcttcaccctgtgtcaagaagtctccttcattcgttcgaccagtggtatcgtacctgttgggaaacacaacatcaataatggtaaatcgcgcgcaatttgaaagaaattccttatcaacaggaagcaacgatttgagtaagagtagcgaattataacaggataaaatctgaccttttacgtcttgtctcatctttcaaaacggcgtaggcgtatccaacctgctggaatttcaatgcttcggcctgtttcttctcgtcagacgccgagctatgtttatctggatgatggaccaacgcaagccttcggtatgctttctgttaatacagcaatcactcgaaacaagatcagatcacatggtcatttagtggaaagaaggtcagaacgacagtggtatgtacgtacagtaatatcggcactcgacgcggtgggttctaaattaagcgtggtatatagcaagttctcgacgtcttccccatcagggaagaattggttgataggatccgagtccattttgatctggttttgtgtattcttggaagggttgtataagagagagaacaacaaagatctagttgatggaatgatggggttgtatgtcgttgagggaaatctcctgagttggttatgacgcgtgaagaaatgagacgcgtcgcgtcgagttcaaatgattttctcctctccttcaggtcccatctacaatgtttgataagactctatgaccagctagttgctctaacattgatcaggtattgatggtgatagtcaaaactagactatagccattatcatatatgcggctatgagtctttcaaacagagatactcatagtttccttccatctttgaagaatctctcccagagacgtcaggggttgaaactagcatcgtgttgagtaacctcatctcgacgaaagcacaatacgcaaatactgcttccgggctatatgtcacgtgatacactggcgcgttctgttgtttaccctcttcatgtcgaaatcatccatttcatccaatatctcctccctcttcgatatacactcctatacataactcttccttccaaatacaagtatctccatcttggactccacataccttctcttccatatctctttaacttccctggcagataggttgaaatggcggccatcgcttccgccacgacggcactgatgaccaccacaataggtttgtttcctgccacccttctgaaatttgtgtagttcgagtccgagtggttttgacaatcgttggaccttttcgtataatcatcttagcaaccccggctggaacggtgtccacatctacgtctggtgtcgttccggtcattaccaactcgtctacggtcgggtcaacaacatccttgacggccgatagtttaactaccagctcgctttcgtcttctactacacaaagcactatcagtacaaccagcagctctagcacgcttctagcttcctccagcacgagctatactgtgactagctcctcttctgtatcctcgtcatccctgacttcgtcatcctcaatcttctcttctgcgtcgccgacgaccacttcttcatatacttcttcgtcatccactccttcttcttcttcttcttcttcttcttcatcttcatcttcagccgtgtattctctctcttctatcacgaattcagcttcatctgccgcctctgcctcggcttcttcatcatcctcaggcgaaatcacaccgctcgttcgatccctcatcattgctgctgcggttgtcggctccttcatcgctcttgtccttgccttgggcttcgtacttcgacgacagcgccatcgccgaaagacctctggaacgcacgagatggacaatcattatggcagtaaatccagggatacatatgaagcggaggatgagagggaaaagtatggaatggctcgtggcggtaacggatatgcagccgaaggagttttcactcaggctatgggcaggcaccatagaccttcaagtcgacttggaggaagaagcgtagaggagaatcaaggaatcggttatccttcacaaggagatcatgttcatggaccattctacggaggaagtgaagtatcacttttccagcctccattaggagttgaccaaggccaagcatgggagaacagagtgagtatctcaggcgtcaaaagatcaaggatttttctgcgcgcatatcctgatcttcattttttcattgttgtccttgattgctttactggatcagccgttcaatccaatgtcgactcacgaataccaacctggagaatttcacccttcttcgcccgatctgcatcgtacttgttcgccccagcctcaggcatttaatcaacgccagcctgagaacccgtaccactcgtttcatccctctgcacctcaattctataccgcctatcaggctccaacagatgcgaccaccaccccatcagtcattgtcaccgcaccttacaagaacttcaacgatgctcaggcttctaacgtggcgctgatgtatcctcaagggtctgaggcgccagcctatcaagaatcagttgatcctatgagcaagccggcagagaaaacaaaattccctatgcggtcaatgcagggggagagcgaagaagaaacattggctcttcaacctggtgggccgtattcttctaaaggaatcaagatgagagtggttagagggttcgcagcctcgcttgaagatgagcttcatgttgtacccttcacagatctgaatcttcatcagacctatgatgatggatggtgcttagcttctacggcgaccggagaacaaggcatggtcccccgggactgcctctccctccctgacgtcctccacggatcgaccaatcgccgaacggtctcacccacactcccaactgccacttcttcattcccctctccatctatgaaattcgctactttggcacatgacgagccgtccgccccacgagcgcttcctcatattccgattggcagatcaatggcgtggactccaaccgcaaagacagcaacttcatcgcctgaagcacctcagctggctgatcttgagttttctggtaggctgatgatggatgacataggaagtagcgggaatactttctctgaagacaaggcgactcccttgcctctatctttttctgcgcgagccgctcgacggagttctctggtagactcagcttcgatgcgcgctagacacgagtgagggagagatgtactatattatatgatgcgttgagaaaagagacgcgtcgcgttgggtttgaataattccttcttgttttttatagagctcgtcgtccatattcgagtcgtagtttgatgttataacaagggggaaagctggacggaccacaggaattaggacacaaggaaaaaggaaagtgggaaatgagaacaggatcaatagattgcaggcggctaggacaaattcacaaaacgaggagatatacaaggagggtggacagtggcaaacttgttctatgagccgttaggatcttggtggtttgtagttggaggacacccaagaccaaaaggtcatgtatcgactaccatcggttagggttactcttacccggcttaacggtagcgattgacgtaatgcagcaactgaggtgtgttcgtgcgtggtgcacatctactttatctcttccaccaagagagctctgatctttctctgttcttgtatcaaactttagacaaagccatggtagagataaacatatcctctcaatcagatcccacaacatgcacggacggtccttcaaagttactctattcgaaatcgaaagtctatgtccatccgtcatcatactcaaaagataacgttcccggttttgttgccatcgttcagcaggatgtgaggttctccatcgactttgcttttgcccatactttctcacacattcttcatctttctatgattcgcattctttgctgtatatcagaatcctcaaaagacgctattaagttggattccagagagtctggctagatctaggagggactacgatgcgtttgttagggcggaacaccaggatggatgtcagccgagcattgccgaggaaaatggtatgatgtccgtactgcctcctttccaatattaaagttctggtgatattgatgcttctgtgtatgcttgaatagattgggttttattacagcctgtacccgagcgaggagagtcttatgcgttctcagtcccgctttctaccatctattcgatcattgtgtatccaccatctttgacaaagtggtatggatccctgaccattaagtaagtaatttcttgccatctgactaaagatttgtgtgtccttgtgtctgtgaacgaccattctgattcaatacgattcatttgtaatggaaaaatacaaagtgtaatcggcggacagacactacctacccttcactttcacgacgacgagtctccatcgacaatccatcagctatcctccagaggtcaaaacctacccgcagcaaagtggggcggtgaagatctattaaatagagttcggacgtatgctcatctattacgatccgttcttgaaccggatctgttcttggtgaatccaaatcgacaagatattgagattcactccactccaacgttttctgattcagccgtagacgacatcctttcaccacttccacctcaagcgtccggatccggatctgggcataacttgaacgaccgagtgacgtacccgccttcgagttcggtccattccccgcgaacgactctcctctccacattctcccaattgactcggtcaattacctccatctcgaaccaggtgctaactcaccccaacgttcatcctcacttgcctaaaccggtcaagtcactcatcacagctgaccaaccgcagttcacaagatggtctgatctgacgggcgtgggcgagtacgattctgcaaggatctacctggccaaatgggcgagattggtcgctgaggagggtgaacggagtagaaaggttgaggtggtttcgaagcatgaggctctgccaaacaagtcttcctcgtctgcctcgctctcaaccacggcttccgcatcagagcccggatcaagcgcagagacggagagtggatcgggcgagttgggtgtgtgggaagtcttgagggtaacaaaacgactgggattggagaacattgcgagtacaagaaaaccgggaaaacccataagaaagtctgagtgggacggttggtttgatggatgggagggaaaaccggtggtcgaggagagttggatgagagaggaagttttcaaacgggttcgtctcttattcttggtatatgtgtcccggaagacgacagtcgaactcttctgagagacgttttcacattcaaaagggaatcgaccctggctttagatcggtggtttggccgttcctattgggagtcatcccttggcagagcacagctgctgaacgtcaacagatctggaatcgaaaagcgtgtgtccttctctctgctttctcgtcttgttatggccttctctggatacatacattcacatgtacgcgagtactagttgatcaataatttgggttgaactatgacagggatatgtatcatgcacttcgaaagagtcaaacgctcgatcctgaagtccttgcccaaccggaggtgattgaagagattcaccgcattgaagtcgattgtagacggacggacagaaacgtagatatgttccttgcagagaagggtgaagttgactctgatggagaggatgcgggggagcaggggaagaacggttcgtcctttcttcaatatttagtggtgctcttatgtcatttctcgttcttgtttaggattctagtgttcaatggaaattctttttcttcacaattagataatgttcaaaagatggcagagatcctgctgacctacggattcttcgagaaagagctcggatacgttcaagggatgtctgatctttgtgcgccagtatatgtggttatgaaaggggatgaggtcggcacgttttggtgtttcgttgaatggatggaacgaatggtgtgtaccatcgctgtctcagttcgatcattcaactttcccctgataagactgatcatatctctgttctggttgaagaaacaaaactttctgagagaccaatcaggaatgaaacaacagctcttgacactccagcagttgatctctgttatggattccgagctatatggacatcttggtgagtctttcttggcagtcttataaggctaaagaaaaaaaaaccatccggaaaatagaaggactaagctgactgagttgggaaggtggctggtggaaaatgatgaaccatgtgacggacgtcaactgtaatatagagaagatggagtcgctgaatctgttcttttgtttccggtacgtatcttacttctcattttggcatcactcttgagtaccggtgaatgactatggtgacgctgacctcgatgtgatttgactggctaatagatggattctgatagcattcaagcgagagtttgcatttgatgacgtgattaggttatgggaagtcttgttcacgaaccactacagctcccaatttgttctgttcattgcgctcgccgtactccactctcatcgagacgtcattctccgatatctctccgaggtaaatccctcgtttacttttgtatcataaaccgataaggattttagagctgatgttgcgcgttacctcagtttgatgagattttaaagtactgtaacgaccttgggggttgcattgacgtagattcgactatagcccaggctgaggttctattcgtgagttctcttccgttttcttgaacatcctaatgatcaattattattgacctcagctaatgaaatgttgtatccggtcgaacggcaggtctcattcaaatctctcgtcgaagatgtggaccgaagacaggccctacgagaacctagatcaacggatcggcaaggaggtatacataggaggaagaaggtgaaccagtcggctcagccaatggaacaaaatccgcacgaggaagaccaatacggggatgatgattttgacatcccgacgttgcctgtgatctctgatgagctccgtgcgttattaagttaagatctgatgatgtagaatatccagatctcactagctatacgactctttttatatttccctcctaacacacgtcacggttttttttcttttacatgtttcctcttgtatctcgttccttactcttgatgattctcatgtaacattgcttatgatagcgatggtgaagactgtgtttgatcatccgtcggacgacacaggcgatgatgaacgaagcttatttggggtgccatcggggtcgacatgggtagatctggggaaatctgggcagactaccatctttgacggccccaaactgcgtgcttagttttcggccgacgagagaaaacataagaacgtgtcctaatgagtcagactaggaaagtgttgcgaatttctaatagaatgctccatcgagtcagactcttcaaaaattcatcggggaaaaagaattaaagaaccagtcaaacgtttttttttcattctttttttcgcttcttccttcatcccattgcctcgtcttcttctgttcgtttcatcctcgagcttattcgcttatcaaaaagaagagaccactctcttggccttcgtcgtgctctctttccatctgtttcttttgattcagaaccacactctctaccaacatacactcgcctagctttctatcatgcttcgaacatctacccggctcctcaactcgagttctaggtcggccctccccgccaccgccaccgctctcgcctcttcttcatcttcttctctggcattctctaaacgagccaactcgtctctcccgccgtcaaaatccttgtacgcaatttcgccagagtcgaaatctaggattgctgcccagtctcgattaatcagctcaacgacctccaccagcgccgctgccgctatgtaagtagtgactttgtgatctttcctcttcgctccattctttgtgcctctgtatcagtatgtcgtagagaacggatctatactacgcggcatctagtggcgtagagcttcttttcctttttcaaaagggcagctctgcccactgattctatctctcgaactgagcaggtccgtatatagcggctaagaggaacttataatttccggcggtcggacggcgactgttccaataccttttttctttcaccgcttctcgttgcctcttactttcccctttgttctcgcttaaatccacctccaatgactcgtttacagaattgagcattggacacaaagactgaccgtcttgttttgtgtcatccgatagtcgaccggcgccgtcgccaaatttccaacagtcaaaggttgagacccccgctaactcaagacatagtaatgccgagtgggactacaggtgagtcatatttgtttggatctatctcgattccagactcagtcaactcggattctccaactaagcttcaacttgaatcttgaattttctagctttgttggaaagtctggaggagagattttccacgagatgatggtccgacatgatgtcactagcatctttggataccctggtgtgagtcattggtctataattttatctttttactcctgacacgtgcaaagtgcctgaaactaaatattccgaccacctattcccttgacatccaacccttctagggagctattcttccagtctttgatgccatctacgactctgatcagttcaactttatccttccccggcacgagcagggtgccggacacatggccgagggttatgcccgggcttccggtaagcctggtatctgcttggtcacctctggacctggagccaccaacgttatcactcctatgcaggacgccatgagcgatggtattcctatggttgtcttttgcggacaggtcgccacctccgctattgggtccgacgccttccaggaggctgatattgttggaatctcccgatcgtgcacaaagtggaatgtcatggttaaggacatttcagagcttccccgacgaatcaacgaggccttcaagattgctacttctggtcgacccggtcccgttttagtggatcttcccaaggatgttaccgccggtatccttcagaaccctatcttgatcagctccatcacccccgggtcgtctccttacttgcccactacaccagccatcccgaacgcttccgacgaggctctcatcgcccaggctgccgagctcatcaaccaggccaaaaagcctgttgtatactgtggaaacggtgtgctctcctctcccgagggaccccgattgctcgagttgttgagcaagaacggaaacatcccggtctgcaccactctccagggtcttggagcattcgatgagaagatcgaggaccgggccttgcacatgttgggcatgcacggaagtgcttacgccaacttggctatgcaggaggccgacgtgatcattgctttgggtgcccggttcgatgatcgagtcaccggaaaggtcgacacttttgcacccgccgcccgagcggcctccctgacgggcaagggtggaatcattcactttgagatccagccaaagaacgtcaacaaggttgttcaggcaactattcccgtcctgggagacgttgtcaccaacatggcttcccttgttcccaagatcaagtacagcccgcgaaagcagtggttccagcagattaaggagtggaagaacaagtacccgttcgtatacgagcccagcaaggacggagccaagatgaagccccaggaggtcatcgaggagctcgaccgagtggctgaggagatgggtaaggagaacgtcatcgtttccactggtgtcggtcagcatcagatgtgggcctgccagcactaccgatggaggcacccccgaacttggatctcttccggaggtctcggaaccatgggttacggtgtgcccgccgccatcggagccaaggtggcctctcccgaaaagatcgtggtcgacatcgatggagattcatccgtttgcatgaccgccatggaactccagacggcttcggcatacaacatcggtatcaagctcttgttgatcaacaacgagttccaaggaatggttcagcagtggcaggatctgttctacaagcagcgatactcccacactaagatgcacaaccctgatttccagatgcttgccgcctcgatgggttgcaagaccttgaagtgctccaggaaggaagatctgccccgactgatgaaggagttcatggagtacgacaatagtcgacccatccttttggagtgtgaggtcgccgacaacgagcacgttttccctatggtcgccgccggaaaggctctccacgagcagatcgtccaccctctgctccgagaggccacagagactcctgctccttcatctgcctaaagaaagacggttcaggcctcttggatcatcttgacttctctgcttcccctcgttcatgatctttcaatcttcgttcttccgttcctctgccatttctttattcccacttctcgttttggttcttgctcgttgttgtcttaacatcccatattttttcatcacgcttttaaaaaaggagaaaaaaattatcgtttgcttctgtcatttgtatcatcgctatcctttcttttgaatacttttttctctctcgactgtccatactgaaaaaccaataatcgtgcatgattgattcgctcaacgcacaggcagctttctgaatgacttactcatgtttctagtaagaaaaagtcattgttccagtggtaacagctaacctgttatagaggcagagaacgatagagatacacggccttccttgtgatcctcccggaaaacaaaagaggaagcgagtttcacacttgatcaatcaaccaacaaagaagcaaaagaacaatgaaatcaagaatctaatcaaagaaaattgatgagcgattcaagatctctatgtggattctgagaagatggttgctcttctctccgtactgacatctgtaaccacgctctgccattaccatcagctcggagtaaaagacaaaaggaatctatagatcatctattgataaacacgcattctcacacaagcactaccatctatccgttgacccttctctcttcgatttcctatactcgacctaggttagagaccaaggaaaagggagagagtagttcgggagggaaagaagaagacgaagacgataatgcccgttactcgatcgacatcgtacgttcctataaggtcgggttcgaacttgacgtcacctacgacaatgaacaatagcatcgtcgggaatcatagtcaacctcaacctcagcaccatcagtatcaacagcaatatcaaaaccaaaatcagaaacagcagcagtcgagtaccacgcccacctcaccagatttcttgacccctacttcttcagtatcatcttcatcctccccttcagcttcttcccctttcagacggacatacgccaaccagccaccgctgcccacaacatcgacggccgctcgatcaactgccgtcgttccgatctcctcgactgtctctgtgcttcagtggaaagaaccagagatagctgatttcctccattcgatcaaatgtggccatctcatcagaacgttcgaggcacacgatatcactggatctgtaatcctcgagttggtcgatgtcgctctacttaaagaaatgggcatagacagagtaggtgatagagtcagattgattaatggtctcaaggctttgaaagcttcatcagtagcagcagcagcagcgacagcaggaggtacggcaaggtcgagcaggcaaggaagtgctgatggtggttcgtcagcaggcgcaggccaagaaacgtatagagcagggccgagagtgattgtcactcgcggagagggactttcggtttatggtcgaagtgagttttgttctcttatggtcattgatgtgaacagtgtggaacgttgagcgctgacattgaggatcgtgaatcgaaaagcctctcctgcgttttctcctactcctcttattcctccccctccccctccttttcattctcccagttacgtccaccatcaatcaggcgcggcacagacttacgctctacttggaagacgaccggctccattagatattgctcctctgggacagcacgtaacggatcctcgaaatgctcaggctcatcaatattcacctgatgtgcgtgatagcatatatcatttgcttttttgtcgatcaagctaacttcatcggttgacatatcatatatgtactggagcaggcttctcatgtttcgtcagcatctcaacaagtctcgagaatatattcgaaagaatctttcctacattctccggcttcgcagatgaattcaagtcgattaccccaatcactggtggcacctcccgatgccctgccaatagcatcatcacaacaacagctgttaccggcgccgcctctttgtccacagccttcggcgttctctgttttgacatctgaaccatcgtcgacgtcgatagtcggccaccttgatggaaactcccgggcgatcgcttcaagtctttccggaggctcgttcaccgaacgaagagctcatctcgctcgagagcgccaaacagacttggtggccacgtctgcatcaccatcttctccatattcttcctcagcatcgtcatccaaccgaccaaacttccccagccatccgaatgagaagcaaccgacagggaacagaggtctcaacggtcgatccgtccccttcggtggtggatcatcgcatccgttcgctaccacgccagctacgccttcctcaccgacgtacccgcctttgtcttcttctaatcctcctcaccctcatactgcaatgtcgacgtcaggttcagtagctggttcaatcagccagacaggccgtgctacctctcctctgcttcattcttcaggctcagcttcaggcaccggctcaacgttgttggtccctggaaagtcattttccggatcagccccggtggcgctagaagacctacgacagaagtgtttcaagtttactaatgcagaggatggagggaccagggtcgtcaatcttggaggtctgactgatgggatggaagtcatggagaaggcgctgagaaagttcggaaagtggagagatggaggcgcaaagggtgtgaaaggtgtggagtatctggagattagcgatgaaggcgagacggagagagagatggacgagtggagggcagttgggcccggaggcggaaaggaagagaacgggttggtggtcgatggttgggggatcttcttgaaagactatggaggggaggtcgacacctgtacgcttctttcaatcttcgtcatcttttcttcaacttctgatttcaagttttatagacagaaaattgacatgtttttgtg

SEQ ID NO: 1791 - DNA, 5819 bp, Xanthophyllomyces dendrorhous
tttttgtggcccatttggcagctaaaccgcttacagcaaaggaacttgttcaagtctgtcaggttccatttgattcgccgacccgtcaaagtgggttgattcttaagaggattcggaagcttcataaccggaaagcgatggaggccttctttggcgagacaccaccagtgccagagtctcctacattacaaatccatcaaaccaacaaacacgcccgccatccagtcgaccataaggacggctctgccttctattctggaagttctggttccggattaaccagatcaagttctaagaagatgaacagggctagcactatcagcgtgatgagtgggctaggagttccgttaggtcctcaaaccagatcctctgtagtagttcctcatagagaacctccacagaggacagcggtctcgccagcaacagctgactcgacaacgacatcgaccgagcagagtacttcaactgcgccagcggtgaaatcgccttctaccacttcgttcttgggaaatagaggccggaagatgtacaactttttcggacaccgaccgccttccgaattgatctcaaatcacctcgcggattatttccccaaggttcagaaaaaagtgctggaacgaacagctagaaattcgatgatgagaattgcatccggtccacctggttcatcggcatctggaactccattctctgagggaggagcaggaggtcctccaagattgagctgggaggaagcaaggtcgaaggacccaagagcttctggtctaggctatggaagcttacctcgagagagacgagtcagtcattcagggaaatcagtcaggtcgttcattacgacatcctccaaaggcggtatgataccttcggaggatgttcctgaagaacttcctactacttccacccccgaatcttatataaccagagacgagagctttgatgtgccgagactgtcgatctcgacagacggttcggtttctgaacgagcctcgatgatctccatgccaccttacctccctgattttataccctctggcgaatctttttcggactccttagcagtatactcgccttcgttcggtagtttctccttcgactctagccctgttggcgtcggcgctaagggtagaaagtcctctttcgattcgtcaagtcgaatgagtctcttatcccaattcagaaagaaaagagacatgtcggataccgcttcgatgaggacagtagacgagatcacggcccatgtggagagtaaaagagcaagcacaatatctgactcctggattgtttccggtgacggaaggagttcttcaggagatgagcaagaggatgaggatgaggaagagcatgtggtggatgagcaggaggatgagagaggtgatttgatgagaggatttaggaggacgagggactcagattctgtcaaattttccagaagctttgcaaaaagatcatcgtcgtacagagggaaagaacacgagttttctgcgggtgtggacaacggggatgagagtgagctgggagaagaagagaatgaacgagaagttagcgacgaggagtataccgagggtgaatcggatggtgaggagtatgatgacgaggaagatgaagaagaggaggaaaaggaaaacattgcttcagtagaagatgagcatggaaaggcatttatgtctgaaggaagtaagtcatacttcatttgttttgactcagtcttgaccgtttagcatttgctattgatcctaatctgctcccctttcttatcttacttccttctagataaacggtcattcaaatggatcaaaggcgcgcttattggatctggatccttcggctcagtgtttctcggcatggccgcctcaaccggtctactgatggctgtcaaacaagtagatattccgactggtcaatcggcgaatgaggaaaagaaaaagttgatgttgagcgctctagagacggagattgagttgcttaaagaactacagcatgacaatatcgttcagtatctaggtacgatttctgattatcatctcgagggtctgtgccattctggaagaaaaacgcttatcaaaatgcgacatgttttcgtctttctgatagattcctcgatggacgccgcccacttgaatattttcctcgaatatgtgcccggtggatccgttaccgctctcctcggaaattatggtgcttttgaggaagctcttgtgaggatcttcgttcgacagactctgcagggacttgtgtacttgcatgagaaaggaatcattcatagggatatcaaaggagcgaacatcctggtggacaacaaaggaggcatcaagatttctgattttggaatttcgaagcgtgtagagacaggtgagtgtctcctattcaattcaattcatattcaaaacattaccttgttcaacttctctcatataacttactctcgttcggttgtttgcgtaccgtagatctcttgactggagtcaatcaacgcagatcccttcagggaacagtgttttgttagtcctttccatctttgaattaccggttttcaaattctttttgctcattatcattcctcgattcaacgccaaccaaacaaagggatggcaccagaagtagttaggcagaccgcccatacaccgaaagccgacatctggtctgtaggttgtcttgtcgtagagatgctcacaggccaaagaccgtggggtcatctggatcagatgcaggtcatgttcaaggcaagtctgcctctcttctcttctcctttctgcctttcctatgttcttcaatatactcaacatacatatctatcttcgcatctttgactgtattcggttgggtccacagattggaggttcggctcgaccagaatatccgccggatataacgtctgaggctgaggatttcctcaacaagacattcatctttgattacaacgatcgactatctgcctctgactgccttgtccatcctttcatcgttgagtctttggaataagtgattgggttgtgtctggaaaaggtttgatctcactagtctgatatataaatatgtggttgaactatatggcaaggtatggtaagagcagtgtgcagggtaattgagatcatgaacaaagtgtggaaatcaaatttatgaaaagggtagccacgagaagatacgacttgaatgcacaatgaaagtccgcaaagtcaaaattattctacacagagaaaagatcatgacaacagctacaaaatgaaggtccttagttcaaggaaagaatatagataaggaatgaggcataatgaaggtgtctccgttaaagttgaatggtgcctttgatctgagaatcgtcaaacgagtctttggcgactataacgctgacgagcgcgccttgtggttgagtccatcgctatcaacccacaatatgcatcaagtcagaaactaaccccacgcctgttcaaaagaatatatagaagaggaacttgcctgtttagtaacgtcccagtacgatagatcgtacaaagaaagaggaatcgtaacctgatcgagtatatgatgaaaatttagatctggttcatacagccttcatcaaggtaaagaatatattcgctactcacattctgggtatgaccagccttaacccatactttctcgaagcctttcagtattttaggctgatgataaaaagtgtgcttacaaaccatcaatatcgtgtccgcaaagaaatataacgctctctactattatctttgcacgcgaagaagaaaagatactgactggctctcctacccaatcggggaatgcaagatatacttgtgggatctaacgaacacgtgatatgaaaaggatattagcagtcgaatttcatagaaaagacttctttgaaaagacctacgtcatgtccattgacctctccgctattcgtgatgtcaaactcgacgttccatcgaggtttgtgcagactgtaggggaaaaaggttatggatatcaacttatgattcgaactgtgattcttgtattgatcatagagcatgagagtaacgaacgagttccagagtgatctaccagtctttccaaccgaagtgacattcctctcaccagcagatgtagttgcacacccagctgcagtgactgtcttagtgacgtagattgtctcctgtgctccatgccgagccttgacgtgtgtggcatcctgtcggtacatgttttgctcggcgatatcctctttagtgggagaaagacttgtgatctgcaagttagagtaggagaattcggtgtaggagagtccgtacccgaagggatatctcggtgtgatgcctttagccaagaagtgccggtagtcaatctcgagggcctcgacgtaatctttggaaggcgagatcagaaaacgttgtttgtcagtgtgtgtccgtagccaaaagaatctcgcgcaaagctatataccaatttgaggagtgacgccagaagggtagaaaggaatctgaacaaaccacaatctcaactgggatcaataaaggtgagagttgctattgtcgatgaggagagacttactaatgttgggtagtcggcttccttcttagcaatagtaaaaggtaaccttccactgggattcactctgtgcgtaaaatgaagatgtcagcagttggagttaaccactataagaaagactgtgcgcttactttccgtagatgatgtcaaccagagagtttccagcttgttctccaggaagaccagcatatacaacagccgtgatgttctcatgctgtatatatcaaaatatcatcagacaccgatgcgtgaccgatatcttagattatatgacaactcacatcaatccagggttctaacatgattggcccaaccgagtgaatgatgacgattgtgttctaaagttgaaagatggtagcatatgtaaatgaaatcgcaaggggcctgaaacacctaagaagtatgtacgtacgttgttttgagcagcaactgccaaaacaagctcgtctccgttcatccacgcggttaggttgttcctgtatacaataacggtgagtggcgaacatacaacaagctgactcaatgatagaagatgactactcaccgatctccctcatttccatcgacaacaatataaccttcaccagaatccgaattgataaactgatattgaaaaaatagatcaatgcaaccaacatgtcttagccaaacaaggaaaccatagaatatcagaatagactgctggaacttacaaccagggccacatcattgtaggccgcagttgctgcagctgcttcggtgttaaagttatcgagataccagttgatgatttggttttcttcaacagctttagcttgaatggcctcaagtggcttgaagatgaagcagtacatcatcagaaaacttagataactcatccaatgaaatgtgatcgacttactgagataaggtatgggaaattagccgttccggatccccagccgatagctagaataccatctaggcaagaatgatagaaatgaaaagccgttaattcacatcacttatgccagatagttcaactctaaatacgtaccatcgccacctcgatcagcgtacccatttgcacctatgcttgagggtccagcatcgtttccaatcacagcgatggtctttgtgcggttggtcaacggaagcgcaccatttacattcttcaacagtatagttgaagccgcgccaatttctcggatcagtctggagtagagaggggtggataagttcagcctaaatacagcacaagaacgggaaaaaccttataatttcttctttgatataaagcttgatacgaactctgcgtgttttccattctttcggacatccacatg

SEQ ID NO: 1792 - DNA, 9529 bp, Xanthophyllomyces dendrorhous
atattgttagtatctgagcgagacaaaataaatgaatgacataagttggtagacaaaatttagtatcttggagcacaatcatacgctaaaaagcaggaaggtctcactgaagtttactgcagggtaatctgggtcatcttgctccaccaaatagtacccggcaagaattctgacagccatgtcctaccaagataaaagaaatcatatgagtacgaatgagtatcgaaatacagtcggtagaacatgcttacattcaccctagctcgtggaatcgttccgttattgactgcgtcagtaagattctgaccgaagtatgacactccgctgttgaagacggtatctcctggcactgtgtcgaggattacggcatttgtatcagcaagccagtctctcatgattgttcggatgtggctatgatggacttactagtcatatctagcccactttcaatggcggcaactccctagttgatatagtgtaaagaaattcaaaagatgaccctagtcggattgtcaacagaatagacttacgctttcagtggcctgccaatcactaaggacgtagccttggaatcccaattcatgcttcagaagatcgttcataaccttagagttctgacacgcccaagattgattgacttggttgtaggagcacatgactgaagccacatccgcctggacactctttaggaaggggtgctatataacaccaaattaatcatagaacaactggtacatgagcgcgactcggcacaaaaaacaatgtctcttcgattttgattgatggatacctacaagataaatctcgtgcatagtacgatcatcgatattactggaagaagtcgtccggttgtgttcttgctcgctatatcaatgaataccaggacgagaatgaacaacaggaggatgcgatatttaagaggtcaacagagccttactttccaataagatgtttcgcacaagcttgaacacctttgcctttggtctgtagccctttgattgtctcgtaagcagcttctccagccaagaaagggtctcctccgaacgctatgttgcagatatattcaacagaaaattagcttgactaaattagctatttgcctaatccgaagagatgagcaactagtcttaccttcccagtttcgtcctccctgattcgtgcgatcgcaacgcgagaaagagcgcgtatgtcaaacttgaattcgtttcgttacttttcgaagactaccaaggagaatcacatacctgagcgtttcgagccatgttcataccagggcccagagcaatgttgactccctttcctctgaattcttcgccaagggcaagacccctctgccgcatcaattttcgatcaaacgtggatgcagaattgattccagcagggaacacagagactcgatcggcaaaacgaacaccggtaggctagttggacatagacatgaaaatgaacagttaagcatgtcaatgtctctcagaattcggactaggtttttcagtcaataacacctactgagtcttggaggcataggccatcaaagcctacatcgggttgagcgccaatgttaccgacgcactgtccaacctgccaacctgagacatcagattctactaatcagtcccgacaggtgattttgaaaagtatggcagcagggagctcacctagtcctgtagtgatattgacaacttgctcgagcgtccatgtgctgattcttgcccgagcttttgcaaccgcatctgcccaggccccctccccccgagtctcttcagttgcatactgaggagagaatgagtagggtccagagagtgtcagcgtggtgtattccgaagaggcggtaggcaaaaccagaagaggatcggcagagctagtaggggttgacgaagagctagcagaactcgagggggaagcggcgtatgagctggcatcataagagctcggggcggctgatccggttggaagcgaggtgccggtttgtgaagcggtcgcggactcgttaccgtaaggtttgacagcagacgaagccgttgaggtcgtgttgtcgaccggtactgcttctgagggaatcagagatgtgagaaaaatgagagctggggccaaagttcggatcagcattttgggtcaacctgaatgagggtgtattatccacagaagtatctgagaataatgagagtctagcaagctatagctgaaaaggtttcacaggctcgaagacagaagacaagatataaagaagaagtgaagacacgaaggaatgtcgattgtgagcaggtcgaagaaagaagaataacaagcttcggagagtatctatatatgcgtttcctgaaatcttcttggcgaggattcctatattcaataacaggttagtatgtatgtacatatgtgcatgcttgtcagttcctttgttgttaggttaatccgaacagatgtgatgggaagaggggagaaggtccattgacaacaagtcgtcattcagaatgagcacaagatcaccaaccaatgatccccattcttcccaatctctgaacatctctcttccatcgtcgtctcgcttcgattagtgtttaggcaatatgacaaccaagccgaaccgaaccttcgttagcacgattttgagttcggctgactagaatggagcttttgctgaaacttggatttgcgcaaacaaaaagccacccgggccgagtatggtgtatcgggcattacccatgcaattcactttgcccatgttcatttgtgtatgtatacatacatctggcctacatacatctggtccacatccacctacattcgaactggtcactatcctcgtcttcaaggaagctataagagagttgtatatagatgttgatcaatcgcgtagcaccacacgaaccgaccaccgcaagtgatcgacatcgtacgcccttcgtttcgctcgtgacccctgccggcgggatttcctcggatacactgaattcttttctccggtctatagcaaaccccatctctctaacggtgactaaactgaaccaagtcgatcacacgggtctacaggaacattgtcttgaagttaatcgtaaaaaaattcttttgttttcactcaacgcagacgacatttagaaagaacatttatataacggttgactttgaacgccactcttaggcatcagtcggatgtgtatgaatagagaacgaagaggcgagggtggtcagtatggaaaaagtaaagacgtcaacaatcattcttttcgaacggccaccaacacgcagtgcagtctatgatccagacggaaaaaaaagtccaatgcaggtcatcagttaagagtaagagagctactgtttttttttggtagacagtcagatatgaatgcgtaccctcctgccgtagcatcaatgactttgaagtcgttcaagacctggttgttacaacaaggcgtgtcctctcaagggcgatcagtatacaaatcaagattttcaggcgggaagcgtatgaaaacaaggatctacacgtaccttgcttcgaactcgagctggcacaggggcggtttctacatcaggtccaagtccaagttggcactggtctaaaagtttttttttgttgatagagggaaggaagggcgattcagtgaatcagttttgttgatacatgcagttactgtagcgagaaacagagaaaacttacttccgtatccccacgcatagacatttccgtctctggagacggctaggttgtgttgagtaccagcggagatggcaatcatagggtgcgcagaatactcttcggccgagctcgggtagggagagaaagcaggggcaggatctgactcagtcggaggaggagggaagaacagctatcgaggaagaagtacccaagtcaaattcattgatgaaaataaatcgataagcgcgttagacaatctacttcggagacacgcatttcagtaaacttacctggacaggctccgggatgtattcgtcgacagcaggaggagcagccagcaacgcatattcgtctccctcatcgacagccgctgcagccttggcctttctctcctccatgatctgctccagctgttccttcttcctctcctccaattctttcgcagccggatgttccggtcccaaacctaattgtgaaccatcagttcttccacagccccagacctcaccgttgtcgaacaagaagattgtgtgatgctctcctccactgatgctcacgactttgcttccaccatgcagttcgggatcgagcgcatccaccagtgtaggagtctggatgatctcttcggctccgcccctgttctccgaaaccccggtctgtctcaacgagttcaaaccccaagcatagacctgaccgtgcttgttgacggcaaacgaatggtaagaaccagcgccaatatgaacaatgtctctcagagcgagtctctcgggagagagtccgttgatctttcgcctttcgatgatccgtcgacccagctggttctgttgaccgttaccccagacgtagacgagaccgtcgatagttagggccaatacatgatccgttccgcaagctacggaggaaaatcggaggttcgaaattgccgggagtgggatcgggtcaaactgaatcttggatgagccaggcacaccgtcaaacccaagcaaaccctcgcctgactataaaccacaatcccaaaagacgaccgatatgtgtaagcaaaccagctattttccagatctttcttacaagtaagacgtactcggaaagatccccacgctcggacatctccctcctgaccgactacaacggaaacactgtctccagcagcagccttgacagctcggaattttgcctcaacaagcttggtaaccgtcattggttctgtctcgaggacctcggtgtcgatgatctctcccgggttttcagggtcctcaacaccagcagtgactcgaccgagagaggcgttatcattgacaccccaggaccagacctagcgaaagaatgaggaagaagcgtgtcgttgagctttcatcatgatttcggccagcaatatggaacacaaaaagtgttgatactgaccttgccctcggcgtcgatgacgagcgtgtgcataccgcccgcaacagcctcctcgattccttttccaactcctccaaacttcccttcctttattccagcctcgaaccctttttgtaacaaacgtgatataaaaggaacaaacgtaataatcagcaaaaaaaagtttagttgttgccacaggaagaacaagggaagatacaggcttacacgtatgcaaccggggtcgagtgatctctcccaactcttcggtacccaaacccagcgcgcccatatcgccagtaccaaagataaacacagtccgggccgggccgttagacactatcccatgatgagagtaaatcgagcaaatcgagcaaatgtcgcgtgttgatttagcttggcgtagacgaagaaatcctggatgaaaggatccgccacattatcctcccgagaggcagagacgagattcggttccgtaggaaggagaaaaaagacgcgactgacggggaggttgaggaatctcattcacgaccacctttactttctttgcagctccaccaacggacggtcggccaacagatcgtcggggagcaggagctttgctcacagatgatgctctctttctcttcaggccagccgttccattactagtagtgacagtagcggttccgttcgtctccgtctttttaggtgattcactcatgtcagcatcggatggggcttctttaccaaccttagaggcaggcttggtcttgatggtctttttgacgggagtagcaggcttgggagcgacagagagtcgtttggaaatacgagacgaaggaggcttgctgtcttctaaggaacgcgttttaaataccaagtcaaaggaaaaggaatgacactcgatgaacaccatctaagtggatttcaaagaagaaaggaaggaggactgacttttaggaggcatgttgaagatggatggattgtcaaagtgaaagataaaggaagaggatgagtaaatggaggtaagacctatggctcatcagactctatcacctgtacataaattcctctgcttccccatatgtaacggtcaatttttcctctgaatcttagtttttattgtaaacaactattctatcatctcacatgtctgaccagccaaaaacgtttttacagccgtcaaaagatgaacgagttcgttcggcaacataatattatcccaaccatatcgtgaaacaaggttttaaaaattgatgaaaatttgtggtgatgcaacaatcaaaagggtatcaattactaagacaactaagaagcaccacgggtgtcataaaagtaattatatagaaaaggagaagtcaaatggttgaacgaaacattcaacgaaaagttcaatgaagaaaaggcacaaagtcttgatgaaggtatcaatattgccgtcgtggttgacataaaaaggagagctcattccgtgcctcagaattctatcatcatggaaggtgaagtgtatgcgcctgtgacatagtttgtagcgaattgacggtagacaataaacggacaattaacgatcaggaaggtagaagacttgagtattagagatctaaggtgtccagatctagaaccaaaccaaagaggatcagcacttatgtctctaagccgtcagcccgaataagcgctgaaagaggatcactttaccttgaccgtctgatcaactgaaccagtcgctatcacgttcaccaaccgatcgctcccagctgcttcggatgcacctttgccatctcccccagcagcagccccagatacgaccgttcttccccaagccatacatgtcacaaaatggccatgcgcatctaatgactttgtacaacgtccggtttgaagatcccatatccgaatggtcttgtcgtccgacgcagagaagaggaatttgccgttagggtgaaaggcgagcgcgcggacccagttctcatggcccacctacccatgtatcatcacagttggaatcaagaatcagtaggcttatttcgaatgatatacggggatgcatatcttaccaatgttcgtaagcattgccccgttgtggtgtcccagattttgatggttttgtcccttgagccagtagcgacaaatcctccagaagcttttgctcggtcgtcttttgaattattctgtttctaataagatgaaatacaccgttgagccgaggttcactgctcaatgtcatcttttagtaagaaaaaatctgacttttattccacccagctcctgaatggcggcatatgatctaacaggagcaaacacagctacctctaccacatgttcatgtccacgaagctccatcttagtatcccctgacaatgaatcccatatccttgcagtctgagaggatagaagaaaatgacatactcaatatgacacgtttatgaaaattataaaaaatatcaactgagatgaaacatagttggacatacctgatcgttcgaacagctgacgagcagatttccttgatctgctggaacgacgtaacgaacccattcagaatgcccattgagagtctttacgcaaaatctgagaaatatgacggatcgcaagccattagcacactgtccatgtcatattcgagatagtctacagagagaattattagcctaccctgttgcaacctcccaaactttgatcgtacgatcacgactcgcgctgacgatgaaatctcccgaaggtagaaatcgagagcttgagacagaatgatcgtgaccatagagggtcttgacgtttttgtattcattttgagtatcccaaagttttatagtaagatccgaagagcatgtcactatatgcatgaggatgaaactaaattagctacttgtcaagaccaaaaatttcgggaacggaggctgaagatttacccaaatagtttcctttcgggtcgaagtctacatcttgaatagcttttgtatgacccttaagggttcgttcaaaatcacctgtctcccaatcccagatcttgatgcttgaatcttcactagctgtcgctagtacactgtatatcggatggaatgcaacccgggtgattggcaaccgatgtccggccaaaacgtgcctggctggtgttcgtgggatccagtctacttgtgatgctgatcgacgagatgaaggggccgaagagagctcttctaacaaggaagcatttcgattctcaagatccatgatttttttctgcaatcggatcacagacgtccatttcttctcgagtaacccagcgtgttttgacttagaatccgggacaaagtcctgctgactggtttctgctcggaaagcatcgtacgaagacgttaggccagaattatagagatagtcaagaatggacttgtggctttttttgaattccaggttgtccgaacatgtcgtccgaagtggagagataaacaacgatgatagggtagccaaaagaagatctaggcgtttgtttaattcaagagaccggaacatagacaagtgaatagacgtacagctcatccttctgcctctcgcttaatatgcttgtcatgaggcgattagacttatcaagcgccgctcaattgatccaaacaaacgatttcaagttgttgtagtagagtgacaccttcagagatgggtgaagaactctcaacatcggctgtcagaggcagtctcatcactagctgtcccttccggagatataacataataactatatggcattggttactggaaggtaaccgtaattattggtggtcgatgcatggctcttctgcactaggatgccttccggctgcaaaccaccaagatcttatggctcatgggttcagtctttccccatcgatggggcagcgacggcgtcagcttcagcttcggcagccggagcagcagcagcagctgcttcagacaccaacatcactgatggtgcagaagattatcctcgtcaccccgacttctttgtatcttatcagctgtagagatcgatgcctggttttttgcattcaaacctatttgatcggtttgagtaatcgtcggtcacgatgaacaacgtcgtggaggctctacattccacagacagagatcattaggtagagatcatcagatagagaggcaaatctatagagagataaatggacggtgtggcagagtcggcatactcataaaggagatgatatgttcgatcaagccatgtgcagatgataaagcaatagcattgtgtcaggaacttgatctgagtgttacaccccggtaaccttcttcttctgtcgcttgtcctgctgttattccttatgctctcttgatacatcgacatacagaattatgatcttccagcgcaagcgcttctagcaccttctgtgatcatcttcttatgcttaaccgttggagttcgagaaggatgcacaagacaagcctcctttgacacccgtagcatagtctccagaacatggatcctttgttgctccctagtactatcgtcccctgtgtgatatcgatcttggcctttcaatctccccaccttgcgcccttgtgact

SEQ ID NO: 1793 - DNA, 10781 bp, Xanthophyllomyces dendrorhous
cttaaaaattagggagctctttgggatattctaatgatggagtcacacagacaacagttgattatatccagttcttctgaatgtagaccttcgcaactgattcttccaagctaattctctgatcctgaatctctggatcagaattagaactagagaatcagattcagagattcaggatcagagaattagcttggaagaatcagttgcgaaggtctacattcagaagaactggatataatcaactgttgtctgtgtgactccatcattagaatatcccaaagagctccctaatttttaagagtcacaaccactcaagcaagagagtctgaactccctccttgccagccacatttccctcctgattgcgaacttcgtatcctttccatttccctttgaacctggatcctaacacattgggtgcgtgagctgtgttagtaacggagaaggataagagacatgtgacccgcagtgggttacagaagtggctgcatgaagttcgagctctttggttgacatggtcgagaacagtggcacaaggaaacatgatgtatcgtaagacgatgattgagtcaccaagcttgatatagaagaacatacaacacactgtagcacacagaaactgaaagaggtttgagaatagattaccagaagagagagattggaaggaaatactgtgcttaacgaaaacgattgaaggtatggtaaggggacagaagttgtatgaaaatgatgataataatggataagtaaaaaaaaaaggatgcagcaccatgaaagacgacagatagaaaagactagatgtctaaaagacggagtttggagaggagatcatctacagacagtatttgccaaggaagcggtatgtcagatcttagtacacatataaaggatttgtagagaaaagatggcagaacgagagaacgaaccgatccgatatggcttgatgatcacttcatccattcccatttggagtgcctgttcaatctggccttgtctgttgagaatttacgtttgaaagcgagtgatcaactttagatatggtctttactagaataccagcagacaaacgaacagacctggcgtttccagtgagcgcatagacagtgtttcgctgggcaagctcgccagaggcttccatttctcgtatctttcggatagcagtcaactaaagatcaaaaacaggaatagaaatcagattccgatcgcaatcctgatagcgacagcgtgacgaggcactctacttacaccgtccatcacagctataagaggtcaaaatatcgatgtttagccatcttcgttaaaaagacagtagaagaagagtcttattggatgacacatacgcatctctaaatccatcaggataactgaatattggaagcccaaagctgcggcagccatgatgagatcaatccctatctgcccgttatcagccacatcggccatcaactgcgcctttacaagctgtcttcttaacactgctcaccaagtcgatcaagatagtcagaatcaaaaaactatgaagaatcatactgatcgagacatgaagacgtacccttttggttaatcaggttgtctacaagccaaaatcagattcaatcatcaatatatggtcagctgattacatctcttgcatgatacagccaggagtacacaaatataccttccacgatcaggacagtgctcattttgactgcaaaagggtcagacaagacgattgcaggactctcgatcggaggagttgttattgacgtcgacacgacggatagaatttccaaatctcgatctgttggagcagacattgggaccagcgcagctctgacataaaaccggaaagctaagaaatttcgaatgaggaaatagctaaagacgatatagttgtttacaggcgagaaagactcggttcggtacatactgctgccttgctcaggttcagacacgacctcgatctttccatccataagttcacatatgcgccggcagacatactgttcaattgagacccccaaaagaattatatgtgaagttttgtcaatcgaaggaaaaaaaagttgatagagaaaagacaacatatttcaacacaagtggaagacacataccaatcctagcccggacccgccaaagactgtaaaatgtttttatagaaatgaacatcttatgattatgtatcatctgtcagctccaggtcacagtttacagaagaaacttaccagcatgagtctgaggtgaggcttgtttgactgttgtttttgaaaacgaaggggtgcgacataagcaaagtttgccaaaggtctgttgatcagaatcatataaattcacatacatcgttgaaagagctgcgaaagctgttgcgctgtcaaaccaggtcctgtgtctgagactgaaaagtgatgtgcagaaaacaggagggtcagactgagaaattgaatgaagtgcaaggatcactacagacctgctccgtagatgtagatatctttatccaaggaactttgaaactcaaccgggcggatttcggccgtagggggtaagcatcggtcatcttgcggagcatcttttcgaacctcgatagacacagtaatttctttccgagtagacgtagcagtaaatctagcaaagagccaacatgagccactcgtagcaccgcggatattgaaagtacaaaaatcttctaatatacatacctgatagcattcgaaagcaaattcacaacaacctgactgagccgtcccggatctgcaaatatcctgttgttgtggagatacagccatcgacgatgagattgacaatatttcgagggagaggacatcacatttggcagaaaagtgatactttgtgaatccgagcttctgaagaccaagaagactttgcccaaattcgattgttagattgattcgcttcagacgacattcacttgcaaacgtggagacaatccgttttacttccttcatgagatccatctgaattgggaagatactgtaatggaaacaaaaagaagtcagactttctcgctgtcgttcccaatgattcgcatgggactgatttactcgaaggtcgacaattgtatacgagcaagctgtggatatatgtttgaaatcagcggttgaaaaatggttgtgttttacgttgaaatcacaaagattacttacacttaggacatcattagcaatcctttcttgggagagggccatagtatagatcgcatccagggcatctgatcacagaagccaagtttaaaaccagttcatatgacaacgcgcaaacgatgcataatgacagatactcacctatatcttcttcaagcatacagagcaaactcgacgtggggcgaagcccttcgcgggaattaaaagccttctgtaactcgccatgtaagactaggtgtacgaaagctaattagtcaaggtatgtacgctcaccacagtttgaccaagacttacaattcaggttttctctacatagcccagcgttctgaagaatggcagacacaggattacggatctcatgactggtcgaagatgtgtatgtcgaaggccaagattagcacgtcttccacaacaatctaatcatcgggaaaagatgtatacctggtgacatcgaccaaaagttcttgttgtcgtttttctacgtcgaaacagatctcggaggttaatatctaaataataagtaacacgtgtttttatgcgtagtaccaaacttcgatttgcttacgttcgattgcttcatttctactttgctcggcttcattcattctaacgtgcaattctagcgtgcgtctacaaaaaaaaaaaaaggagaagaacatcaacacaagatcaatttcttttgacagcgagaaaagctcactcggcaaattttctttcgagctcaatacgtcctataaggagaagaaaggacctgaattagtaacgtgcggctatgagcctggttacactcgaaccatgtacaaacgtttgcccatttgcatctgagacgaaaaattacgaaaaattgtcagcatcaaataatatttgtgagtcggagatataattgaacagacctgaaggtgagatcgagcgactgtaatgtgaaagcggagagttgaaagatcagaataacatcaagagggtttagaagaaaggaaaagcctgcatactgagaaccttagaactaaaaggtttagaaagatgatctaggaattgaacaagcaaatgaatacggatccaataggtcatctatcatttgtaggatatgcttaccctcagcgcccatcagtaacccgttcacgacatcttctgggcctgccttggcagtgactataaacatggatatcgatcagtattagaccgaacctggtataaaccggagacaggacaaagaaaatgagaactgactcaaaattactgggatcaaagcgacttcagagttcgtacctttaagtagttgaatcaggtcatatccatccgcatgaggcatcatgactgagcaaacgccaaaaagtatacgagatgagtccgatagacaggcactcgatttgggaatgtgaagtgatgaaacatactatcggagatgataagatcaggctgatggagacaagcgagattatacgcatcttgaccatccactgcctgtatgactctacagtattgggaaagaatagagaccaagtatgatctcatatcttggttgtcctgcaaattcgtaagtaaatatagattttcaatatggacaaaacatatctttgtaaacattatgtcaaggtaatcgagaggaggaagagactggaacaaccgaagaaggtcactcacatctacaatcaagatcaaatctttcttgctccaaaacaaagtggacggatccatcctactgaacgttgacgaactcgccgtaggcactgaggaacttggatcactttccgggatcgaggatgatccttgaccatgtaacgtgtccgagtctttaacagtcgaattaatagacgacgtgttctcgctcgaccatagagcagcttcttcaataattccatgagcgtggctattaccagttcgagtgctatccgtgacaacaacgccgtcttcaacaacgcgaccagcgggtagatgagagtttcctagagggattttgacaatgaatttcgaaccatgatcccctgtaggagactcatcgatagctgtagtagtgtcaagacatacgtaatatgaatctttatagtttccacgggttttgtgtcacgataacaaacgacgtgcaggatacgtactattcgagatgatatccagaacaccactgagagaacaaagatcagggataagtgagagtcagtctcgcctctgatgatcgtgcaacgggcgatgctagataactgacccatgcagtttgacaagttctgaagtcaatgataaacctatcccagttctattaaaagaatacaaagaaaatccttgatttcttcagacttgttcatttaagaaggatggcaatgtcagatgacaaacccctcaatagatcttccaattgacgcaaccctgtggaatcgctcgacgacatgaggtatattctcctctgtagcgacggaatcattcagaaagcaataaattggattattattcgacatatcagatcagacatagaatacaaattcttccttacggggaatcccaactcctgtatcctctactccaaattcgattgagttggtgtgatattgaagatacacccggatttgtcctttgagacagtatttgaaagcgttggaaatcaagttaaaacaaatctagagaaaggagataaagattaggtattaatgaccgccttgatgacagtagatagatggttcaagcatgccttctcccaaaattcaggatcgactacgtaagcgtagtgagcagatatggtcagctcacgagaccaagcagtgatattggatataagatttcttaccgtaaactggtcttgtatcagtcacatcgcattccacaatgtattcgattcctgatttctcgatcgcagatctacatagatgccgtgaagcatgtcacagtagattagacgagtatgattacatatagaatcgacgagtacaaacctaaatagtaacgctaggtcggcagaaacgatgcccagctgcttgggaacatattcaccctgaaccatgtcgcgaaacagatggatacacacgtcatgaagagtaaagtaaagcctctattgggaatagcgatgacagatataacatacctccaatcttcctgcgtctagtcggcttacgtccatgagcatatcaaccagacgactcagtcgacgaacattcctggacacaagtgagagtaatgacttcgatatttcgctttgaacgggatcatgcaaaagatcatggaccggtccagcaatcaacgtcaacggagttcggagctcatggctcacgttactaaagaaggctgtgtgaaaagttgtcaggaacatgagtggaacgatgattagtctgtttacatagatgtagagagggggttgattgaagttagcttaccagtctttgccttgtcaagcagggacaattcctcagctcgatggatctgagcctcgtagcttgtcactccaacgagccctgttgacaattgtaaccgcaagagttggatccaggactatgagtcaaaagaagagtggcatcagtcgtctatgtacgcgttgaatgaacaggcaagacgctgacgcttactctatagtcatcttcaaaaggtcttcgattcgatggaaaaacgatcccaagattaattgaccagctacagtgttctcatcaagatagaattgaaagtagaaatatgactcgacataaggaaggatcagtcaagaataatattcaccttctgctattaagccctatgattaagaccacatgtctagccgtttttggatcttccgaatcagctactgcaatgaccactgccttcttcggcaactcgccccaacttcggctttcgaatccttcaaccaactttgagcagtcatcaactatgaccttttcctttgataagagcgcaatatcaattggccagggacaaggcgtgatcccgttcattgtggtaactgtgatcaatgagccacgggaggagtttgtggacgatatcgagtctcgatgagacaaccgtccaggatttggaattgattctgagtccaccggcccatgctctatatcgggtacgacggttgtaccggatgaccccagtaattggtctgaagatgattgattggcagagttggaggaagtataggacgagaaaggactcgatggactcggtcgagtcagaggaggattcttgtgatagtcgaatgaaatcgaataagatggaggagcagaagggtggtctggaggaacccctatagactctaccaaatcgatttttatgtatcgccgatcgtcctgtctatacttgaagttgttcgtggtcgaatacgccatgaggaaaggaacatcgtggggacattttcggagacaatcgactgcagtctttacgaaagccgcaacggacttggtggtcgaggtcgattgaacgacatcttgtagtgttttcaaacgtcgctcggccaggacagtttcggtggtttcgaccgaacgactcaacaggccttgtatgattcctcgatcgccaacgactgggacccacgaccacgtgaagtctttgggtgtcaggagagaaagagaagagaaagaaaaaacttggatgagcagttactcaagcggggatgcagaaggaaaactagactgacaggtctcctcgagatagtcttcagagtttcttggtagaaacaacaggtctataatttccgaatagcaaccgttagtccaattgacttcacagaggtattgaggctgagcgcttacgaaccattggtgcgatgaacggtgcctcctttatacatctgggatttaaaatatgaacagccagttcgtatttgtcaatcttcacatcatagtcgtgatgaccaaaaatttgagggaggcgcaaacttctagtcggactcaccacgttctcagcatctggctttagggtcgtccagagctctttcccccaagcgtcatctccccctttgcccagaagacctggatgtcgttcgccggacatctcggcgtgactatcgttgtagatcataagaaactcgggtccccacctgagtttttccagatgtacaaaggaaacgatcgcattcagtaatctctttctccttagaaacgaacgctatagagttttggtagattctcttttcgctcattgaaggtatggtagcaacaggaaccactcaccataagcaagattgtgtgtctgttcccaaaacaattgatagcgccgttaataaactttgcggccattctgattttggtcccaagctggtggtctcccacgggtattcttcgataagctgtttcatcttgaatgtagatcttctcacatccgcttcggctaatgcgttatcagaatcagatttatttgaaggtctttcctgtgtgagagcaggatccaatctcttcagctcggtgacaggcggcagaccatgaacgaccgtatctaccggctggggataaagctgaaggatgacaagaccaggcgttttatccgaagatgacgaaggtaagagggtgacctgaggacggaacgctttcgaagaatgctcaggtgtcggccgaaaatatacaagatcgtagaaagtgttggcggcatctgcaattgtcgagtttgaagtgttttcaccaaggaagactctgttgagaaggctctcgagaagagataccgagttgtcatcgaagagggagatcacggtgtttgtttgaccttcagtaacgaatggctcgtgtgtagatgttgcagaaggatcagagctgggaagactgctgattatagctgcagggttggcccatatcaatcgcaacggctggtccaactgtgtgaaaggatgaaggatgatggaaggaaaagcatttgcccggagaaactgaatcaacggaatcgtctcgatgtcgacagtggacggcatcttgtaagaggtagagtaggagaataaactgggaatctatctgtctgtccgatggacagtgctcaatacgtccgaacggtatggtgaaaatcaggcaaaaagggtgtatcaatttgcaactcgatccgtcccgttttgaccatcatcattaattatcgaatgtagaagccgatgcgcgactgatggactcgggccattttaaggcgcgcatgtgtaagaggcgaaggctgggttggtaacaggaaggttacgacatggtaaccacataagactcttaggttctagttctcagaccctgtggccaagtagtatgatgcgctgatagtagagtgcgctgacagtatggtgcgctggtagtttgatacgtcggacatagagctttctataggtagagttttctagagaatagggaaggaagaagttgtggaagtggagagtttacggatcacagcttacgaaccaggtgtaactcaaattacatccccgacagcatgtgaacaaaagcagtaatataaatagtagtaaccgtatcggattagataaactgtgtggctttcaatatgtggattcagtcacttggcgggatgtgaccaatgcagctatgtctgtagatgttatccacctctccatccacgaagtgtcagcgtatatcttgtcattattacaagactcctaaatccgaagactgacctctaccttcggggatgtggaagtatcgagccatacaatctcatggagccgggtggaggactgatacttggcgtagacatctggagtgacaacccctttgttggatcattaggagagtttggtcgctacgatagacttatgtatagatttgtccgactggagagatgaatttatataaaatgattccaacagaagttcgggagggtcaagagtcaagtatatagcatagtcaatatcagtggtgatccctattaatccaggcgcaacatatgtttctatctcgagaccaacaatcaagccagctaaaatgaactttcgactccgtcttgatgtctttctgtttctttgtgtctatgtctcgctattccttcgtctctttgcctctcgttctatttttcttcttgtatgttcaagtcttcgtatgtggaatgtatatccttcacaagtaagtcgaagggatgagaatcctcttccacatcagatcgctcttcctcaatagaacactcatcggttcctttgaggagtttcgttcttcttgtgttcggaatgaagcaccagagggcggataaggcctcgacacagcctactgccacgaccgcaactacattcactatttcgagatgcccaacttgtaaacaagtcggacactcaaggcaatccagccacctctgcccgttctatcatgcacgccagagggcgatagctcgcgctacttcagtggttcatctggtcttgtgggcagtaaatattgagtttagctctatactcgcctccaaagcccttgccagtccgatcagatctgtcaacccccggctgagtcaggtaacccttgacgcacccaattgatgaattgacacgtccagaaactctgctctcgtcaagtcaccatttcggacttcttttcgatgatgcgctcacactttcaaatggtcaacacaagcagggttggacgaaatccgcgccaaggggcgacgacacgaaaccaagagatcaacgacctccgcaacgcctcgttgcctgctgggcaccagattacagactcaaagtaagtgacctctatatgactcggacacttggtggaggctgtcgtacca

SEQ ID NO: 1794 - DNA, 14878 bp, Xanthophyllomyces dendrorhous
ggctgtcgtaccatatatttaaagtcgagaccgaacggcgacggttcgcccggtcgatcagtatggacgggattggagcgaccaccagagcgcctagatctacatcggctccatctgacatcgacgactacaggcggagataggaaggtgaaggcaaagcccgttattgagcagagtacgttccgtggggtgggcagccagagggcgaggtcatgggtctgaactcaggtcgtcggacgcttctctcgatagccataggagagctcgacatatctctagataacggtggtctggctgaacggggcacgcagtggtcgctctctcaagtcatggaagcaccttccgggaatggaccgagacgttcggaagcggcggctgtgaatgagaatcaatgcggaagggtcaacagctctccgtggtgagtgtctcttggcctcacgttcaagctgactttacaagttgccttcctggcacttcagaatgcctttctcatcacaggtgtcttgcttcggttttttctttccagaccgtcattcattccgacctgccaggcccgatggtctccgtgctgctactgcttcacgatgtcggtcatacttttggcattcgacgttcttcgccgtttgatgataggaacacctccactcaagcgcgcatatcattcggagacaagtgtaccacaaggtagcgctttggctggctgatggacgtctacgtgccttcctggcgttcggaaacggcgctttcccctcatcttcacctgaattcactcctggccgtgcgaagacgctgtctgacaagcttagagccttccttctgctccaagtttacaaattccaggggtttcggacgtcaagagtgttatctaagtgccatggcgagttcccgggacgaagcagagtgtgggcgatcaaagagtgtcgaagcgtctgccgagtgggtcacatatatattggatgtctgtcgaatgtctcaggacaatgtgttgagtactcacagttctcttttttttctctacttactctcagactctgtgaaatagaaatgtcaattcgtgttgcaatatactgcacttagcccctctccaagaaaagaacgagaggacaagaatgcttgtattgctcactgccgctgctgaagctgacgctgtcgttgcccccatcgatgaggaaagactgaacccatgagccataagatcttggtggtttgcagcctgagggcaccctagtctaaaagggctatacatcgaccaccatcggttgaggttactctcaccaagcctgaacatcatgatttgtagcactacactgtgtcttgaaacaaacaggattacgtccgctccaggaggtgatataaaccccgatggtcagcaaacaaatatcaatcggtgaattttcagtggtcttcatcgcctgcggccgctaatttgatgttttatacacaagcacatacgctatctagaactctgggcatgctctgattctcgctcgcgtctatctttcatctacctttaactcagcacctcttcttcaaccatacgacatcgcttcatcaaatcgctcctctctatttctgtagcaaaggtggaagagataggaagaacgaacacaacaagaggaacagtcgagaggatagcaaacgcacagcatgcccccgcaacaatgccagccgataactgaatatactggcctggacgactcttcgttgcagctgccgttgattccattccttcgaaaccatccgacaccttcaatcattatcgctcttccccatccgactcagcatgtgccgttcagaatccgcccgatctggtcgaatccggtggccagaatagggacgaatcctcttctaggctgcatagatgataattcaaacttgatccttcaagttatgatcgccaagctcgccagacagctcgcatcccagcgagttttgccagacggcatagacccatcaaaatcacaatcgactcttcacccaaacgtctcaacaggtacagattcgactcacgaacgaaaacggatagattcgtttcagtttgagagacccatcgatccgagcatggtctctgcctcggatttgatatatacttgtcctcctgaacacgatgcgccagagggcgtttactttcctactttggttcctatagactcggatgggtcgtactcttcaccgaacctctcagaacatcgacttgcggtacttcagctatgccccgttcaaggcgctatcgctcttcagttccaaaagccatacatttcagacacgctctctaaagctattcctagtgcaccctcggcaggcaaaaaggtcgtcgatgaacctacattatcagtgagcatggatagcatggggatttctccatacgacggctcaacagatacgttgagagaagacccagagaacttgaaaaggcccactcaaataccactctcacctagacaagcgaggaagactatgttcaatgtgcagcaacttttagataactttgattggcagaatacaccgctgggaccaaaagcgctatggccccaatctttgaaatcgctgatttctgtagtgtgagtcaaccaaggttcttgactacccaatgaaaatccatatggctgaacacttctgtttgtccacatatatgcccgttggaatatttatttattaaattggggaaacttctatgattgatttgttaggatgaacaccgatcatgaaagtacactttggtggggaaaagaccttactctcatctgtaagttacgtcgtttcatttaatctgaagactttataactaatcatgtgagatcatgctttgtaatgttctagataacgatgctgtgagtctcttcgtttttaactattttcgagtaatctcttctctcctccttttcgtcgttcacaaacattctttcttccgcttgtatttcggttttccgtagtacgcagaaatggttggtccagtgccccttcacttcggtttactatcaatcattcatcaattagcacctcgtttgtttgtatccgatttgatttcgggtggaacagctgttgcgaaaacatccattcaattttggaaaagtagcatcagtcgcgtggtcggaggtctggccagagctcaagtcgactgctctcaatatgatggctggtggaagagcggtcaataaaactgatggtaatttatctttcgccttcccttcttcctctttgacttgccgtttcttcgagtcattacttcgaagcataactcccattacaggctatttagaatatgaattttttgtttcatcctttctacgcagatctattgtttttccaaagagaggttaccaaagctcctgaagagacttacactacttggtcttggattccagtcgcggttgagaacgggtaagatcgtcaaacgtccctatgtattgattcctgaattgatcaataaacccgagcgctaattctgccatggacgtcatttcagcgagattggtggtttgctcaattattcggtcgaaaccacaagcaacgtccttgctagacgtcggttcgagatgcttcgttcactcgctcagagtctttgtgcgtttccctctctccttctatgtttgactgattcatatcctcagtaaagtttatagtgcacgggttcggtaaatatctttctttccacaatctatttctcttaacacagccgtttgccagagcttgtctcaattttcagaggcagctttgaatgcgatggcagaaaacgtacacgatcttccgttcatcatgctttactctccgccaactgtccaaaatacatcgaccactactctcgacctcttgggcaccattggagtccccggtaagtattctagtgtttatctgatctttatgcaagtgctactcaggtctaagtcttgttaaatgggtttcctcctttgtttcatcagccggacatccttctgctcctacgaatatcactcttgaccttgatatcgatgccaactcgacacatcctagcgttactttaatggaagttagatccacacattcagaaccgagtctggccgaagacacagagagtatcgttttggctggctcaagctctcgatcgacatccacacgaccagactaccaggcgggagaagcgactggatgcccttggccgatagcacaggcgttgacaacgaatgagatggtattcgtggaagattgttctagtttggtgaccggattcgaggtgagaagttggccagagctaccagagacagccgttgtgatcccgatctcggatgaggattccaggaaaatagtcttcatatgtgggctcaattctcgaagaccttgtgagtttaccgtaatcttcttgttttatgtcagcttcttcattcagttcgaaattcttattgcaatatgtattgtaacatgcttctcccgcgattctagacgataaggattatcagagctggatccgtctactcaaatatcaacttgcatcaggcctcaaaggagttgccagtttccaggcacaacttgtgaaagcagaagagctcgcaaagctcgacagagccaagaccagtgagcggttcttcacaatatgatatacatcatttacaatttattgacggactgtgtcttcgtagcctttttctcgaatacatctcatgagttgaggagccctttgacgctcattcaaggtgcgttcatattctctcgtacctggccatactatgtgtttcgccactgacatattcgtgatcactcttctgctaaatgcttatccaggtcctatcgcagatctgttagcgatggaaacaaacggaggcagccgaaaacggcttcttagccttgctgatcgaaactgtcaaagactgacccgactcgtcaacatgctaatggatgtctcccaagtagatgctggacggatgaaggtcagaatactgttttccttttgctcaacctgtggtttgatagatatccacagagcctgatagtattgatgttactcgcttttgggctcactctcatacagggtgtattctcaccgaaacaactcggcgtctacactgcggatctggcgtctctcttccggtacatatctttttttctcttgttgaaacgtcgttatatacaggccggctaacttctgccctttcattcatgttctgcgccatagttccgccatcgagaaaggcggcgtgacttacgatgtagattgtgacatagaagatccaagactagtgtatattgacccaggtaagcttctctgctcatttggtatatatactcgttgatgtacaaagtctctcaaatactgtgcgcccaccttgttatagatctatacgagaaaatcatatacaacatcatcggtaacgctttcaagtattgcctcgagggaaccatcaaagtctatcttcgatatcacgccaacgaggtggaactgagtgttattgataccggagtcggaattccaagtatgtttttcatggtttaaatcacattttaccatagcggattggctctgatgacttgatcggcacagaggacgatattcctcgaattgttactaggttccatcgggtcgcctctgttggccgaagttttgaaggtaccttagtataaccttttctcaatatgattcatgaacatatcgttcgctgtttgctcatcaatctcttgcgcgattcaactctcgaaccccaaggcactggaattggtctttctcttactgctgagctgatcaggttacatggtggtactctcagcgtagaatcatgtagtgagtcctgttccagagccggtttggttgactgttcccagaaacttatatcttattgtcctgccgtaacagccgccgaggaatcacccacaggaaaacacggatcgtctttcatcgtccgcttccctctggggactgaacatctcagccctgacatgatcttagacttgccagaaccgccgacgcacaaagccatgaagtacgcaaaagggatcattgacgaagcgtcgagatggtcgaaggaggaagtcgagacatcgagtatatctgactcaggagagtcctctaacaactcgaataagatcgatccgtcgactttgttttggtcgaaatctgatacggtcctcattgttgatgataatcgtacgctgttctttcatccttctaattttatatatgtggttggtcaaagccaagctcaacaatttttttaattcattttatgttatctgaagatgatatgagaagatatcttgtaagttcttcctatggtacacaaacacgcctaccgcacgcaatctgacatcgttgtactattctatgaacgtcagatgtcaattatgagtcaatattgtacagtcatcggtcagttgtcctctccgttgccttaatccatgtttgataactgattttttcattcgagttgccttccagaggcttgcaatgggaaggaagctctggatatagtgctgagttgtcagcctctccctgatctaatcatctcagacggtcagtcagaaaacgcctcttcatcacaatttttaacacttgggtgataactgatgttcgtgaatcaccttcgtagtaatgatgcctatcatgaccgggtttgaattagttcaaacattgaagaaccagggactcaatatatcgttgattcccgtgcttcttggtgagtttcttcacacaaatcacggtggaagaaaaggctcagaatctctttcgacctgtgtatggaatttttgacgtaacagttactgctcgaaacggagacgaagatactgtcagcggaattctcatgggagctgaaggtatgtaaaatgcatcgttataccttggagataggctgcgctaatgtgtgctcttaatgatgattttcttggtagactatataacaaaacctttctcatctagagaaattggtgcgtatcctcttgatttgaactcgcccaccttattgaacagactaacagagtctgtccatccacgtcatagttgcacgagcacatcttcagatgcaaatggggaaacgtatgtacacccacaattaaatcatgattctcgtttcggacgcttaaagctaacgcatcttgacgtttacaggacgaatcgagcttgagagaaaatttgccgagtacgtgatctggtctggttgtactaatggatacttcacttacccatataattcatgacaggcgaaccgtcgaacttcaattccgcgcgcaagaagcagaaatcaaaagacaagaggccgaggaaggccgtcggcaacaggaactgttgatcgatgtcacgagtcacgaggtaagccgctaacactgatcttcgtagtcagatttcttactcagttatcatgttgtagattcgaaatcccgtcagcgccatcttacaaaatgccgagttgtgcaaggataatttgaaatgtaatttccgcctctcattcattagcatagatgtagtcggtcttacttacctctttctttcagtcttccacaaagagctgcacagagctctcacatccgatgttggattgcgtccgaccacatctttgttgtcaatgattgaagaagatgttgaaagcttggacgcgatcatcacaatggctcagtctcaagagcgcattgcgaatgatgtgctcagtgtaagcactgtagacttctgtcactacctcacgattactcgaactaactcccgaaactctacaatctttttgatgatcaagcttgcccgcatacaactatcaactttggaaatatatccagtgtcagtttctttttatccattcaagctctttaagtcatttgctgaatgtgttcatggtttcgtggtactttagtcaaacggatctcgtcaaagagacgcgtaaaatgtaagttaccgtgtttccgtctcagcggagccaaatgtctcggagtttcttattctgatcatcttgttcgcctacttgtagacttgccatctttgcaagtgaagcgtaagtttcaaatacttgatagacatacacaatctgctcgttttgttaatcgatctcggcccttttatacagtcgactcaagaggatagacctgtcgtttacttttgggccaatgcttttatcgcttaaagaatcgaaactagacttgcttacagatccccagcgaattggtcaagttcttatcaatctcttagcaaatgccatccgatttaccgccacgtcgcctgtcagagaaattcaagtttccgtagaggttagttcatttctcatcatcattttgcagcactgtgttaaatctgaaaatctactatcatgaaaaagattcgaaattgtcctccggatgacgactcttgtgtaccaccgcctgcgaacttggactcctcctcgttcgcatctatcggcgaaaaagatatctggatctacggggcagtgaaagatagtggaccgggtctttcagaagaagagcttacgagactgtttcagagattcaagcaagcctctgctcagacgcatgcaggtttgtcttcatcaccgccgtccaaataagtctcttctaaactgatgctctcttttgttcggtatcatcttgtatggcacagtgttcggtggaagtggcttaggcttggttagatcaagtttaactccgactcaagagaaatttaagattcactaatgtactttatttaacagtatgtgtgccgacgaatttgcgagttgatggacggtaaaattgaagtagctagttgtcaagatcaaggcagcagtgagttaacataaaccctgcttcgaaaaagaattttttgagttctaactatggcccgctttcatcagccttccgtttcttcgtgaaagcttctctcataccaatcattaccccaatcgaggccgccaaacaaattactcttaccgagaaaacacgtgcttcaagctccaaggctacactctcgcctcaattcaagagtcttgttctcgttgtcgaagataacttgatcaaccagaaaggttagtaaagccaacatttacagatatctcaatttcatcaacttccttgtccccaaaatgaaacgtttgtttgctacttgtgtgcatacccaaagttctctatcgacaactcgttaaggctggaattacacagattgatttggcggatgacggtcaacaggccttgaatatgattaataaaagagtcgcgcgtggggagtcgtacgatgtggttttgatggacttggagatgcgtaagtagagcttgagctttcccataatctgaaatacattttctcgtcatcagacattcttaccaatcgagcgatctgtctttcatgtcatatagctgtaatggacggtgtaagctcatccaatcgatgtccgaacgtcctattgacctacaaaacttctgactcatgctttttaaaccttcctcctctcaatttgacttactagcttactgcgattcaaaagattcgacatatggaatctactggagagcttcctatacggcacaacgtcctcgctctcactggaaatgctaggtaaatccattttttcgttcactctatcgtaaggacatgttgagcccgaatattgataattttgattttcagacaacaacaaattgagcaagctcttagaatgggaatggatgaggtagtcctgtatgtattcacccttgtttttcaatattgatacatcaaaaactaaaaatcaccatatctctttgtgcggttgtttcaattccaactattagaaaaccatatcgaatagaaaatctgctatccaaattaagaagccttggtgttttctgattaagttgaatatccatatcgccatgaaactcagttctttatcaatcgatgggtttatttctggatctatttatctatttgttctctgttccgggcctttcatctttgttaaattctgggatacatcctttttttctgtttgttgtcttgattatttattccatcgtgttgccgtgcttgactcccaagttttggcatattttcgcttaccgaataactaatgcttaatatgttgattgattatctgagtgtgaggatctttctgttttcctctctgtttagtccaaagcgcgttttcaggggcagaagtgatcagccaaatagcaaaattctctgataatagcaacttaagatcagtcatcatcgtaatctcgaatttttttacatcaaagcctagctcatagcgacccttctcctccgtaaagttggaagtttctgttggcacttcctgaaaccatgaaagttccctctccgtcgacatctacactcatgactttaccagaatcggtagtgatggatttgacaagttgccaatcgtcactagaccagattttgatagtggagtcatatcctgcagaagttaaataaaggcctgaccggttgatatggggtgtgagagtgtttgctgatgagtgtgtagaagagtctaagttcgatgatgatccgtttgtaggttctccatccatggagacgtccatatttgcttcgctcgattcagtcttgattgatgtcgatgttggagttggttccgttgtgggaagagaaaggagggagtgtcgttcggagatcgatcggaagaatttcaagtcggatacgagtgaacgatgtgcaggtatggtgtatgtacatcccagttttcttatgtcccaaatcttgatagagtcatctgcagatccagtagctagttgatacctgtatcgcaagagaagagatgtgtcagacagacaagaaggaaatagtcaagtgaagtataccaagcctacgtataaaccaaatacaaaagtgatgacatacccgttaggactccaatctagagcggtgatttgtctgacatgcccatccagtacccaaacggttcgaccagtcctagcatcccatactcgtccgataccatccagaccactaaccaaccacattttcacgagaaaggcatattaacaacaagattctgaacatggttacagaagtcttccgcatacaagtctttgaagtacttacccagtagctactaaccctccatcatcttgccatccgacggcatacacttcctttgagtgaccctcttgaagcaatagctcttcccctatatttgtttttgagaaaagcagatagttttctaagttcacataccaaacataggaagtaaaaggagtatgaacggaccagtctcggtgtcccaaagtctccaagatccatcgaaactcgccgaagcaagatagtctccagatggatggaaagctactctagctacaggcgctgcatggccttcaagagttctcaatggtgttgggctatatatttgatagaaacctaggataaataacgagattctggcatggcctgacaaaacagttttcaaattgaaagacacaagaacggacctgtccagactccagagtttgactgttccctccccaccacccgtcgccaaattgacgctttcgcttccgagcgacagagtcgcctttggatgccaagcgagtcctctacaatgagtatcatgtcctttgaaaaccgatttttcatttaaattaggcacgtcgaacaccttggccgtacccgtccatgaggctgttgcgatcagcttggaattgggggaaaatcgtgtaagagagattggtcgggtatctccaatttgagaaccgagaagttgcattgtctaaacgtcccgagtcggggtcggatatgaagcatgtaaaatgataagcaagcttttaacagaacgaaaacaattaacggtgtcatgtttcagaattgggacaagcgcaccttgagatccttataagttttcttccgaacctctaggatacggcctataggtaaggccgattcaactctctgtttttttaaccttctggcagaaatgggaagcgagtatgccgctattttttttcgagctgctaagagctggtctggtagactaggctcagtatagaattcttcctgttgtaaaaaaatggcaagcgcgtgaatttaatactgatgcagaaactgaactcaagaatagaaaagagaagaaaatcaatgaagtgacgaatgaaaagcgcacatcagattcttctccatccgagcttgaagagtctccgtctgattcttgaccgtccatgccttcaagaccctccttggccacttggatttgagacatgacatatctcaaacgagcatatctgtcagctgcctgtaagatttcatgattttcagagaagtctgtcagttcaacatgcggttaccacgtttcgaataggcaccacgcgtagcatcaacgattcgaccaggaagagtaatcgatttgatccttcgtatgtcattctgattgacgcgttgtcttgaatgagaagtacataccccttcaccgaacagcgtgattggctctcccatctctctgagctttgctcgaactttcctgtcgtctgttggaacgttagccaactttctggctcgcttcttgcgttccaactcttccaatatggccgcattatcctcttggagccgatcacctccataggtctcagtctcctcctccactgttatgcgagaccccaaaggtaggaagatcaatattcctgttcaaactggacgagcatcaagaccttgaacacgtactgagagcgtcaaggtcgaccttgaatgagttggaacatggattgaatcatcgatatgttgagaggtcaaaggtgaggtgaagttagttatctgacacgaggtggaaggtacgtaaaagaaagagtaattcgaggacccacgtcctgacccgatggattggatgcgctcatttgctgttagattagttttgaaagcacacgagaaggaaattatgctgcttgctatcgctaccaccgctgctgctgctactgctgctaatgatgatgatagaggtcgaacgaggaatgagaaagatgggagagcgtaagagagggacgaaaagggaaactgcttagtcagcacaatcttgaacaccgtaaccatgaatatgcacatttaaggcggatcatccctttcgttgtctttacttcctgttgttgaccatcaccttcattgacaatagtcagcagcagagatgtcaaggcccagagctcgttccagatcagactcgatcaacaacatactcaggcaagtatcttgctttctattcctagtttatctcgaaagccgtgtctaacttcactgtttgtcttgatgttaacagtcaggtacctcttcattcacctaccgatgccccctcaactatcacgaaatccagcaattcctcttcagggtcgcccggaaagaaactttcaaagaaagtcaagaaagaggacatctgggctatacctgctgccggggagatgcctgcgagtttcggattctggaaagatctcacaactgggagatggatgttgattccaggtttgtttgtccgttcctgatattgtgtcgctcttgggctgaattgtttacacgttcatactctatctgaatccctatcgcaatttgggaacgaaagcttcgagtggtattatgttggcgatatctttcgctctctacctcaattacgagctcattcaaacttatgtcgcgccggtccttccggccacgcttcagatcccacaatccaacccatttgctcctctctggttcatatcttatcccttgcccgctcctcactctcagcctggagatcctagattcggaaaaggccttcttgtttgtcctttcatttgtgcctgttcatcttctgagccatcggcttcggtctctcttatatcattccgctgaatctcgacaatgttgattatcaaataggatgttgtcttccttcttcaccacatcgttacgttctccttcatccgacaagcaataacactttacattcttcggccgctcgccaaaaagcttggtatccgagggtccaagatccttcggtttcaggagcaagcttattccgctatgtattatggttccatgggctttttcggattggtccgtacttttataactcataccctcttacacctgaccatcagacttactttagttatatcaatagtaccttatgaccgaccttccaacctggtgtaggtcaaaactatgttcttttcatgtgcgcttcatcatgatagcccttttttccagactgacagttcgtgtgtggtcacgtatgcaatcactatcaagacttcaacacggaagagttttggattggatatccgcattgggaaatgaaggctaccatcaaatactactacttgtaaggatacaatctttttgaacaaagacgtcattatatgcaccccttttgtatgttctcaacaaaagtatttgttttgttgttcgtttgcgatcatcgtgcatccaggcttcagttctcatactggcttcaacagatgttcatattagtcttgaagatcgaaaagccccgaaaggattacgctgagctcgttatgcatgtgagtctatcaaattactgtaggtatgcgtggtactcgaggatcccgttatctgatcaatctgacaaacttcctcccatcaatagcattgcgtgactttatggctcattggtgagtttatatctgagtgtcgcgccgtcaaaccttgaattctaatcatcatgccactgcatctattttttgatatattatgcttgatcataaataggatggtcttatgctatcaatgtaagtgatctttggcctcatattgttttcgaagagttttatcgctcacctcgtatactttggatatcttgatcagttgactatgatcggaaacgctgtcttcgtgactatggatatcagcgacgtgttcctagctctcgccaaatgcgtgaactacagtgagggtcccaagtcgtctggaatcgcgtccaccattctgtttggatggtttgttatcgtctggacatacctccgacattaccttaacttcatcatcctt

SEQ ID NO: 1795 - DNA, 2007 bp, Xanthophyllomyces dendrorhous
ttcttcttcttcttcttcttctttttcttcttcttgagagagtctacaatttcggaatcagacaaggagtgcgtatcttcttcatcgtcaccaagggcgggtagatcgtcagacgtatcatcgtcgatttcaagttcttctttctcctctgtgacatcgtcgactggagtggagaagtaggaagaagggacctgtttaaacggctcggctgtagaattgtacctgtatgcacacaaagcaaaaccaggccatgtcgtctttcctatcggtcagtttccatgagcaggatagccaacgaaacagagaaaagatcggtgattgaaacgaacgtgaatactctaagtgcagggaaataagttgggatcacacttggtccgacattgacagccgcatagtcacccatgtccaactttttcatctcagacatctccttgcaggagtttaagatatccccctgtaacgacccagatttgcttctactcttcgtaatctcgatattgctgtcgaacagggacgtgggggccaacatggacgatgaggaagatgaagaggaggagaggaaggaagaagagaaagaagaagacgcgacaagagacgtcatttgattttgaatattggtcgatgattgagtaaatgaatcagggttcgttcgatatgcgtcaagtgaggcagagtctgttcgggaaggattcgtcaggagtaagttccgaatacgaatgatttgatagcagagcagaagacttatttgaggaaaacgaacctagccaaaagaaatggtcgacgttcatatggccatacgtgtgaccgacgatggtatcctggtaacgcaatccgagaagcccatatctgtaccactgtgaacacgagatggtaaaacgttagcgaggtagttgaatacaaacaagcgcgctctttctgccgaaagccgtcgggtggtgaagaagagaaagaacgcacgcaatctgggaaatagttacccgcgctaggtggaacatggccactcagccaaacctgcatccctctatctctgtagatttcgagctgaacttcgagccaatccatttggagtgctcccggctctgatgaaccgaacgcgcatccgtctaccgctgctctcatttgacaacgaaagagggcgaagaagagaaagacaagaatgaaacgagcatcaggatcggagcttgaatttgctgagtgaatcggtttagacggacctttgttggaatcataccaatagagggtattcaacgagatgactgccaacttgtctgggatgacttctgatgtaaagtatgctcctctttgaaaaacatggtactgttcggcagggatgtagtgtttccagatgctacggagagatagaatagagaagatacaagtatcagaagatgatggtcgagtaggtgacgattgtgtaaggcaaaacgacccactcgaggaactcgttggtgaccgagttcggcccagcagtcaggatgttgtgcgctgttaaatattcgacatttatgagcttttggacggtcgaatatcgaggtcactagtgacaaaagatactcacgataaatatcgttattctatggatcaaccggacaagagcagttgaatggtttttaaaaaaattaatatgcagcctagaattctctgaaaattgatggttcagattgaggacttactcccaaagaaggaacgacggtcacgcctctggaggtgaaaactttgtccatcctagcggcaaccatccggttgagttcaaagatttctttaggcgttcgtggatgagttcgatcgatatcatgtctgtttgtgaacatgagagggagagccaagaaagaatcgcgcgcgcacgacatgagcggtaaatctctgtcctctttccaaagatacgagagactttacctggcgttgtccccagtccctacatagtacacgatcaagttgaacacaatggctgtggtcaaaacttgtcttatgacaaaaagacaagtagcacgaaggcttttcacatat

SEQ ID NO: 1796 - DNA, 8589 bp, Xanthophyllomyces dendrorhous
ggcttttcacatatgggaccgactcacagatgacaaagtcaaccttgtccgcccattctttctccaaccagtcgaatgtgaggttcatcaacgacaacggtgcgtcgcaatctctagataacgatacacacaagcatgcgtccatcagctcctttctcgcagagcaacaacatagaagagactataacatacgaaggcccatttccccatctaccaaccccatccttctctttcttcttcttcttcttcttgtctttcttcttcttgccctttctatcatctttcatcaattctccggacttgctcctgacctgtgtcaccagcccagccgtttgatcatggacttctactttgaagtcgtcatttcgggagtgacacgcatccgcttcagatgatcctcgcgcgtagaatggatcgggatggatgtcagttatactgtgatagtgacgcgacgcacggagagtatttttacaataatcattgtgtccgcgttcgtgaaagttctgggtcagagataatttttcgtatagaggaaatactcaagttgatcaagacgggagaacaagagagatgcaaagagatgacatactgaatgaaccggccatgtaattctatcgtgggcgcgatcaatccggaagaaaaagatagatagcggacgaaggaagaaacgttcgtgagattgccaagttctccttttcagtagagaaagacggctgaagggaaaccaattgtcgagccgggaacaacgaaataatggtacgaacgattctcgggtgcattggcaaccaccgggtgagtcagaaagaaccccaagacgagtgtggtggccaacgaggccgacctcatgatgactgtttggcgtgaagtctagcacatggatcaatatttcgcttggttggatggtgagacagagaagccccttcggaaggttaatgtcacgtgatctggatttggctcactgcgatgtcccctccggccttatacacccgcatgtgcaagctggcgaggatcaaggaagacgatgacatcgaatatatgcacgtcttgactttccacgagcttggatgagggatcatatatagcatttataaaaggctatagaacgtcttccatctatactgtagacactggtttcttggccttgacaatgacgaattctaataacccactgtcagcccaccaaccgacgaccgagccggcgacccaccatccaccacctctcgccttcaagaatttcgcaaaacctggaaagacgtggtgtgtgatatctgttatctcaacgttaacgaaaccttggttgcgcatcatattcgccaacatggctggaggaatgatattctcctttggtacggataatagccaaagaaagaaatcaagagtatggcgtgaaccgactgaagaaccagctaggttatcagccaacgcaagagttccgtgaggtcgaagcgcattgaaagcctgctcaagaaactgttctctattctcgaaatgatatgctgcgtcgaggcaactaatcgaggtgtaaatttcgcgagatcgttctgggttcaacggatgagccaatgaatctgatatttgcactgttgtcgaagccggcctccagatggcatccgcctggactatattcactttggtggctgcgttgaccaaaccatctgatcgagcttgatcgatccggtcggttgctcgttgcgcatgggaagcaagagatgtcagaccagagagagaatcctggactggatatgctgaagccggatcaagaacaaggagaagtgagtccccggaaccgtaagcgacttccaggtgatgaccgtgcggttgaagatcagcttgcttgaggagttcaagtgcgagggctagagtacatgcacagaggagtgagtgaatagcgtgagcgccgggtggatgaacaactacagttacttgcctcgacaggcttctggaaagcttgtagtctctgcccagtaacccctgatcgtgacacacaagaaacagactcagtccattaggtatccccaacaaaacaaagaagagtcaaaacaacacatcaacacacatattcaaccactctgtctgtggagggaggtccgggtgaaccctgttgagttcgacatgatcaaacgtgtatggttctttgtctgtatagaatctggctcctatgaacacggcgatggcgagactgatggcgaggccgatgtgcggaacgcgtgtgaacgagatgttcattgtcggtggccaaaagttgtaatcgattttggaaaagggctacaaaaagattgtaataaaatcggaatctcgagaactgtgcggaagtaatacaaacgatccgtagtcttgactgcaaagtaccatcgaactaaactacggactttctctaatgggaactacaaaatctttgtaatgtgtaacatatgagcagtcggtcactttttttcgctttgttgtttcacctctttctcccatcatccatcgtcttatccatagatctctcgttctttctttctctttcttcctatcatttatctgttgctcttcagagcttgtctgtctcatgtcttctccaacatctactcctccttcagctggcttgccctcaggtggatcgcctcccggccctagcacgtcccctcaaccacctacgcttccttctggacagcagcaacaacaacctcagatccttaagccacagcctcctcctatcaacggccttccccggcagacacctcctatccgtcaatactatcctcatcctgctgcacaccagaacgctgcccatgctcaacaacagaacttctatcctcctccgcagaaatcaaccaaggagactcccgctctagccttcgcggagtccgcacagcagtataatcgacggttccaaggtatcctcgatcgaatcaccccctactcggcttaccgatggctcggcactgctgtccttctcttccttttcggccttagagtcgtcctaggacagggatggtatatcgtcgcctacggtctatcaatcttcctgttgaacatattccttgccttccttcaacccagattcgatccttccctcgacgctgatcttcaagaacaggatatcgaggaaggtggtgaggctggctcccaacaggggcctcggtcggatgatcttcccactgccggactgggtaaaaaagtgctcggtcttatgggtatgaattcttctactctcaatgcggatggcgaagaagagttcaagccgttcatccgacggcttcctggtaagtacatctccatcttgtattctctttgacgcgccttgatctgtagatctcagacggctttgtctttatttgaccatgatatagagttcaagttctggtggcaagccacccgagcgacgttgatatcccttggactcaccactacccgggcagccgacattcctgtgttttggcccattcttgtcatttactttattacgtacgtccttttccagctggaacttatctcctctttgcattctcatattgtccgactacgcaactaatctctttcccttttgtcccgcttctcatgtctacagcctgtttgggttgacgatgagacgacagctccggtaggtcaacagtcgttgacttgttcaatcatcgctttttgctgaacataccaatttgttttcttccctccttgatctttcatgttgacgcgtccttattagacacatgatcaagtacaaatgtatgtcctcttctcacttcaaaacgtcttttctcttcgcatagattcaaaagattctgatgcaatttttttcgaactgttacccctcgttggcagatattcccttcgaccttggccgaaagacgacttatgggagaaagtgaaattgagagatctttgatctgcgattggaaagtttgtttctttccttcttatctccgtttgtgtggttggccgaattgagcagacggaaggatttgcatatagaaatgtcaataggcagcagagatcatgccagcttctcgatactgctcgttctttattatccccaccttctttttctttttttgtaaacccttttgtttctcttctctgtttgttttatacatcattcttttgggcattgtgctttgctacttctccctcccctttccagaggtctgacatcatctctgtttgaaccaaagtttccactttcttcgatatcgtagagttatttcacatgtccaagtcgtctcatttgtccgtcataagtcagaagggattaaagatagacagaacgggaaagatttagcatgaacatcaaattgagacaagagactacaaggacaaggctggggtttctatatcctccaccctccagaaccaagatcaacagctatagcccggcttccacctttctcatctccaccgtctttcttgtcatctcctccgtcagcatcgtcatcgtcttccacaggtcccagacctaccactctgaacccgccgttcttacctctaatcgcttcgatctgtttataagtttgcataagagccagtccaagggatgcatcagccaaccgttcacatccacacgcgagctcgaatagaggtgcgagctcacctggaaaggttctttcaagaacagctctctcgttcgaccgagagactcgatggcgctgactctgtccatgacgctatccaggaaatcatcaaagcgatcttcgttgattatactcttgatggcttctagcgtcacatgagagtcgggtcgtacatgatggtttacctaaagaaatgaacaaacataaacaacccatcaaagtagatgacacgttagttgacttttaatctcggtaagtaggtaacaaccaaaaagtagaggacacacatcgatagagattatgttcaagtgatccaacctgttcagataatcaccacgggtcatcacctgtcttgcccgaccaaatgtcacataacccaacaaggatggattgtcttctgtagcaggttgctcgatcacttcgttagaatggctacttgaggtgagggtctctttcgcctgggcaagtgctcggaggagtagcctgattgttttgaacggaatgaaaagggttatacacaattgaggactgggcgagctatgagtaccaacaagttacgaaccatgaagatgaagaccctacagaagcccacatccaaacataaggtgagattcatgagccttcgtcagattcatcgcaatttttcaaatcagatagaactcacacttcatctcctccatcttgtcgtcactggatgatggtagggcatcgagaaaggtaaaggttatacatcaaattctcagcaagtctaaaatgttttctgcgacagaaactcgagacatagacatactcaacatcaggaatcaaaccaattctaaagttggaccagattatgatttgaaattagcacaaagcgatcgaacccgatacagagacacatttgaaactcaactggctcatcaaaaactctctttcgctcctgaccatgaattgggcttcttccatcatatcctttgccctcgcgattctggtcaggtagctcgttcggccaccgacgagcttgacacattctctcaagacggattctttaggtggatcctgttgtgggaaggtatccaatcggagatcccggagagcgcgaagagcagtcgcgtggggaaggtcatagacagagagaatctttaaaagtgcaattattgatgagaatgagcgcacagatagcctggatcatggaaggaatggatatacatactcgcatacgggatgcattctttcggagcatttcatagggccctataaacgttccggtaaatttaaaacatataaagaacctcggatcagcgagaccgataggctgagaaaggttttaaatacgtgtgcgtcgaggagacctacagaaatcgtcggtggtaaacaccatggtgcagatccctgcgtccgaccatgcttccgctcgctgctgaagttgatgtagcagcctgtggccctcatcatcattaggaaacagatgaatgtctgaatccagaatgatactcacatgtcaatacgacgcacatagtcaggaagaaactggaaaggtagatactgaccattgaagactaaacaaagcggtctgccttgtttcttagtgtacctcaaggcaaccttctccaacttgttcagtgcgcgctcgatgtcgagtgatggccctccattccttgggtcagctctggagaacagaccaccctgccaatcttcaaagaaatcatagttgagcgcctttccaaatcggagccggaagacttcaagatctggatgagcctcaacaaaggctgataattggtatgaaggcattagtgatgaccaatcaactcggctcaagaaagagacgaggcagaagagtgaaagaagataggacggaccagctccatctgcttttatagctcgcatggaatctaatatcattgttgatttgccagttccctgttgttggcaaatccaacgatagctaatgtgagcttatatccaaggtgaagatagaagaacaaaatagttgacgaagtgctaaccttaggtccactgatcaagtagtatttcccagattctttaccgctgacaatgcgatcgaccaaggcctgctcgaatctaacgatatgatctggtcttttttccttgtcgtcggaatccaccgagtcaggatctagaccagccttctcgagctgtcgcctctttctccgcttgcttcgaagagagcttgtatcttgtgaaagctccaaggcgggatcatatcctggcgcaaaagctttctccatccggtagagaacgataaactggaatagccccgcgaacaaaggacagagtttcatagattaatccaagaaggatcagtgaaacagtcacttgtaagccgaacgacaagactctttcggaagatatctcaccttgtaccactcgagataggccattccacttccgaacacaaggaacagaccgacgcatgtcgttagcgcggcgtccagcatgggtgagcttgtgaaggaagggaagaagcctcctttcttggaaccgtcgttggatttgggtgaatctcttttaggagattcatccggtccgagatctgggatattagggctcggagatggattcggagcgaacggggatgacacgtaagatctaatcaaggagatggaggcgaggcggtccagagtcgaaggttggatcttgttgatcgagctgaattgtgcaaaggacaacaatctcacggcaggcgcggctctaggccgtacaagcttgcagaagagactcataacgactagtaggactggtgggcagtcaaggaaatcaatcgtctccttataaatgagaccaggatggagatggacgaaagagaacgatatcagttcatggtcaacgaaggttgatcaaactccgagttgcttgctttcttggctttcgtgacgatctttcaaattgttcgccacagccattgaggcttttcgtcgccatcttcatcatcgccagcaacaacattgtatctacagtatacatgtatctctctttctatacggaatgcattaggaacgacccagcacatgcgcaaacattcggcgagagaacgtagcctgatgaggctgtgcgttctcgagagctaaccggatgaaagttctagggatactgtgtcggacaaagagagtcgtcagaattcgagttaacgcaagatacagatgacgaaaagcagactgacgcatccattcatcctttcgccgtgagcattgtgcaaaacatcatcttgatgttattatctgtctgctaggtgatctcatcgacccatgactagagaagcagagaggtcgacgccttgtaactcagagaccgattctttcgtttctgccaagagcttccttgcgattccgttcagtctgtctgaagtcttcgatcgagtttccattcgtcgcttgaacgtctgtagtcgtgtggccatcggaataagaaacatgctgaccggcaagggcagcctgatcctctctgagctttcgaaagaacttttcgacgtctgcctgatctttcgagttgataggcaatcctgtgggttcccttctgatcatctctggactcgtgtcttggatttgggtacgggaatgtgtgcacagatgggtgtatgctgatgggtgtatgcggcgagggcgatagaacaacgcattaggaaacttctgtcagtttcaatacaaaatagcccgaaactttctaatgttttcattgctggctttgttttcttttccttgttttcttttttagcgctctgcattcacttccatcaacccacaactcgccttctctcgtctactcttgtctctttctttttctttcttcttcttcttctggctactcaatctatctctaggttctcgtcatcctggaacccttgggttaatccgtctcgaggctggcctctcttctcctacgcttgaccatgtccaataagtttcaagatgcacacatgtactcccccaactcgcccgtatttgcccatcattcgtccgacgatgacggtgatcatgccgtcttttgtttttgcggtaacgaggtagagcccgatgaggagggagatatggggatatat

SEQ ID NO: 1797 - DNA, 965 bp, Xanthophyllomyces dendrorhous
cacttgttctgaggtagaaacatagacaggatatacagcaagagcagacacatcttaagagtgctctgtggcctgctttgatcatttacccaaatactgattcgatccgtttttccaatcgtcgttgtttcttgttgatcaacagcctgtgctagaaaagacgctctagaagcgctctcttcgaaccataatcaaccccaattatcctcctcgaactccgtccctccaggatcattctcatatctcaactcgacgcgtcagccaattccgtcggcgtcgtgtccagattcacttgcttacagccaatccgggcaagtagtctttcctccgccactctctgagggcaacttgtctgggttatctcctgctttgagtactgcgtcctcgatgtcctctatggcctcgtctgaagggatgtcctcccattatcgtcggatggaaaaggagcgggttgcccttcaacgccagaggaagaaagaacgcgaggaggctaaacaagctgccgcccatgccgccgctatggaaatactttcaacccagcgacggatccgacagcaacgagcagagtatcatctacgaacagcatcttcaaactctatatcgtccaaacctccatcctcctactcgttttctgctaacatgaacaataccgatatcaactctcacatttcttcgggaaccaccttatccagaaacaatacagcctcttctacgtcgtccacccagagtcgttacatatcgactcatccgtcccgagcaaaaacgccggatctcatccatcatggtcgaaacgaatctttggggtccaacacgtcatctatctcgtcagctgcgagcgtcgcttggggatggggctctcgatccggctggggatcacaatcgagagagggcggggaggaagagattgaaaacccttatctgattcgagaggaggacgaagagttggcagacgacgatcttccaga

SEQ ID NO: 1798 - DNA, 601 bp, Xanthophyllomyces dendrorhous
tcaacttccgctcgactccgtcaacttgaagcagacgggaagtttgatgaagcgttccaaggccaatctatcaattgtggatgccctcgatcaagctgaaccccaacagactgatcgagggggactcaagatgggagcgttgttggacgatatccttgatatggaacgtgggtttactgttggtgggtcgagcagccctcgatccaacgtcgacggtcgatctgatgctggcgcatcatacattccaggaatatcgccaagccatccaaccaacaactcaacttccacacctagaacacacacaaatcctcttcacaatgaacgctccttgtttacaactcccatgactgatgctgatacattagagatagacgctgcgcctattcaatctatatcaacctcgtcctcagctgatatgttacgtacccccaatgaacaaactggacctgtatcgaaagatgttccgcctcatctagcaggtataactcaggggagattgaagagaccatttgtgtcgactccaccttcttctcctcatacgacacttcaaccagagtcttacgtctcacggagtcatcaccccacgtcttcttccttatca

SEQ ID NO: 1799 - DNA, 37507 bp, Xanthophyllomyces dendrorhous
cacgtcttcttccttatcatcaatatcaacggcaccctccgcttcaactagatcaatctcaatctcaaaattctcgaccagtacgcctccaggccctagctcatattcaaccttaggagctacaagctcgaggccgtgccctaggttgcccaccgccccgattcccagaccccgacggtccactctttctaccgagcagcatgcccatcatctcggtctagctcatagacgatcagtttctaccccattcgatatctccctctctcaaccttccgctctcacttcaaccccgttcttgtcttcctcgcatgcactatctcccagagcgggacccaatttgagtaaaaaacctaaacatcgacggtccttttccgctaacgaagcttcaagtacagctggctggcttgaagattcgtcctcgatggcttcacctttaccaccgttgccggtgatacattcccggccaagaacattagtctactctcccgaggattcaatgggagaccggactgtggtcgacctttcttgctctccttctcaatcggcgcgcgaagcgggcggcttgaaactcggttgggaacttcctcttagccctccttcgctgctcggatgggaatcagacatcagagactcaagatcgacgatccaacctccgatcacattgacatcctccgtattggaagatgagaacttgaatctggcacctccgttgatgttaggatccgatcaagagtcgggtgtttacatggatcctgacgagggtcgacgaagagtggaatcaggtcaagagaacggaggaggggagggcatgtcggcctggacgcgcagtggggagaggttgagagcggttctgggttggggagatagagattgaatgggtttgcctccatgtggatgaaggaggaatgagttccctttctttgaccctatccctttctctctctctccttagttcttttcttatctcccttaacttcttcatcaattgacttcggacctcacccttcgcccatctatcacgtctttgtacatcgactcacctatttgattcagatctgtatcgcatcttgcaacgatttccgactttttctctgtccttcttgttctctctacatccttcaatctcacatcgtatccataaactttctcttcatccttccaatggcctctttctccagtgcatctgctctcctcttttgttcaatcttgatgattttcaaatctgtcatgctcgatcattccaagtgttttgaactgtcatcttgtggttttgagacaatttatcggaagataccaaatcatccgacaccatcactcaggttcttctgtacaagaaatatgttgaacggcattcactctcgaatctacgagtatatacataaacatttctgcgttgtgcatgttcatatcgtcaaaaccacatgcagatcctttcactctggttcgttgaaaattttgcgcatatcgatccccatttggttcagcagacaatcggggatcccgagagttattgatggtaaaatcatctgaagaggagagacgacggttcaacacatcacggctgtcatgttctgcctgaacaagaaaagaagtatattgaaggaaatgttgagggcagggaagcctagaggatgtgtctgtgaaatatgagctgattttttcttttttctaacttctttcccacttgttcgctatcatgagttgaccctagatgatggaaacgtatttgatcatgggtataactgagttttccaggaacctcaatcttcatacattatcggatctgtctttcatagacctcgaagcgcgcgtgttttcgtcttagaccttgatctcttcaatcctgtcttcaataagccggatcaacgtcttgagccctttcaacacccccaaatcgggaccctctcccaatgttaactttgaatgggcgaaatcgatcatcttcactctaactgatggtggcggtcccattctctcttccttctcctccaacacatttgacacttggcttgatcctgcgccttgttctatcgttgatgaagtagataatgatggtagtgttgatgcagatggcggtgggatagatgatgacgatgatgatgacgacgaggaaactgagtcatcttcgaaccaacctccatctgaatcaccttctcctccttcgatatccaatgcctcttgaagaactgtcggatctgattcataaacaatcagaacactacttcctacgaacctagcttcggtctcaagaaggatcgaatggatggtcgttaggtccaaatgaatattttggaggacttcgagtagaagggatgaagagagacccgacgttgaagatgaagttttaagtggaaagaatcgagcgataccagaagggagtgtttcgggagtcagagctttgccgaatgctttgtcggtcatgatcgatgtttggttggacggatcccagttctgttaagtaggacagtactgatacatattgagcatgatctccacaaaacgaagcgagagaagctagaaaggagtacgaaccgaaaatccgacgagccggattccacacgacccacttgttgtatcttgcgccgctttctccatgcgagctttcttttctggtgaagcatgctcgtcgtacagcacagtgcccagcttgacgtctagaacagacggatgggtaaacgcttgagtcaagtttgtcaggacaacactcttcagacatgcgcccaaaccgacaatctaatcagcatgacaagactgtattgaaatcctacaggtcatgtacaaacctcggttgatcgaacggcctgggcacgagtttcgctagtttcttctcccaaagcgagcgacttgacgtcgtgctggccaatttcggctgaatcgtcagctttgtcgctcacaaccggttcatcagccgggacttctttcttttctttgtcctgtgggatgcctccttccaaccggagagtgcctagaaactctggagtaaaccaccgaagtcttgtgagctctggccgagttgtcagggcttggtaaaattcgatttcttgtgcgttcgttggtttaaacagaagcgaattatctggagaaaaatgaattgtcggatgtcctcctacttgcgacattatctctttatttcaatgatatctaggtatcgaaagagcgagaaacgaggtgagaagacgatcgtggtcgttgtcgtcgttgagctaaacagatgagatgaagttgtgttagactgatgaattttgttacgtaagcgtgaatcctcgtgcaatgggattctcctcccgtgcgacctgagccatctttgtttcccatcaaacaccatcagcggcaacagcagctactacagccggtcttcatcatgggaatcaactacatgctcctcgtctcccgtcagggaaaggtccgtctggcaaagtggtaccaaacgctgcccacaaagtccaagaacaagatcgtcaaggatgtgactcaacttgtgcttgccagacgaacaaggatgtgcaactttttagaatacaaaggtttgtgttttcgtccgtttgagttggacttgcgtgttctctatgatgtcaaaagactggtacggtttatttcgaggatcgagtcttacccttcttaccaataaaatcttgcgtacatacttcaggtgacaaggtggtttacagacgatatgcctccttgttcttcatcgccgggatctcgtcgggcgataacgagcttgtgacgcttgaaatcattcaccgatatgtagaggttcttgatagatattttgggaacgtgagtctcgctgttcattccttagtggaagagttgaaaggcggctttatatcaaaacaaaagggatataggcaagcaggcccgagcaatatcatcaacatgagatcttttcagctctccatttcagcatcgctttggtcattcaaggttttgatcaagaaccatgtccatctaaccaaaccatgtcctcttctctctctttctttctttgttggccaatcaaccgatggatcacttgaattgatcactttaggtttgcgagttggatctcatcttcaacttccaaaaagcctatgctgtgagctttttgtcctctatcctttttctgttcatctgtatcgatcacattctctgaaggtcctagatactgaagacacaatatatcttcttctgtttgtctatagatcctagacgagcttataatcgctggtgagattcaagaaagttcgaagaagagcgtgctcagagttgtacgtttctgcctcttgatctatttctttctcgttcctatcactcaactctaaagcgcgcgcattcttcaaacgcttcatgcgaacatcaggttgctcaatcggacacaatggaagaagccgaaattacgtgagtgttttgctgatatatcgttttgtcattgatcatgactgaccggtacattgctctcatttcatcctccttgtgatataataacagggaagactccctggcaagatttggttcactaaaaggttgattaggctatctcgagattttcctctttcttttcgacagcgcatctggctcctatatcttctctagaattgtctcgagacctgtccgagctcatacatcgagcttctttttttctcactgcctctttatatccccgacgtgccaatctatctttctcgcttataaatatgtaaaattagtatccttgctttgcctcttttccttttggggtcattcaaaaaaactagaaaagtcctgaaccatgctatgcaacgtcgtgtcatcaattcatctttcggctttctccgctttctcgttttcgttgagattccaactcgatctcaagctcaaactcgtcaacatgtttcgagggagccctactcgcattcaccttctgaacgactcccccactccctatcatacctacacctaatcctccgcctgggcctatacttccgccaaggacagttccgctcgggtcaggagagactgtgagtggagctccaggtggaagggtgagagttgatgatcgggaagaacggaactcgttctgtctgtacgttttactagttctttgaataggcacgctcaacattcctcccactgttgccgctgccatcgtccctaccggggtcggaaccgctgttgctgtcatcgtcgatgtggttgtcattgttggtgccaatggtacgatggatgagataggcccatcaagaggattcgaggtgataattgatgtcgtttgagagatggagccgattgctgtatcaagtgaggaggttggagaagcaaacatccattcaaggatcgaagttgaagacgctttaccaacaagttccacaccgacatcgtcatcgttcgtctgtaacaccgatggcgatagagacggggatgaaaggtcaaatgattttgtagaaagagaggggaagagccgaatcttgttaaaaaagggttgtatggaaggtgaagttgaagtgaggatgaggatgaggaatgacatatgtatagagttatcataaaggattcgatcccatgcgccccatccaatcgaggaagaatttgaagtggaaacggtcgaagaaagagaagagaaaggaggatcagggatcaatctcccaataatcgttcccacgatctctcgtgctttttcagctcctgcgccgagtgcatagtcgatgattgtccgcagaacgagtcctattctttcctcttcaccttcgtgccttatttcgtttccatcctcgcgccgatcagagagagaagtcaactgattcaaaacacataatgaagtggccttcgaaaaaaccagtcccgacttcagccgctcagcttccgagtctatcagacccacgtcctctctgttggttgataagagatcagagaagagctcagctctgacaaatgttgagatcgcgttctgcgtcgctctgatgatggccgagtttgtcgtttttgtttcaaccagatgatcgatctttgaccgaccagaagtaaagctgggagattgagaacgagatgatggagaaagaccgtgaatgatgatcttcagaatagaatctatcagactcatcaaacctgctccgagctctcccaacgctcctagcatgttctctatcccgtccgcgtgttctgcgctcgattctcgatggatgagatggttgagtctgacaaaagggggtgttcgggcgaggtcctccatgccgttccagaaacagcttgtcaacgtctcatgaagctcgatcgtcagtccaagataaaatatccagaacgacctgctcataagcctgtccgatgacattgatcgtcgagaaatttgaggaaacgaccggagtgcatataagaggtaaatatgagcttgaaagatagtagtcgatgtgggagaggaggggattgattgagctagatggataaatcgagagagaaaatgctcgaacgagacatctgatgtagtgtattctgtgcaatcgatcactatctgtagtctttcggccgatgtgaatacaagagaccttttcgatgatgacgctgatattggtagtgatggtgggggaagaaaagcgacgaaggaacggagaagacttaatgaatggagtatacaaggtgaggccgacacaactggacttgtgaggagcttcttcacaatcttccgggcaggtgaatccaaagatgaaacggatagcgcaaggcgtaataaactggagaacgtagatggccggatgagaaaatacatacatatctggatggacggaaatgagaatgttagtgaaaacgaccgaatggttcgttttgcagaatgagaaatgatgaatgaaaaggtagattcaaggggatggtaactgacgtattcccaactcttctgatccatccagcgaactaaccaacccaactcaacatccgcatcttcgtgattgtctctctcgttcaacaaatttatttcggtgcacactaagcccacgctgatacacctttccataaacagaaacaatccattcggtgtgatttcccctatgatctgtcgactcaaatagctcgtcgtattgatatcacaaggcgcgtgaggccggagaaggtctcgagagaggaagaccacagtggattgatcggcagacgaaatgatatggttggaatctggagtacataaaatcttgcgccaggacgagagatcgtagaagcgcttgtagtgtgggtaatcgtggttggatgcggctgcaaatgcaccgaggagtcgatcagagacagacggaaccttcagcaagtcaatccatatttgggcagagacagcgagggcttcattccaatgcgcaagagtagaccagtttagaagataaaagattgcatgaaggggaatatccaaaggtagagaggagaggagggcttgagatccagaggaagaggaaggttgacgagtcagaaaccccagtacttcagaaaagtggatgaggttgaggaggatgagttcgatgcacacctcgggtgagatagaagaggagggttgcgaggaagtgtctcttattagatgttcggtagtgtcttcgttgtgtagagttgacgcttcttccgaggattcaatcagatgagtaagactcttgaggatttcgttcagtctctcctgaagaggatgatcagctatttctttcaacacaaacccatccactgccatatcctcctcatattgaccgcatttctctgtctctttggttgcgttcctatctggatgattgggccgagcgctgataaccgaaagtaaaacgttctcgaacgagttatttgatgaattcgactgagaaccagccgaaaggttgtacagataagtttcccaaccggccatcgacgactcctccctatccgcgactgctgataaagaggtcgagggatagccgtacagagagagcgtgatgatagagaatgggcaccgaagaacgaccaacgtagttgtgacctataaatgatggaataaaacaaagtcttgaggaaacatgacccaataagtgtgaatggagtggcctgaaagagtgcatacatccaaaggcatcccaatctcaaactgttggatcgctagaggtgaggttgagtcgattcctggcggcgctccgtccgagtctcgcaaaaaaggattatagctcaaggtcgatttgtggagagaattgggtttccaacccttaggtgctttggttgatggaatcaacggaagtgtcgatatcgtggccgattgcgtcaacggcgatggaggatatcgagcgttgaagagcaggtcaatctctgccggccttgttggagtctgtctagtgtggaccacgagagtgaggttaatttcggactgtcatgtagagagaacatctgtaccaagtctttctcgggttacaattcacacatgcaatactccgaaggcttacccatcgtctaaattcgagtcgggttgatggtagtagaacggccttaggccgagcggagtgatgacgatcgaatcgagtgatgctgatttcgggagtcgaacaacagcgagaaacgaatcgggttctgacggatatgtagcgatgtttgagtggaagagtaagctgggtgccatgagatgtggggaagggtatatgagctagagatggcagagagagacggatagcaagagaggcggatggaggaaaaacgaaaaggaaggtgacgaaggagaaacactgaattcaaattacatcagaacacagattctcacaagccgggtcttccactcggtcgttcatccgctcaacattgagtctctgatggcactgagtttcttcgttttgaatgtgaatacaggatgtgttgttccaaatcatgtgcgcactagagatagcggtacatagttgcacttgtcttgctagatgtcattcttggtacaattgtacattcatttcagctcgcaccttacacttcacactttacacctcggtccactcagtcaacgaaagagatttatgcagcttgaaaataggccgacgaagcctcgttaagctcgtcaatgaggagctgaccttttggctcccatccaaaagtctgtcgtgtccaagttgtactaaagtcctgatgcaactgcaaaaatatgccgaccataccgaggttgagctcgtgaatctggtccttggtgatcggtttgacattcgtgtttgtctttctacccaatacttcaacaatctccttgagctcgggaaattcttgaacggcatggacgaccgttcctggtttggctgtttcgagagcgagcacgtacagtaaaccggcgtcgtcggcatgacaggcggaccagtgaacaccttcgaggtagggcaagaagccagtctgtttgcccgttctgagcaaaagggcctcaaacatatggatttcatctgcgctatgggtgttcatcgccagacgtacaacaatcgatcttatgcctcggtccttgtaggccaaaacggcttgttcggtttttgctcgggttaacacagagctatcacttggagagtgctcgtcctgtccgggtcgtacggtacccgagccgctgctgagaaccaaagctttgcctgatccttcgagctcgtcagcgaggagatcaagaatcacccgttcatcccggtgttcggcgtcaagattgttggtcttgtggttcaacgcacagtgtacgactccatcgctttctctcgcgtgtttcttgagaagctctctgtcggcaatatctcctatcacagccgtcgctcccagcgcttcaatctttttggcagcctggggagacctgacaagaccagtgacagtatggcctcgagagacgagatgagggatgatatgggagcccactcggccagatgcgccagtaaggaagatattcatgatgtatggatagaactgatgtgtatttgcgccaggaaagtcgacttgcggagagatttggtggttgcgattgtttgggaacttttcccctcgacgatctggcatgacccgttattatatactgtgagcggttcaaatgtcttgccgactatcttgctggtcggcgatgtttcgtcacagagtgattaatcaccatggaatgatgaaagttgatggccgagcccgaaaccggactgtctattttcatcatccttcatcatgtaaatgagtaagagatcggtgtgaacccttacgagaggcagaaaaagaggttagtcatgatcttggaatgaatagattagcgcagataggaggagtcaaacgaaggaatgtctagcaagagtgcaagcacgactgggaggttcatcataggacctaggcatacacaatgatcttaccatacaatgtacacctcgaacgtctaagtgtaactcctattatcgtctttaataaatacaatcatttctcttcttcaatttatctgcagagggaacgtatggttgaatgtcctggttagagaaaccatcaactacaagcatggctcccacgatgaagcaccgtgggcaggtgtgactggtctgggacagatcgtagaatgatgatacccttcttttctggctcacttgcctctgttttcatcgacaacctttctctatgcgtcttagatgatatctcatgatttcagccatgtgttcgcctgcttacctgcttacctgctcacccgctcacctgctcatcatcgtccatcatcataggcgcgtgtaccaagccttgggcaaggcatgctagatggaactcttactccggacgtaaccctaacactcggcttgttgactcttgcacctaggcgtctctctccctgctcactgtttgaccaccttcctcaccttgctttggactcgacggtgtagacgacatactcaagacctgattacattgatcctgttcttgtccgttcacgacaccagcactttcgatatctctgtcctgctctctttctcgcatgcgtcgggacgtcagagtactcttcgtaggggatggtaagcgtgccgttccgttctgcccttctcttactcctttcctggtcacctgtggagataaatgcatcttgattgacaacatatgatggtctggacattcggtatcaatcggtctatctaccttttcattcttcctacgccctctattggtcgtcggtccattttctctttctagagggtgtcgggaaatcgaccatcatcacctcagtaagctatcgtttctttgccgtgatcgaccgggaggctcttggacttctataatcttctcgaccaagttggccaggtttaagctgataatgccggcttgttttcttctcttcagttcatcaaaggcaactatatagaacacgtaagacccacatcatgagcttctgtccctccttgctctcttgttataggaaacccctcggtagagacatcggcttccttccgcctgccggaagcgctcaatcatccttctcgaaacatgtctctctcccttgaactctccttatgcttgatgctcatccggttttctatactctctcaggtacaacgagtcttgcctgaggtaaccatcccggactgcctcgatagcgtcactgctaccattgtcgattcgtcctgttcgttttagatcccacgcggagatatcttccctttagattcatccgctgatcgaaaccttctgaattcgttcacttgattctccttcaaaacagctcgcccggcagatcgagcacatctcgacattgaacttcgaaaggctcatgtgattgtgattgtgtacagcatagaccactcgagctctttcgatcggttgggcgcctggtggttaccctacatccgagctcagggtgtgaacgtgcgtcgtcagcagactgatctccctcttcactctcttcgttcttcccaagtatctgacctcatccgaacggaacattctttcgtctggtttaactaggtgccggttgtcatctgtggaaacaagatagatcttcgaggcggagagattaccaaccaagagctcgaaagagagatcgccccgttgatgaacgagttcaaggtgcgaaagacttgatctttctttccttgaggcccaaacaatcatctcatcagttcatctctgtcttttccttctttccctcacaaaggaggtcgagacctgcgtcgaatgttcttctagggttcagcttaacgtggcagaagtcatcttcttcgctttgaaagcagtatgctacccattggccccgttgtacgattctcgtgaacatgtttgtcctctttctccttgtgacaagattgtagacttcacactttgtttttctcatcagttatcccatttctgctctcgaaatcctttattttgaaattttaatgccagacgttaaaaccaaaatgcgtagacgcgctgagaaggatcttcaaactgtgcgacgtcaacaaggacggtattctagatccgaatgagctgaacgacttccaggtgcgcgctagtccccgtctgtttgaacatcattcgaacccaatcagctaacgtctttgtctcccgccctgtcctcttcggttcttcttttcaagcgaaaatgttttggaacgcctcttcaactacaagagattgaatctctcctccgaataataagcgagtatgatccccagatggtcgatggcggcggtgtcaccgagtctggaatcgtctactttcacacgaggttcatccaacagggcagagtcgatacgatgtggaccgttctttcaagtttcggatatggagaggatcttgatttaaaagaggaggtcttgaggcccaagttcgatctcttcttttgctttcaaatatactgatcacgaacaaatccgaatgtctgacacaagatttctggttgtgatttctgtctatgctcagattcgatgttccctcagactgctcggtcgagctcagcccgagtgggtatcagttcttgactgaaatcttcgaaatcttcgacaaagtgcgcccttttcttactcttcgtattcgaaggatgtgtttttgctgaacaagtgcttatcgggctgaccttctaatttcttttttaattcaatcaggaccaagacggagcattgtccgaacaggagcttgcagcgctgttctcaacttctccagggaacccctggatgagaacaggatttccagacaccaccgttactaccggtgggaaagtaactttacaaggcgttcgtctcatcaatatatttttcttcctgtctgtttcagagaagaaaaacaacagagtctcacttgatcatcatttctgttccttcatcttgggcaagtgtagtggttggctcagtggagtctgacgacgttgcttgaccaccgattgaccctctcctacctatgctacctcggttactcctcccttccatcatcaaaagatttgtctacgactactgctcttcaccttacgcgaccaagacgtcaagaccggaaagctggaaaagtgacaagaaacgtcttcttggtgtatgtgttgggagcggccggttcaggaaagacgagtttgctcagagcgtttgtaaataaacggttcgaagaagagtgggagccgacaagtagagtgctgggcgtggtcaacggtgttgaaagaggaggccgtgagaagtaccttgtggttcgtttcttgacttgttcttttttcttcattgcatctttcgttgagaacatgagttgacgaaattagttttttggggttggtcgcgcgtagcttcaagagtttggatcaaaatacgaatcggaaattctccgaaatacaaagaaactcgagttggcggacgtgattgtatatgtgcacgatagtagtgacaccaattcattttcgtatatctcaaaccttcgcgtttgtccctgtcttttattccttatttgtttttgtcaagaaaggaaaggcgatgtgaactgacttttgtctgctccttgggagttgttattctcctgtctatgcatcggtgtaaatgacagcaacaacacaaactcaatcacatcccgtgcctctttgtcgctacaaagtcagatttagatctcgcacaacaggtaagcctaggttgtgtgtctgttcactatcttgaagaaatttggagatctaaaattttctcgtttggctttcaatgttcagcgccatgaggttcagccggatgtatactgtaaaagactgggattaccggtcccgatctcggtgagcgtgagacaaggccagacggccgatctctgggtaaatattctcttttgtgtttcttctgtctcctcatgggctcggacaacttacagttttgcaacccttgttattcacagagcgcgatatgtagaacggcaatgaacccgtgcgtctagctaccgctatcatttcctcttcctttacttgttttcccttttgaatgagatcgagcctcgctgacgatttgactaaaaacatcctactcatgaagacattcggccattccgaaatctacatcgtccagctcattaacaattcctagattacccaccgttttgacgacccttggtgttttctcagttgggacataccttggtctgagatggtacaagttgatcggccatccgaacgcaaatgggggaccgagcaattgggttggagtgataggccgttggattggacttggtgttggttttgttagtgggagaggaagagaactttgatgatgaacttcttttctatacggggccttgtgaagtgcagcgtaactttgagagtcacgagatcaacagaggaagaacattagctcaaacgcatgcgaaacaatcctaggagagacattggaccatgtagagaattcatagattagaaaggcgaggaaatcaatagaatctttttgcggttaatttgttatttcccgattttttgtccaatccgctccggccgattgatccgccttccatccgctctactttcctcgatcttgtgtccgttggagttttttcttgtcgctcacaacactcacacccgcacgtatacacacgtcttcgctattgttcttgatcaagagaagattgatccgagatgagtctcgctcgatctgtcctgacgtctgctgtccgcccagtcggtcatgctttccgctcaagtccaaccaacatttccacattaccctcgactgttctccgatcccgattttcctgtttcagcacccttagcccaaattccaacttcaagaggccactgagcacccagatcaacaactctttctccgcgtccctagtcaaggcaaggtttgaagctgggccgttcagccctttgttcagacagttctcgtcttctgttaaaaggagctcaactggccaaatccagttgcaggctgaaaggccgatcttggtccagaccgaggggtctcaatcctcatcttcgtcttcgtcatcttcaagctcgcgagcaaatatatcaacccctatagttgctaaatggctctacttcacatccttccttaccctgagcatcgtcgtcgtcggtggcctgacgaggttgacagaatccggattgagcatcaccgagtggaaacccttcaaaggaagcttaccgccattgaatcaggctgattgggaggaagagttcaggaagtaccaattgagtgaggagggaatgatgtatgttttcttttcctcatctcttttctttttcctatcttgtctgtatagagcagaatgattaatcgacattctggcctgtcctgttctgttctgcccaagtttgaacgctcagatcagtctgaacgagtttaaattcattttcttcatggaatgggcccatcggaacttaggcagatttctaggtgttacatttgttcttcctgctctattctttgcagccagaggaaaacttgttcgaaaagatcaactcaaggtgtttgctatggctctcggcatcggtttccaggtaagccgcctttccttcctctttcttccttacgctcatacgttgaacattgttttttttctttgatatcttgcagggtttcttgggatggtatatggtttcctctggtctcgacaaagagcacctcgccgctcgacccaactccacgccccgtgtgtctcaataccgacttgccgcccatctgggaaccgctttcgttctatatctcggtatgctccataccggactttcaattgctagagattggaaactcgctcacggaggaccggtcggtggcgaaaaggatggattgagtgttcagaagatgctgcttgacggagggaagaagttgacaaggttcagaggcttagtctgggttgtaggcgctatggtcctcttcactgctctttctggtaagtcgatactccctgttctttcatagcaccttaactaggttctcattcatgaccaaccatcatcatccatctgtcaaacaggtgcatttgtggcgggtcttgacgccgggttgatttacaacgaatggcctcagatgggcgaaggttatattcctccgatggaagacatgattgaccctcgatacgcccgacgagaggacggcaaagacctgatttggcgaaacgttttggagaaccctacgactgttcaattcgatcaccggatgctcgcttatgcgacagccacctccgtctttactcttaccggactttcccactctcccctccttcgttcggtattaaacagaagagtcaggttgttcgcttcgcttgcctcgggtgtcgttctagctcaagtaactttgggaatcaccacgctactttatctagtcccaatccctgtagcggcggctcatcaagctggcagtgtgttcttgttaagcgcgatgacggcgttggcggtggcgttgagaagacctagcaaggccgtcaaggaagtttgggccaagagagctttggtagagaaggctttgaaaaagtgattagtaaaaaggagctagattggttcatctcgtgtattttatagagctccattttcaagtataacatggatacaacacgttccacacccaattggacaaacagtacccgaagtttacatagaacatgaaggcgaaaccttggactgttgattctcctcatacctcaaagtttgggaccaccttgtttcgctgccttcaacttactctgaccaccacccttcttcggatctctgatgatgctcatgaacttctctggatcaaggactgattcagggtatgggagtgccggcctggatgtgtggagttcacctccgtcgacgacctttatgaatacgcagaaccgtgttaatcagagcgtgggattagaaacgcggcggaaagacagaggttctttgagattgatcgattagagctacgtacgaagacttgaccagtgatccaatcggctgtgtatcatcatggttatgagcctactcttcacttcaaaacagaaaacggacacagaagaaactgaccttcctcgctgaataggaaacagcacatcgaagctatgtcctgagtcttccccatctgtcccagagggattgcgttgtgcatcatcttgtccgattcatcagttcctagtttctgcattcctggtgtatccccaataggacgtaagtccggtcgggcgaacccattgagataaatgtgtcaagagagagagggaagcgtgatcagcatcactgtctagttcgcacacgttgatacgcacttggtgaagagtacagggagaaagagacttatctggcgcgacgatattactacgaactcctcgaggaccttcctcgacggcaagtacgttggaaagtgcgtcaacgcctgccttggcagctgatacgtgcgcctgataagcgattcctaaacacatgccaaacatagacaggtcagtcaatgaacgaaacttgactccagatatcgaagaggatagttggccaacctcggtagtgcaaagtagcactgatatggatgtaagaccccttagtttgccgaatgaaaggcagggttgctttaatagtattgaatgttcctaactgtcatgatcaatcgatacatcagtatttctgaggattgaggttatgtatcagagagtcaggactcaggaaccgaccaagtcaatctcaatgactgtcttgaaggcattcggtgaaagcagatcgataggggagaggaagtttccagcagcgcctgatagccaatcgaaccacaagagcatgagttgtccactcccttagctatgcaaacgagatcaccgaaacaaaaagagcaacaagatgaagcagataacgaaccacatatcacgaaatcgatctttccgaacttttctatacactttcctaccgcaaccttcattgcttcaggatctcttacatctgaagaacaggctatgcattcggaacctgtcgcttcagtcaattcatcagctgccttctgtagagcggccgcactgaatggatagcatagtttatcaacgttaagtctccctcatataatgaaacaagaaaggtcgagacgtactctcggccgacaatagcaactttgcagcccaatgaaagcatcttcttgacaattccaaagctgattccactacggcctggatataattttttttgatgtaatatattcaaacgatttcatatcgggggtagtcaagttttgtttcatagacaataacatatagtttgaatgagagaaagaggaacgaacctcctgtggagaaaagaacttttccattgaacaggcctggctgaaatgtcttgctcatgatctatctgttgcctgtgcgtgtgtgtatctgaaaccaaggaaagagtgattgaattgagatagttgtagcgatttgggatgagttatggaggatgaaatagatcagatggaaaggaaacaactcctgctggagaattccggttaacgcggtccggtctttaccggattagcttcctcaaatctcatcgttcttcgaattgatagatacatcatacatagactatagatcatagaatacaaatcatagatcatggtgaaaaggcatataatgatagatcaatcacctagtgttcaccagccatacgtccctgaagctgatcgatcgatcgatcgattgaacccagatccttgatcttgtcagacatctctggacagctgatgaagatggacatcgaacagaatccacaaacatacctcccttgaatcctttgggtccaccatgaacatcactcgtgatccaccctccatagaaatctccttcctgtgcctttacgttctctccgtctactaagcacttccaatgccctttgctttctctgctgttggagctggatgaggcgtagaagctgagatagtccttgatgggtttgaaactaggtgtaggagatggataggaccaaattcgagaggttaccgaggcagatggagagcctgatgaagagggaattttgagagtatgatacgccgctgttcctttccactttcagagtgaagcaacttgatcaagatcgaatcgagaggttctcgaggtctcgtttctgatgatcgacaatcggtttgacaggccgaagcaacaaacttacctcacaaaaagaactctttccgttctcaacgctcaacttgacgttatccgagtgaatggatgaaggaggtagataatacgttggtggatgactggatccacgataccatagccaagaagagtcatatggtttcaatatagttagagacacatgagcgacagaaggatacagacctcgtctccaacaccctatatgcctcccgagtggtagcaacatccacttcgtgtccatcagggtacacccatttcacctctagcaaacttttaagatttcagatcccatacgagtgatatgagccatcatgagtttccaaaaattctatcattcaattcaggtcgggatagaggaacgaaccggtccgtccgctccaacgcaggcgggcgggggtagtcccacacgttttccttgggtctgctgtttgtagacgacattggtcgaagattcgttgaagcgtgaatgtatgtacaaggacgaagagaacttctcgtattgtaagagatcaaagatgatgtacaccgagacattggcattcagatcgcttcgatacggaaacttatgaccttgattacttcacgatccccaagtatgtaattcatgcaacatgagaatattctaaacaggcatattaatcacttatgactcaacttctatagaacacaacctaaaatatcataaagaaaagatttgagagaaactgcatattgaaaatatagtatctattcccgaccggcagctcgagcagcagcctcggccgctcgtcgtcgtctccgcttgggcccaatcttgacgattaaccaaggcaatgggctggctgctaaacaaatccctgagagaaggacgaacgtccagccgacattcaagcgtgtgatgatgatatctatagttgatgttccaaccgcgcctaacgagcatcgcaacaggttgaactagacagtagagaaggtgacgccccatgagtatacagagtcttgcttctgtgtagaagagcgaagacttactgaagcggtgaccgatgagcctttgccggggaacaagtcaaccaccaaagtctgggtcatcagcatcatcgctgtgttcgagaatccaactgaaattgagacgcccatcaagaaatggagagaatttcaagtcatgcaaaatccaaacacctcttcaggaggaaatgatagctgtaaagagaaaagactaactgaagaaatgaagaacgactggtacagccagtgatgtctgagcatataacgcccagccaaacccaatggcactgatgtgcgttaaagcctgtagttcgaatccgaattgataagccaaaccgtggtgagtgcttaggggcgatgaagacaatggccctgatgatcttgaagcttaccacaagaaaaggcaatctcttgagtctggctcgctcaatcgggaaatcaagcggctttgaatcatctggcaactctcttttcatctgtcgataatcccaatccagcattctaccaggcaacagagaccctaagatacagcctgctccattggatctataacactcagaattgagattcagaagaaagaacaggttggatggatctcatgttgagtgcaaggaaataagaagtacgagaaaaaagggcatagaaagacttacaagtagcataaaccaatcttgatctcagaaaggccgtagatattcttgaacaaactagatgtcgcagtgagaatgcaatagaactatgattgccaagacaagaaaaacagaatgcagtgaacacgggttgcggggcacagtatagacatcgcagaacgagagaccaggtgtgtctcaacagatggagataggacatacctccatgtatatcagagaagaaaagaaaagcatcataaacagatcaggattgagcaaaagctccaaactttgcaaaggccgaaactgattccaggtttcaaacataatccttatcaggtcatgcatactttctgatttctatgaagaacagtatactatcggaatgacaagacataccatagctcgtctctctttcaaagttggttgagttgacttcgagcttgatggttcatgtgccttttctaaatcactgatcccctctcttttagcatcctgacgcgctctcctccctgtgaaaatttgggcaaaaggttggttgattaacggtggatgtatcgagccattgcccacgataagccttaatgtttccggaaggaagctatgtgtgtgtgtgtgtgtgtgtgtgtttgcacagagagaacgatacatgaacccgtttaaaatgtcatgttgtcacgatagcaattcgtattgggataaaacttacaaggcgataggaatgagagcagtgctgcttgcaatgaccaagaaccagaaaatggctctccaaccaaggtattgtgccaatatacctcccaggactgggcctacagaatgaaacgaacaggagaggaacactccgttttattcttgaaacagaaagttatgggagatgatgccgaatggaatgttcaaaacttacctatagctggcgcgagcatattgcctttaaacataacacgatttgcaagatgattagtagagagtcaaaaaaacatgaacggttgttcgacatacctagagagtaccatcctgtatgatttttcagacatgattctgtcagtatgattgacttcaacgactatgcggcattttatgaccgagataaagaagaggagagacctcctcctgaacaaacgacgtacccatgaaacctcctcgctcatgctgttcggatatatcagagactactcctgctccgatggcaatcactgaagaccccccaaatgcctgtacgactctaaggaaaaggagggcccaaaaggccgaagttgggaggacggcaatgacgatgcacgatgcaatatagattgccatcgtcaatagatagactggtctatattaagcaatatggtcaacaaggaagatgtttagaagtggtacaagtcaagattaagtgaacgcaagacaatgtgatgtgatataggacttaccttctgccaaacacgtcggccatgcttccccagaaggtaggggataatccttggaagactaaatatatcgagaccgtcaagttcatttcctctgctgtttgtttgaatgccgaagccaacaggggtaatgccggcacaaaaatattcgccgacaagggactaggacaagacaaattggagtggcatcatcaatgagacaatgcaagattgaggaaaaaaaaggcaaaggacctacgagaaaactcctatagaggaaaccccagcgacgatccaggctttctgtcgaggggtaaataccgaatgaggtttcgtcggtatcaccggcagagactcttgttgagtttgagactggtcggtattctcgttcggaagaggtccatctgtgacgggaatggtctcttccaaggacggcgatgatatggatgcgagatcagtttgaaaaggtgtggcgttttgtgaattcggaggcaacgcagtatgttctgagtggggtgaggacatgcgtaggagacgtgcgcgttcagcgacggttttctatcaaggatacaagcgcagatgtcaaaatcgaggagagtgttgaccaagagttctttcgtttaaaacataacctacatacaaatcacagacctatgacaagcaatccaaaggaagaaaggtatgaggtcaaggagaagaacggatggagcttgagaatcagcagtagatataacatagattagacgaaatgctctatcgtcctccctcggccgacctcctcggccggagccgaatccgataagtccaggtggttacgtgattacaaagatattttgtgatctcgtgatatcatcgttcaccttctcccccgatctttgtctggctcaagtcgctccattttgaatcccatctagatccgacattcacttcgttcaccagtacatacacttcatgctttctttattcacatcggcatctaggtccgtcgccactgctcgttctgttagagtggcgtccggtccaatgaaccacatcgctcgatccatcaaaacggccgagtcgactcaggccaaggaggatccagagcctcagagatccaggcagggagacgaggaaggcatcaaggtatgtttctacttctatttcccgttttcctttgcactgctcttcgttgtgcttgtcattatcagtgatagaagagcttaggcctgatcttcttccatcaatgactttgcctttcagaccgatgacgtagctgaatcggagtctgctttcaagtcccagtctggttccggtcctgaggagttcgttcaggagatggacggcaaagttggtttccttcgcttccttctttcagtccttgcttaaaccccaagatattcatcagaatcattttttgtttgtttaaactatcttcttctggtcagaagggagcctcggcccaggtgactcctgctaatggagcagcctccaagcccgaaggaggcatgggctctaccggagctcacaacggttaagaatatatcctagttctagtttcctttgcaaaagacaagtattcttctttcttcgcttttcctcccctcaacgctgttgttttgtcttctcgcttcgttgtagatcactatctgtatacatgttgtctttctttgtaacaatcgatcaaaacatgatgttgctatacagaaaggcggtacttctctagtaaacccgtccttctgtgttgattttctccgcctctatgaagaatattacaacgacggaaggaagaacaaaagcaaaggaggaagacgatgatatagcttacaaaaagaaatccccttccgtcaggtagaagccttccgtatctctctttctcaagccatagtgacctctttggtatcaacccccatctctgacgccatcgactcgaacacaagctcggaccagatggcaagtgtatacggaacggcttcttcctccaaaaccttatagaccgatggagcaaggggggtgaggtgtagagcgtggtcagtcaaacagattcgaaagatacagtaaaagagcgagaagagaaacgtatcagggaacaagggtggttgtatggatagaaacgaggatgtttgacgcatgtcttttcaagagttcggccgtcaaagagcgaacgcgggggaagcgtaaaatagaggaatccaaaggtgatacagagtactcagcgtgcctcttgtgtttgtttgtctttgccctctcgacaatcatgtttgtgcattctatttgatcgtcactttccttgatcgatttcgatttcgatttcggatttggccattcctcaaaagcacgtgaagacaaaagagagaggaagaaaacgagaaaagaaagcggaagggaaaagagaaagggagtgttcttcactcacaggttcgaggccttcaacaagatcggaagcgctcttcctgccccgaatgtgatccagcacaaagttcagcaagtcgtcgtcgtccaactcaccgaggaactcgatcactgcattgttcaagaaagaggtcaatggtcaaactttgactaggaacaagacaagcgtctcgaagcaagcctcaacatacttttgcgacgcgcgatcggttcgatcttgtgttgaatcgttgtctgtatagagagaaaaccccggacgacatcacaccatcagccaagagttggcatcgctacaccgtcaagagaaaaagattcagacgaacctcggcgatgccgtcccaatagatgttggcgttccaaagcccctcttgagtcttgggtaccttttgcgttcttagtttgaccagatccagcaacctttgcctctccttctcctccggtgtcagactctctccataatccaacttaaccaacacccgtttcttctttccgtcatcctcatcgtcctcatcgccaaacctgacacctccaccttctcctggtcctcccacggcaggatgggcaagagccttggcagcagcggcggcagatccaatggacaccttgattggaccagattcttcggtaaggataccggcagctttttgcttgattgccaggtcggcttgttcctgtctttgacgctctcgaagttctgcctcctggcgagcgagaataacgagttcctcagcttcagccttgcgatcgagctcgtccgcttcctcctctcgacgacgaacaggtgctcgttgagatcgccagcgaggtctaaatataaacaaatggaaaccatacataacgcaaaggttagctatctctctcgcatcgatggagaggagtcacaagagactgaaacgaaccgatcaataaaccaaagatctctaccagcttcttccagtctatcgtcatcgtacgctttgagccggtcgcgagcaatgaaaaagtctttctgatcactttctttcctgctctgctcgacttgggcttcacgttctagaagctggaaccgctgacgttccctctggtccaaacgacgctcgcgctgttaaagagaaaaatttgaaagttttaaatcagatgtagccatctgcgctttcattggaggaaaaacactcggacatacctctttgagcgaatccatctggtcccgccgttttctctctcttcttgcttcctcctcctcctcgtctgtcctctctggatgtccgttatcctgcccggccacgaaaccaactggcttcgagtatccttgcggtccgttgccgaacgcccctcggtctggtccgatcatctcgtccaccgactttcctagtcgggctgcttctctctcccggtgttctttctctctctgctctttgactcgttgttgatgttgagcggcaaccatctgttcaatccttcgtcgctcccgatcttcctctactcgtttcttctcgatctctctcgacgcagacgtctgtctgaaagcagagatctgatccagcacaacctcccgacgctcttctggaatctcttcctcttgaagatctcgcagatgagcagggacggcgtaaggatctggggcgctctctttctccgacgagctctctgggttggcggacgagttgagggcggtagatgaagttgaaggaagttcagttccgttgttgagagactcgaggatggccgttatcgatttgacagctgccagttctagttcttcgtcagcctgtagtaaaggtatatgattagaagaacagaaatgggaaaagaaaggtttatttgagtgctcatcagtgtttgcactgcgagcgagggccaagagcgagagggaattcttacatcagttcgaatcatcatcgattcgtagtcatccaagaactttcgagtcttttcatcagctttcacctgtcacattggaggttgcatcccagcggccaaaaacgaataagttatggaaaacaacactgatgaacaagagccaccggacgatcactagagtaacaatagaaacaaatcaacctacaatcaattttttacctgccccgtgtgtttccaagtcaggaagttccacgccgtttagaacggccaacgctcgtaagacagaatccggatcttcaaacctatcaccaggtctcatacttagtaatgatacagtcaactttgaacaggataaatgcgtactctgcgaatccaaacgcttggggttttccggtcgctcctttgactcgctttagatttcttaatggtccacaagcctgtggatatcagttcgaaacaattattcattaggattttgacaaactctttgtatgcagaatcatccacgtttcagaaagatagaatctcagacgtacgttcagaagctgttccaatacgtgatccaagatcccagaagcgataccacctacgaacaaagtcgtttgaggactgagctgatctgtctttcctgctggggtggacgagcctggagtggtactaggattggaattcgatccagaaccgcttggtctgtttggtataggcgaatatgactggttcgatggtgggccaggaggaccattatagcctggaggaggtctcgagaagtcgacggctggataattaccatgttgtcgtggaggaggttgaccggtaggctggtagcctatacctggtcggctattttgatacgaagattgttgctgttggggttggtagtgagatggacgatatcctcctgattaaacgaattcaccaaattagtacgcgtcgagcagatgtaggagataaacaacgaatgctaggttcatccatcatccattcaccatccatcagctttcaggtgaaggtagatggtatcaacgacgagcgtagtgaaggaacgagctgaaagaaagttatttaaacaagcaactaaatgaatgcattaacgcacctggtcctccgtacatttttgtcagttgcctttggagtggatagaagagaagaaagaaaagaaagagaaggggacggattgaccgatgaaagagacttgatggaagttgttaaaagaggttcttagagagaacagacggctgggcttaggcaaagtagatgaatgacataaacatcattcatctacgatgtaatcctaatctgtattatatattatccgtacatatgcatgcaagtctcattttgaatcagatatacaccagtcgacagaccagcagaattacgtatgatcaacctaggtactatatgtattggtacagagcaagacagcaaaaaaggaagcgcgcatgcaaagagaatgcaagaccaaggattgagctaaacacaatccagaaagaagagtaagaaaataaagagaattacacctgttgagaagatgagcaagacataattactaaggaacagcaaacgagaaaaaacccaagaaagactagattgagcaaaattagatcagatggaaacaaagaacaagatcgaaggtgatagtcttaaagattatttaagatagaacatcagaggtgtgttggtgggctcttttgtgcgatttcaacggaacaggtggaagcagaatgatatgtccagcttcgtctggccagacactcatcgacaattcatcaatatcgtgaagaaaggtctcgatcggcctgttcaacccatcgtcctgttcggcaggcaaaagatcaaataaatctttgtcgtcctcatcgcgaggactaaaagagcagattgaggtgcttgagatcgaggtcgtagatgagctcaaacgcagacgaggagagttatcttcaacagagtagagcggggtgatggggaggggcgaaacagatgaatacgacccatcttcggagcaagagctatccgatctctccataggcatatatggaagagttcgacttcgaggtgaaagcagatagctggtggatgagccgttgacagacggggcagggacgatgctgtattttggaggaggggaacagggaggtacagcattagggttgacggagaaaatgtatctgtcgtccagagtgacaggtacgctagacactcgacggacaggacgccctgcgcgtgatccaaagaccatgtcaacgttccttgagggtcttggcggaacaagagagcctgttgaagtgagaggcataggatcggaggcctgtcgaacagtctgcaaacgggggatgtgcttggaggtgagcacaaagcaaggattccgtgcacgagtagggcaaagaaatttagggacgtactctttgcttagtctccacggaatggctgaactcgctgtcgtctccgaggtctacggtccaaggcaaaggctccgtaacacggttggtttggccgtgcatgaccgccggaagtgtatcacggatgtgttgcagatgtgttgccctgcttggcacgcgcgatacatgcttctgtcgctgtaaggttgaagaaatcggatggatgatggaataggccggcactctcagattcgacggactcctgatgggtaaggatgaggacggaagagtgttggtggaagggcttttcgtaaggttccgcacataccgaacgctgggaccgggggaagataaagaaggagaagggatgacccgcagataagaatcaggatagaaaggcggggctgaggttgggtctgaacgggcgagtgcatgattagatttgtacatttgtgttcttgtacgaaggactgatcgagaggatcttgtttggacgaaacggattgcaaactgtcgaggataaaggtccaaagatcaaagatagtgcccaaagagatcaaaagatggagacaggatgtcaaggtatatccaaagaagaatcccaaaggtacagtcaaggaacacagaaggaacgagaaaaggaacgaaaaagaacctgaacctgaagcggggaggacatggatatatatgagtgtgtgcaaactgtatgcctgaaggtgtctctggctcggtggcttttctgagtgctggtatgtgattgtaagaatgacaccaagatcgacggatcgcctttcggatgttcctctattcgcgcgggatttgctctttagacttttcttgcctttcgtgttcgattgtttacaatccctatcgatcggactaacgcctacgcccagccgagctcggtctgaaagggcctgcctggatcaactagatcagcacgttgccaatgatctttccttccatcatatattctcctccacctgtacgctctctctcagtgggatcaaccgaccaaccgctttactcttttacagtttaaagatgaggcgtaaaagaatggattatcaggccgacgggccaaacacgggctgcaaaaagacttactgcgcgtgcagaactctcggcccgagccgatcaggccaatatgacgtgggcatgtggcgtcgattctaacctcgtgaatggaagcgagttcaactgccaagttatgctgtgctattacacccagagtaaccactttctcaacggacggtccaactgtccccatctattcccatctcgtcttgctgtcgactttcttgcttctgctagttcgttgtcgcctctaacacttggcctctctctcagagatgtcgtcctcaaatcaagacgcatacgatcaactacatgcaatcacttgctcatcctctcccgctgatatagatagagataggcgaattcttcgagaaactaattacaacgtccaggcaagttttataatcaaccgatacgagtgtcgggctttaccggttctaacagcattttcgatctctccttgtgacgtcccgtcgtgtacgtcttgctactttactacaggctgctcttgaagtcattttctcagctccttccgaaccaacaaattctgctccgacagcgtcgcgagaagcaccttcggcttcctcaagtctttctgcccgtgctggctcttatcccccgtttaggaacgataacccgaccgatcaacttgcttcttcctcgtccacaaggaatgacggtcagccccagcctcactctacagaagaaggcatccggcccttagcaggtctgagagtacccagaggtctcagagggattactcgggtcggggtgggactcggctggacggtatactccatcgtgctctggccggtagggatcgtttggagcgtccttgtcggtggctggcaatttgttggcaagttcagctcttgttgttgtctctggactttgagaggatggtgagaatacgtataggcatagcttgctgatttctgtattgcgcgtatattctcttttcataatactcacagctcgcttcctcccaagtgcattcctgtcgatgctgcccctcgctttcctgccatcagtagatcaatttcgagcgaatccgtctaccctgcctagaggtccagcctcgctccggttcttgcgctcactggagcagctcacccgtgctcgatcaccatcatcccttcagtatccatcatcagatcatgatggagatgaagtgaaggacgatagcatgtcagctgaggaggacgagaaggacgcacaggccgaactgccagagttttttattggaaaatacaaagatgctttagaaaaagctaagaaagaaggacgaatcgccctcgttggactcttctcgagtcagcatgagaaggatgaagatttcaaaaagtgcgtttctccgtcgctttttgattctctcttaataggatagggacttttgaaaaatcgattgacgttttcttctccatcctgtttcccgccggcttctcaatagaactgttctgaccgacccagcactagtcgatactctgaaacgacataacattattttttgggcaggagacgtgagcgacaaggagccgtaccaaggttagtccaaaataatggatatctttcttgctgacaatctatttggagtacattcatcggtcaccaacataggctgatatctctcttcttgaacgctaatttatcggctcacatctcgttgattcatcgatcagtcactcgtttgctccctccaacgacatatccttctctgacattcatctcacttctaccacctgctcggactcgagcgtctgccccctcatcgccacctctgaagctgaccgttctctctcgtctagaaggaccatccaccacagcctccgatctgatcaacacgatcgagcagtccatcctcccaagagtgtcagccacactgaaccggatccatcgagagatcaggctcagagaggaagaacttagtctgagggagatgcaggatcgagcattcaaagaagcagaagtgaaggatcttcagagaatcttggctgtgagaagagagcgagaagagaaagaggaacgggaacgggaacggctcaggaaggagaccgccaaggaggaggaaactagacggcgaatcgcttacctccgctacgctcgccgatcgttggtccctctggccgaaccggatcaagactcgataggcatcactcttcgagttccaccgaaccagcggccgttcaaacgatctttccctaaatcagcatcaatggagactctctacttatgggcagatacgttgacattgcccgcagaactggacccggcagacgatccggcagagttcgacattgagacatatgcccatcaatggtccttcaaactcgcaacggcttatccaagaaaagtcgtctcgctggacgaggcagacggaacagttggagctagtcagatcctcaagaacggagcaggtgtactcgtgttggaacggatcggagagactggaaggaaagcgggtggggatgatgctgatggagatgagaaagatcaagactccgattgtgatgaaagtgaagaggatgacgagatggaagaggatgatgatgagtagatgccatgcttcacttatacaatcatagcatacgatgccataatcatgagtcaatttagaccccaaagagaagtatgattaactatagacatgtagaacggaacatcatataagaacaaagcacaatttagtagggaatcggaatgacgttcaacggggtcttttttcacagatcagaagaatcgactggacgaggaaggtgaaaaggaacagcaaacaaatatatagcggagataataatattgatctcatgataagcagagatagagatgtagtgatcagggcgcgaagacaaccaaagaaagtcaaaagctagctcaaagccttctgttcaccatcgatcacctcccaactgagcgcccaacagacccatctctaaaccattctcttgttcgttcgttaccttcgaacaagatcccatcgtcagccttggtctcaacaggggagacgaagccccttcccacccaggtttgtagggagatagaggtccttcgctatccgcgctagacggacagatgtcaaattctagtccgggcgggtttgagcgcgcgtttgccgtggatcgtagcttgtagatcgccgtcgatgtcaaagactgagagggaggcgatgaacaaggtgaagggtgggacggggtggtgtagaggatcgatgaggacgagacagaggacggacggtcggctggtagaggggtggaaccaaacaaaaggtcctcagccgaaagatgtttagatggagtagaacttgggtcgaacgagtcttcgtctgtataatctgcgtcgtcgtcgtcaccatcatcgtcatcgtcgtcgtcgtcgtcgtcgtcatcgttgtcttcttcgtcgctcgagccttcgtctaaatctgtagtaggcggagtcgtttggaaaaaattccatgattttccgaagcgatcatcgatagagagatcactttttcgacaagacgtcctcgacgccgcagattgcgaatcaaactgaagaataggcgaggacggaggtgagctgaagaacggagaggcttggaaaggcggcgaagtgattatttggttgatggatggacgtaaaactgaggatggatcaatcattgaagaggacaagctatcatcactcggttcacatttccaacaaaaccattcttcgtctaggtcgtctggcatcaaccctatgcaggacatctacagtttccgagaaacccggaataaaacaacacatgacgagaagaatatcctgtcaatttcaaggtagacgaaggcatatacggagagaagaacgaacgtgatgccaagtttgacaagaatcacagttgaccaccgcttcatcctccatctcgcattggcagaaacatccgagaacatcctgctcattgacgatgacctcctttcccgaatcttttttttctaattgaacacacgataaagaacctctcgtttgattccttagcaaaagcgcttgtcgggcatcagctggatcaaactgctttccgtccagtcccagcattggtcgagaaaggccgtatcggactttgggtcgtttagcgacctcgtttcgtagatcgaatcctgtctttcctccaccgccaccactgatctcattttggcgagtgctgtgagtggattctacagaagacgaagaggtcgaccagtttctactcaagggatggtccgacaatctttctggaccattgaagtctgattcatcccaagcgtcgtcatctaagtaccgaccaactgcctcgaggacggctttccgtctttccgcttcaactcgatgagcctctatagccgaaaatgaccagggataggacgtatccggccagtcgggttttgaaatagatggtgtagatggtgcgatagtaggagtttcgcccaattcggacaaactcgattcttcaagaggttcatcagaattgactgaaccgatcttgagcattgttttaaaagtttcaagcgataccgcaattcgacctatgtccgtcattttgacaaccccaagcgtcgaggaagagacgccgtcactggctagagagcccgtcagagcgagattaggtgtgctcaaagaattgtgcccttcgaaagccgccaatcggcttcgtcgagtctcgtcgcttctcttcttcgatgcagaagcgggctggatcaggagtccatgattcgagcaaaacgggaggagcgaaagggatgaccacgggatggcagcgggttggaaattcgattggtatgacggtaaggaaatcgaaagggagcgagggactcgctgtcgtgtagaggacgggatgagccaatccatgtccgttgacaagatctgagcggttgagagggatgcctttcctgttgacagcaggtgaagggcgggagcggagaccgttcgtgggatttgacgcgcgaagggtgaactagatcgcgaagaagagcaagatgcggaagaagaaggtgaagagagaagaaattcggttgtggatgagcatgttgatgttgatggtgataaagttgacgaatacatatgtgattccgattggtcttggtcttggtcttcggacgacagacgacaaaacctcttcccctcggtcttctcccgaccttcgtcatttacctgtttagaattcttcatctcccacaagtctagacgccttccttcccctccttccccggccttaacatccactcctttccctgctcggccttccctcttacttcgaatcagccataggggccggctagcttccttcatctgagcctcctctttccactttaacctgagttggttgagctccccttctaccggagggggcgacggagcgcgtgttgattgaatgggatgcgacacatatgaaacggatggaggagcgattgatggaggaacctctaactttgtgacagagcaacgttgtgtgctactcccatccttcgaagcagtctttccattctcgacgtggaggacagtcttcttagtacatcttcgggtggaccgtgtgggtgtctcgaagtaatcagaggctgggagggttgcagctggcgaagaagagggaacaagaggaaggcaggagaaagaggcgagcggggatgttggaggaggagatgaggaagagggatctgggatcgatctagagatcactgatatatctgagtgagaattgagcggataagcaaaggacgatgagacagaaggttgacaagactcgaacggcaagtaataacccgaggggggagatgatgtctgataaacacaatcatctgcagaatcgacggaggttgctgaaggcgttcgatgtaattcgatcctgatggctcaaattcaattccacatgcccgatatgaggtgataggaacgcattttcagcaatgtcattagcaaccaatatataaggtaagacacccaccgagctgtctctcctttggttctgaatcggctcttaacaacggcagacacgctatcgtcgctgctgttctcagatcttccggataggctttgaaaatgtcttttttccgtttgagctacagaagaaaccgaaagagctttgcgattcgcacgcgtccgaggaaccgataaggggtaaacggtcggactgaaggagagatgagctgaggtgggcccggaggcaggtgacatggccggaggcgggaaggaagactgatggcgaagagaacggacagggagagggaggcggggagagtggaagagagtaaagctgaactagaacgtttgtacgtgtgaaatggtcagggaaatagtgcgaggtgaagatgaagagttgaaggacgcgacttacgctccaatggacgtcaacaatggtatgtcctagggttatgtccaagatgagagatagagagagaagaggaggacaatagaagagtgaagagaagaagaagaagaagaaagttagaaggacaaaagaatggaaaggtaacaagaaagttatgttgaacgagtttctacgttcttatttaaaagtcgccgctaaagaaaaaaacctcgtaatgcacggcgaagttctcgactatttctgtttcggtaatcaaccacattttatattctccgttttgttttctctcaattttttggtctgcgcattcttcaagctctacttcttcttcttgggcatcttgggatcagtcaggatttcggcgcccgtcgcggtgatactggggcagaaagggcatggtcttgagtatcactctaaattgaagatgcatgcaaagaaaagaatgaagaacttacaggatggtctcttcgaactgagccgatcgctttccatctctgtgttgtttgagggaatggagacaaaatgagcaacatgaattgtagataaagtcaaggctgaatgaaaagtaaaagaacgaaccgagtggcagccgtccagtcgtccgaccaatgaatcaaactgctagctccagcgttgatcatgggttctgagtattttttcaagccaagagatgatcagagggtgttcttcgacattgtcatgtacgagacgttcatgaacgagacgaaccgattgtgaagatatttccctctttcatgaaaccaggcatcttggactttccataatgtaagactgaagaaacgatgtgagagtaaatcagtttgagaaatggacaattcaaatagtgctactgataggagacgtctcactgttgggaccacagtggaactaagaaagtgaccggaacaacacacgaaacagacgaagtcagcactcgggattatgatccttacgacctacgcgaaagaaagctctaaccagctgattgatcccatgtccagtatatcgcgtcacgattccatatcctttaggcttgactacactctcgatcacattgccgatttcactatatgttttcaagtttcaagcagatcatcagaatacatcggacaatag

SEQ ID NO: 1800 - DNA, 687 bp, Xanthophyllomyces dendrorhous
ctggggaggcagaggaggtttccggtcgaacttacgcaaacgcaactccaggcttacatatcgagattgcttgtctgagagactccttggaagtggccattagatcgagcgaggcttgatcaacattacctactgggtactgcaatcattcaatgtatacatttgaagagaaaggatcagctgaattcgaatataagttgtctagaccttggaacttacagtcgcattgagatctccatggaaacctgagttaccaagaacacgccatcagtcagtgcctcctgtaggttcgcttcaatagccaacaaacgaggaatgtttgggattccgaacctttgtaaaagagagaaacatccaggttgacaatatcgccatccactttaatagatcgaaaaaaaacagggaaaacagcaaatcagcgatttaccgtctagacaggaaaaataatctgagaataatcactcacgaagctctcgttgatcgggaataccctgcaaaagagatatttcaaatattgacagaatgtattagctaaaagcagaaaagaaatatggtaatgactagacatacatggcagatgacttcgtttacactcgtgcaaacactcttcgggaacttccggtatcctagtggactggctatggtccaaggaaatccgatgatatgcaagtcaatcagtgatatttc

SEQ ID NO: 1801 - DNA, 4397 bp, Xanthophyllomyces dendrorhous
cattgtgtaatcgcgtgcatagaagtaattccaggttgaattttagatatctgagacacacctcgatatccatcacccgctttgagattctctcatcgaatccaatcttgaactcgaagtctccttctgcaggctttccgtttctatcgaccattccacaacttgggaagaatctaccgtctggaccatgaccagctggcccctcagctttacttccctctccagccgcgacaataacgccatcagcttctccattaacctccttcttctctgatgtttcactgatggcttctacaggatccgcctccccttctgccagaccgttcatcgatacttcttcttcgatggtgccggccacaggcacgacggcctttgctcgtttcttggaaggcagcgggattcccttctctttgagaatggtctctcgaatcgtcctaggaagcgatcggaagtgaggggtgatcttagttcgataaccggattgtttgggagaggcgatcgtaggtagaacgtctgggatgagggagagatcagtgtctacgatgatgaaggaagtttatgttgaagtcagcgccccatacgcgtcacaatttgatcaaatgaatagccatacttgagaaatacttgaacgcttttcgaacggtctctcgtttccaatccaactgagtctcgtaagaaatgttttggaattggcatcctccactgagaaatcgatgacagagcagaaggagggtgatagaaaaagtagattagattccatgtgattcgttccttcttttctcatacgcgcgcgcgcaatatttgcacggcaataagcatcactgaccatgtcccaaagtatttgcaaccaacaccctgcccatccttcaatcgtagcttgtcgtttctctcaatgacttctacaagctctgccaatgaatgcattcttgaattcttgatgactcggactttgatcagctcctctggaagagcaaacggtgtaaggagggcccattttcgagaagggttcgcgggagaatcatacaacgacaacgagtcacctataatataacgagaatcatgacgaaatccgtcagatgttagtaccagtttcttatgagtcggtgtaatatagatatatagatatccttacctccagatccaaccatgcccacccggacgacaacctccatgccaacatctaatggagattcccaatcaatctcttggctctcagcctcgtcgcagacctgcttggtcaagagtaactgaacatcgttccagagtacttcgtcgaccaccaggtgcttgtttcgtctgtttgctttcttgccctttccctggggcctccgaaccgaagcagggataggtttggaaattgagctagaagactgcgaatcgggaagagctgcagagattgagttagaagtagaatcctcaatggatgaaggtaagacaatggatatcgaggaagggtcaggagaagattcatcgagtcgagctcgtttctcatggtggtgtttgggcgaggacataggagacctcggtctgatagttgaagattcagacattgcacggaggatgccggaggcggaaacctgtctgttcaagtgaagcgctggtgattttgttattatatgttgcaggactttcgaactatgtcttgctagcagcatgcaacaagcagtagagtaacgaaagacaaggagaccaacagaaggaagggaaagagagaaggtaaagaagaagtagaacggcaactttcaaaaatcgttgttttttcttgcaccaatcaaaatcatgtctttgaaagttgtaaccatgacattgttacgtgtagccatcacgtgactgagatgggtgaagtctctcacccacaaacgaccgaatctctcccaatgccctatgaagcaccatcaccggctcgctctcatctggtttaagaagagaaaagatacatgagagatcaaagagtgagatgccaattcggatagattgtaaactagactgatttcatcagttgaaggccgaagtaggaactcaccagaacggttgactttaccaatcctgttggcagctttccgggtcaactcgaagaacgggtggctttgaggagcaagccggtacgaactctttaacagtgtatccgaatgagaattgaggtttaaaaaaattctattggtttgagagatatagataggtttcttgtaagagacatacctcggcataccacgtctttttctgtggatcatccacaatcttcaacacttcattcattccatatacctgcacaaccgccttcgttctggactcaacagcttattgtatttattgcgcccgaccaaggtgcagaaagttcagtgtttttcaaaggaaaattcggtatccgttaagagacgatagagaagggtacggaccagaagaagaaattaatgaagtgagtgctgtacatccaaccccatgtccaatcatcactacatttttcgcttgaccgattctataccggatggtaaacagattgataagtgataagattctatataaagaagaggtaaacagaagaacaaagaaaggacgtactcgacgacgtggtcccaaacatgttgcaagagcgacttatagctctgtttagcaaccttcgggctcgaatacgccaactgggcataaccggtgaacaaagttattacaattgcacattactatggaacacggttttagtgaacaagaaataagacatactccgtattttaaagagatagggtattgcaatggcaaactaatgtctattactccacactctcccccttggcctaaaccaagcgcagattgatcgagcgaccagttgatgatctcgttcgaacagtcgatcttcaaaagaatttataatggttgttagcgaatgagaaatagccgtttgttcgacatgggtgagaagagagcactaactagatagctcgatggcaactcgacattgcccattggaccactatcttcaacagacaggtttccactacaacaagtttcttcatcggtatttatccacacgtcctcagacaaacagaaagaaaggcagaagctcacatatcatgaacaaacaagaccaaagtatcgatagatctaaacacgttcatcctgcgccccatgcatatgtgtgtacacacaacacaaatgatgtcagccacaagaaccttgacgtcgcgcatgtttccttaatgaaagactcacgttgtatgtactagaccgtcatacacctttgccagctgagtttgacttagtggtaggggtaccatgccatatttctcgctcaaccattctctccggtgggaagagatgatttctatatgcacatcgtttcatagaatgaaagcatcattgagtactaagtttgcttggacttaaaataatcaagcgcaacgacttacccggtagttctgatatggatcctgtcatcccttcaaaagctaccgagcgcatacgcaagtgggaaagagcaaggaatttgtcagaatctaaaaggtcgacatccttttcacagagaacagttcaactcacaatcttttggtggtttatgacctggcaccaatagtctccaatacttgctttggacctttgcaacctcatagagagtttgttccgcggagatactaggctgaagttttgaaagcatcggtggtggatctccaagcaaggtctgagtgcatgctgccgcacattcagctactgtcggtggattgtatcctcccttgagtcggccgtatatcgttagcagagatcgtgatcaaatgaatggatgaatggatggcggaggaaagagtaacagggtcggccgacatacctcaagagctactaccactttgccattcgcaagagtacaaagaagggagagtatggaagcatatcctgctggagtgacatcaaagccacccaatggatcgcctcgagctgcatcgaatccagcagaaactatgagatggaaagaaagaatttcattagttcaaatgatatgaagcacatggcatcagagaaagataggaagtgaatcaccaaagataatttctgaaacaaactctctcagaattggcatcacaacacgctcaaatgcaattacgtagtctgaatcacccattattccgttccaaggaatattcacgttcaggccttctcctttgccctctccacaccactccatgccaccttcaggagacccaggatagaaactcccgttgtcatatcggtgaagtgaaacataaaggatcgaatcatccgtatagaatgctcgctgggtcccgtttccttcattagttagaaaatatcggattcactaggggtgagctatgtaaagtacatcgtctgtagagacaaagagcacataccatgatgcacatccctaaggcacaattcatcggatcaaaatccac

SEQ ID NO: 1802 - DNA, 7785 bp, Xanthophyllomyces dendrorhous
atggtttatctataccattcgattgtacaacagattctatagatcgaagaggcgaatttcgtgagatcttggatcgagtgggtacagttggaattgcagatgcttgaagagagctaggggtggtcgagcgtgttgttcttacagaggatgctttagagttggtagctgaagcgaactggtgattagattctgtccggtttgtcgaaggctgaggagacgtggatgaaacagatatcaccgaggtagttggccctgatgctgccgatgaaggcagtggtggagggtccaattcgagttctatcatatccaacggatcgtcttcctccatgttgtgatccattttccttatcgttatagaaaaacaaaagacttaaagatgtatcgatttaaacaattagaagaagtcaccgagatgggcggacgcgttcgaaatgaccggaaggagaggcagtatgtactgtgacgacaatcgacggtgcacaccaaatggtcatgatagctttagcttcaggatctttgacgctagtcctcattatgactgacctagagaagacaggactagagaaacagccgaaagagaaatcaaggtcttcaccaagagcgacgttgagagtcggagaaagaagaaaagagcaaaaagcgcgacccggaattttctgaaatttcgatcatcgctgtcttcaccaacgatcaacatctttcatggcttcttcaagcaatttctcagcctcaaccacatcaagtgagatacaagaggccgccttgatatccaaatcgctgtctcctagatgtgttagtgcttcgcaggttatgactcgtcatagtttgatggcagctcacctatctctcgagtgtgtttctgccactaaatcagcctttcgaagaacgagagagtgcctacctgaaagtaatctctcagagcacctcatcgtctctgtatcttcggaaactagtcggaagattagttcctcaatattttgccgaggtaggtgagagtttgttcatttggtcagtatcatcagtcctgtacaagaattctgattcgctctacaattggcaaccctgcatatatcagttcaatgctcttcaggaaaaggctgtagacgcgatctgtgatctttgtgaagattctgaaaaagaggtcagctagcaaacggatgctcttacttccagtcgtactctatctgattactaaactgctccttccatcatatctatgcacacagattcggattttaggatgtaacgcgttcgagcaaatctctcgcgtagcaaattcatgggtcaaaagaaatacggacgtgttaatccagctcctgcagattggttagtgttctctactctctgtgatatgtttccattgatcatgctgatctaagtgttccgttctgtcgggttgtagatatggaagatgaaattcttatccttcgacgtctgattgccgcccatattgatatcagcatatctgcgttgagcgtgatcattgattcgttggcagatccgggaatggaagttgtattgaagtcaaccttggtggacataatcacggttgaaggaactcaatggaggaacaagaacatgccgtcgacatctaggtctgggccaggaatcgactcagaaagcgaaggaggccgcgttttgagagaagggttatatcttgttcgtacctttcttttcatcttgttcacatatctcagtactgttattacaggactgatctttatcaatcggaatgcgaaacatcttataacagattttatcgcaatcacctccgcttgctctagcagagaaaatatttagccttcttttccttctgcccctccctacaatcgctcgacgcaccacccatattctatcatacagctatccatcccccctacctccgtctctctttacaatcgctcagcagtatacatccacggcaagacctgagcttgttgaccctcgctcttttgttcggtattactttgaacaaccatccaatccattcagttcatcatcggaagaagttgacctggaactaagccaggagaggatactgttaatctggatcaagcaatgggcggagagggagtggagtggaactttgaagcaggagatagaaggcgatgaagatacttgggcaggagagataagggagaaggagaaaattgtcaaagatggaagagagaggtggcagagagtattagacaacattgctaatcgggtttcatccaaagtattggttcgtataatttttctctcgtccaacctgttcaatttcggttgttttttgcctgaacgtagcaaatactctttttgctctcggtttctgctctcttagcctctattgcgttcaggacgacgtgatagaaacggactaaacctcccttttcaagcactggaaacttccatgtttattctcttttatctatctcggatcgtgagtcttcgtctcatctgtctgtatcagggtcgtgatatgtattccctgcctgacgaatgaatcacatctctgtttctttttcactgatcacttgtacagccctcagttaccaaacaatttatcgatccaagctcaccactggttcaatacatcaaccaaaggataggtcctggacgtcctcatgagaagtctagcggaagtttgaggctagcgcagtcgaacgtgtggtttcttctcgatgtgagttcgtccgttgtgcgtccgtatatcagttcgataggctcatctatctttgctccttgacagttcttccgcgctccacttcccacttcaaataatgctccttggtcgaatagaagaatttctttttcatgggaaatgaaacagtcttcaaatcctcctgtgaccaatgtatcgccgaacattattgcgccagcaccgcagtcaatggcctcgacacctgtgatccatggccgaacaatctcttctaggacatccccagctactccatcagctccttcggtgaatggaatggatcgaaagaccttgactgggacagtcccaactatctctccttctgtatctaaacctcgacctgctactctgattcattcatcttcctccgaccttctacaacgcttgataccccagtcatctcagggtagaaaagacttgaatcactctcttccccgtcactcatcccagattcagcaaagatcattctctgtccctaaaccaagtactctcaacgctcagaaccaacttcagtcggaacaagcaccaaatttatcgaacgcagaagcccgttcggaccctgagcttcgactcaacctctccaaacatgaaggtgagtttccttctgcaaagtatctatttgtacaaccccaaatagaagtatataaatcacatcaatcgttaatcttgtgccgtctgttacaggcccaaatacaggtttaggcttctcaatcaaaggtcgcgcatcatccgctgtcaccgctactgtaccatcaccactactatcaacaccggcagctatgccatcacttaaagatagattggcgccaagcatgggtagcattggcgagagagacgggacgcataacacaggacgatctctaggtgagagtcaaaaaaagcgaaagagtacaggttcttccggtggaagaagaaaaagatgaacgatacaaatatcttgatcaaacatgggctccggttcgagtgactcaactgagtcaaagaaccctgatatataaacctatagacttgtctactcatttacgaatgatttgaactcttgagtgttttcagacctcgaaatatactttccgttatttaaacacgatgaggaacgagccatctcaaatatcacaagcattcgatgatcaatatcactaaggtgtactacatctgaaatgagagtattgccttatatatcaagatgagaaccattttcgttcttgattttatctgcgacgcgttccacatcctgcagaacgtcgctccaggaggatttattaaccttgcagatattaacgttgaagctaagcattcgatttgtagaaacgaaaaccaaagtcaaacgttgcgcattgctctatcgaagaagagaagaaaaaacgggcttttatgattcatacctagctgacactgggtggtctgatatgaaaattggaaaaaacgcgggatcaatgaatacgtggtcgatgatatatctatcaagtgtcacatacgatcgctaaagttgatagaaggatgagatgtataagacacttgctcaactctctctctttcagatccacgccagagtacacgatcacaccatgctggaagacgcctataacgataagttgagaccatcagacctattagtaatgaaatcttaaagccgtaccaaggagaaagaaacagatacttggtatcgaaagaattactctctttctcgtatttaaatgttctgttcaacgactggaggtcagccttagtactagattggttcagattcctaacatgaagacactcacggttcaaatgtgattcctccttcctcaaaaccgtaaaaatgggttccattgcctcgttcgagattcagctggtcctttgatagtagtgcggatgcacccttggattcaacgagcttccagccctcatcctcgggcatgtctattcgatcttttcgacatataaagttttcggcgtaacaatgtagttctgtcaaccggctgttcactcggcagaaataccgcctctagtgtcatcaactcacaattcaaatcgcccaaccagaaacaaagtccgacttcctcatgagcaagtgtaaccggaccgcttcttggagacttgattccataccagccaacactctcgatggcttgatcagaattaaatggaaatttaagtcttctggatatctcttcaaaatccaaccgccgcttgtcaagctgatcggcaaatgctgtcgattcgcatctttttatcagcaaaatgaagcccagagacatggtgggaaatttaaactgacctgctagatgagagtttacaaaagtgactttaccacaaaacaattcgtataagtattctcgagcaacaattagatcttattcaatactcactataagatccttggactcgaagccgaactccaaccccagctttgtttccctacagcggtgcgcaatcagacggcttcagcgacaacatcgatggagtgcaaaggttctggaagcaaatgagataaatgcgcaccatcactcccatgagaccgatcggaacggcatctgtgctgatgtctcctacatcatgcaaatcttttctggccaggacaatcaacagtacgcccacatactgtttcgatgtgagctatacaaacatcaaggttgacaagttagggccaatttgagccaaccggtattcaagaatcgataggtatgaagatactttgatgtaattttctctttcgtcgcctagtccagagagtagagccgatgtccatagttcatcccttcctactgctctttctgatccatcgaaacctacagtgtttttgggtggcgcaaaaaccaaactcgccaccgaaagatcaagctcctggaatccaaatgcaaggatatcggctggtctgccgtctggggaggtgatccagtcggatagatagcttgggtccccgatcggaggaagttgcccgttcacattgaacgtaccaacacgaattctgtattgatggattgaatacaagaggatctatatgcgtctctctagagatcagatgatgacaaaggatctaacatacctaagtgcacattcatctgtccattctcggaaccgagctttcatctctttttcaacaaacatgttgctcagcttggttgacaaaccagacggtgagttttgagactctgacaaggtcgattctttgccaaatgtcgagtttgtgtcacttgagtaaaaggcgagcctgattgtccgataacatatgatccgatgagaccaaactcttttatagataaaatggaactagtgatcaaactaaccaagcaaaggagacctttggcgagagattttgattcttgtctaaaggcaaaatgattcagcatatgatgtactgagcaggtagcgcgcataagacaaacagactcacctgattttgatttcaacctgtttacctccgccaacaaatcttttgtcgtgttcaaatcgctcacgatcacttctatatcccgatgtttctgctcaggcctgacccgaactccctctggtggttcatccagcagcttttctgtgaagtttagcataaattctgccgacacctcggttcgggcgaattgaagctcgacagccgttggatggagtttatcaaatttggcctgatactgagagatcgagattttcagagaggtagtaatgggcaagatgctttgtattcgataggtgagatcagaagagcaaataacggtgaagatgctgtaaaacaaagcagacaactcagcaacactgatgatactcgttataaatgggattacagaactcacgctccttcatcctctcctctttccgagctcaaaacgatgcctagaatgacattgattggctgaccagctggagatacaaccgttccctgaacaaatgatctgagatactctgtgggccgaaacaacttgtgtagattctgtttgtccacacccgccatgtgtaagagttgtgagatgggatgtgacaaagagttgcagtcgtcatcggtctcactctccaacagcatataacctccatctcgtccatctttggctttcaacctcacgctcaaacaacatcgcacatatcatctaatcccatttaaaggcatagagaaacactatgacggcctcttccctaccttttttcactcccgtagatggatttgacacatccgcctttactgatgggactcttgttcttccctgtgtgtcgtaagcattttcagccctattctcgtcttcaacgataaatttctgaacacattgttgtatttgggcatccagagtaggaaatgttcctcagcttaccgtggaccttcttattgccacactccccaatatcaagcgggttggattcctttccactgaagatctcgttcctttcgttggaggacccgagaagcctggagacggaggaatcgttaccgctctggaagtttacgctcagtctggcgatgaagatcgtggtgtatattacctccagcagcgatctccagtcctaaaagtatgtctgtgtctcctcatgatcgacggaggatcgagattgacatgttccgatcgacctttattcggcatacgctcttctatagagccgaaaagagcactacctttctcagttcgtgccttgggtcgaacaaatgaagttcaagaagatgcttattctggcctctctagatggaagcaaccgtgcttccggatcctcgtaagctgtgatgctcttttatatctgaattaagaggtcttgagctcaatagcgcctcctgccttctctttaaatactgcagtgataagcactaccagctccccatgccatccgtagtatctattccattccccgatctttccggtcttcccgcgtactcgcatgagtcagcttcaagcgcatcctcttctggcctggaagaaatctcttccaccccttctgcggcttcccaaacagtcacaacttccactcagcctatcctaccacctcttcccggatcaggtctactttcttcactccttctccggatctcggctgatcgagaaagtttccaggtagccaccggtgtgatcctcagctttgttattgagggagataacagagaggatgctaaacagatgggtaatgtggtggatatggcgcttgatctt

SEQ ID NO: 1803 - DNA, 44211 bp, Xanthophyllomyces dendrorhous
gagagagcctgagagttgggaggccttggtccgaggtagtgagcgagaccgatttgagtagatgtcaactggattctgtatagagacgtcatttgagatcacatgttgaaacttcaccattcttctaaagcttattatgaagccaatttacaacaagatgctcatgctttcctctttaagaatcgcaacgctgaatggctctgtggtgtgagttgccgttctgggcgatcacaaagtcaagcgagtggaattcagattaaacaagaatttggcagagattagattgtttgcggttgccctccatccaccatcaactacgccagctaggctcaatcgcttctcgtccctcttgctctttccaataagcagtcttcaagcaagagaccggaaattaagaacgaagagaacttgaaaagatgtccgcctctaacgcacaagcgactcctgaaacagaaccgaagttctttgcctggctctccgctctctcccacgtcaccggtcttggtcaatcggccacagaatcctcgatcgaccaaactgaagaattcaagaggctgcagaaggaagaagcagagtggactcagtgtgaaaaatggaagagctatactatgaaatggggtaagttttccttgctctccggcctgtgtctgtatctctgttccaacatacttcatcctgttgttaagctctgtggacgttgcggattaagctaatcgtacttttacttctgctggtttgaaagatccctctgttgtttttatactcaaacatctttccttatcagggtgtccgacaacagcggcatctattcactgtgctccttgtgataacaccaaggctggagggttcagctctgatttaggagttttgctctgtcaaaatcgattggttgataaagctcatatgggagtgagtttttcttgtcatacgttcttctgttcttctttccatgactctttctttcactcgagtctcctttgaatgatcagtttaacagtgatgccaatgcacacatcttctctcttttttctcgcttcgttctatcgatggcctatcaggacacgttatctcatgagttgattcatatgtacgaccactgtaaattcaacgtagattggacaaaccttcgtcatcatgcctgctcagaagttcgtttttctccttcctctccatgcttctcatggcctttggtctcttacgtcttaatctgttgatttcgttcttcaacctcatctgaacgctcgacctttgcaatttgaagatccgagcggcaaacctctcaggtgattgcgcgtggtggcaggaatttaaacgaggacattatgagactaccaatgctcaagccgttcgtttctttctcttcgtctagactgtcttttcgctgctaagatatatccacgaaaaacagactggaataaagctgacacttggtcttactctgatgtgactcgtggtgagatagaaatgcgtccggcgaagagccatattatcggtcgaagcaaaccctgcttgtccatccagaaaggcagcggaagaagcggtcgatgatgtttgggacagctgtaaacctgatacgagaccttttgataggttgtttaaatgatttattatccatgaaatatgaaaattggaacatctagatttgatctagacaataatcaatacatatataattatgacatgctaaagaggagcgtgtttcttccttgttgtacatcaaccatctgtcgtatcaattcactggaagcaaatctatacaaaccctactaagcagagtctttgtcttgaaagctctctccgcgttttcttccagctctctcgattgtcaatcattcctcggtttctgaatcatacccccagcctgctgcaacctccttttgatgatgtagaggtaaaagtttttcatattttaagctgttattgctgtctgatccggctagtttgatttcgaaaaatttgcgatttggtcaacagagctcaatttggtcagcgctgcacttttataacagtcttcatcaggatatccgggatgaaagcatgaaacgagcgaaagaagatgatcaccttggaaagagtcagaactgtcaagctctgcagccaagaaacagatggtctcttgtatctgtgattgatagtggacttcaggaagaactttatgagccactatgtatttcaagaaggataagatgatcttgggagcagcggccaatcgctcgtctgacctgtttgaaacaaaattcattgggagaccaaatagtcggataacagacatatgcgcgtcaacatcctcgcttcttggaatgttgtaagaagacaaaaagaggaaacaagctgaccagagtatgttgacgagatcgggattaaacctagaactcaagaacagttttacggttccttctatatcgtccaaaaaccggcatttaacgacatcgtcaaccacatccccgccatccagcccatcgttaaactgagaaatgtttccttcctcgtctctatttatataagatgacaaagaagagagacttgagccgcaattcacctgaaaggcttacatatgaaagacacatacatcaaaacgacatcgtcgtctctgccgtcgtcactagactgattgtctgtggttgttctctctgtttgagcgaaatgcttccacttttaatgaccaaacagagtttcaaaaacagatcagtatatcagctgaactatatcctagaaattacgtgcatctgcgctagtatgtatccaagcgcagaaaggacttacatgagcccagactatgagatatgcctgatcgtctatcaagatctggtttcgggagatctcccattctcttgtagctctatacaatcgtacggcaggatcattttgtctgaagtttcgtgatgtcatgatagatgtcaaagtcatagaacgtttctagttcgagctggtcaactcgcgctccaaaatgaacacataatcaaacgagagtttgagcaaagattttaacatacgaatcgtacggcccaaaatcatagcttattgtatcgtctggctcttttccgtgaatcccgtttcctccgaatatgtccttaacttgaaggatagttgctcggtagacctctcgatcttcagcagaagacaacttttgatctttcctaatagacaaatctggaatgatggattccagaccgtcaagatggtgttctgagcttccttcgtcctcagatgcttttgtttcttctattcctgctgaggcttgatgcccgacagatttgaactaggcgcaatcagaaattgcagtcacttggccatcagtctagcaaatctcaaatgtatagacctatcagatactgacctcttcgaaagagagtagaccagctggcttaggccatggagggaaggtaaatttgaactcgctcaagaaagaagtgatcctaggctcggacttatgatcttgatcgttcatccggctcttcgtcaatcgatcgtgctgtgttgtgtgcttgatagggagaacaaacagatcaatgaacgagatcaccaaaagatcctaaggtgtattttgagtaagatgaaacaggcggggaagcgctagcgttgttagggttatacgccgtaaggtcacgtggccatcacacgtgattttagggtcacacgcccaaaatatcttctacagattaatatctcgtttggatgtcgaacaggcaagggagaggatagatatcaattagtgacgatctactttcatagatagacaaaacatagctatgtcaaccgagaaggaaatagataccccggaagctcgagctgctctggaagcaatggatatccagattgcagaggctggaacaacacttcttcaggctgctcaaacagcggtaggtcatacccccggttgtttggtacagagattgcgagcactcgaaactgtgatactgacctgatgaaatctttgggctttgtgttgtgtatgggttcgaattcgaagggtgcagcagaggttcttcggttactcaaggaggaagaagcaccagcttggtaccaagatgaactcggatggactgcaatgcattacgcggctgagcgggaagactccgatatggtcaaagctctgctggccaacggaggtgtctggaatgctggtctgccctctttcttataattcagatccctttcgaagacaagaatcgcaataaagctgactggaggcgacttttgactgtatctgttggtctgcgcggcgtcttggaacccaagtcgataaccaaggctactgttccgccgacattgctctgtccctcaacgctactaaaatctacaaacttatccagtctcacgccgtccgatcagaactcttgctttccttcctcagttccaagggtagaacctccgcttcggatagtaacttgatcctgaaggatggcgaagaagatacggtagcaggcaacaccgacaacttcttgaagtccaaattgacgtatgaaaaagatgcggacggaagagaaagagttgtggatgaagaaggcaatggagtcatgatgggctgggaagaaggcatcatgttcgttcatctattttttctctttctaaactgatcttcaaatcgatatgtgctctaacttgtaattcctcattggcggcttgtattcaactaggagggcatcggtagacagattgacggagggtctgttggaaggcagaaaagaagacgaaggcctccgaattctgaatgttggtttcggactaggcatcgtgaggctctcttgatctttgattcataccttgaaagcgcatggtaagcggtaggactgacctttgatgggttttctctgatatcataggtggatactatgtttcaaaatttgacaccgaagccactgttacacacagtcattgagcctcatccttctgtgctagcacatatggaagagacgggctggacggaaaaggagaggccaaatttaatggtcttgaagggaaaatggcaggactgggtggagtacgttttcttctttctcacagctctatagcctcacgctcgcttcgcatctgtatagctgtcattcctacagactctgaattgatttctttacaagggtttctaacactttgacgtttgaccttgtgttattatggtgtctgtaggaaagaagaaatttacaaggagggcggttatgatgttatctatttcgacaccttctcggaaggctactctgaactcaaggacttcttccaacacctcccgaatctattggcaggaccggaatcaaggttctcgttcttccatggtttaggtgccaccagtcagtgttgatcttgctcgtttcttgaatagtttgctcgatctgttcgatctgatgaagctgacgatttgtcttatcacatagacgccacatttcacgatgtctacacttcgctctctgagcttcatctccaagaagtggggattggatctgtcaagtggacggatgtgttgatcgaggatgaggtcagggaagaggtttggaacggaattcgtagaaagtgagtctgtgctctgactgtgaacccgttgaatccgcttttgacaaagcaagctcatgccttctctccccttctgccctctcgccatcataggtactggactctgccattgtatcgattacctatcgcgcagatggacttgtgaacaataaagacaccaatagggatgtttttgataaatgaatatgaatagacctacataagcttatctattttcagtcgcgtgtatgaaagtccttaccccgctttgggccatcaacaagtacggccaacatcgtccaacccatccttcccagaatctatcttattctatcttgtcttaccaatgtcagagcctcggtcaaagaggcagcgttcgggctcagcaaatggttctaggctaacacctcagcaatatgatcaatgcaactccattttaatcgccgtgttacaagccaaggatggagcgttagtctgagcacatcctatctttctcttctgtttcccgttcacgtatttgggattaattgtcgtttatcatccatatcaaaatcatgctttactactctaaaccactcaatctggatcatttgggattgcttggatttattctttcgacgacacggatagtcggttgatcgctacaaacttcaagacacttcctgctgcaaacgaatggccagattactacgagaccattgccgagccaatttgtttggatgaaattcaagtgagctaactgatcatgtcggggcaggttgatatatcgcccttgtatactgacagagccgtggttttctctgtcgctggttgtaatcgtttagtcaaaacttcgttcaggggagtatagttcaccccaggcgttttaccgtgatcttcaactcgtgttcttgaacgcgaagcaatacaacgaggacgatagcctgatacaaaaggatgccgaacgcctcgaggtaagtcaaactcatgtttgttctcacaaacgattggtctgtatgatctctttcatgttgacatctacatcttcacttcacaccgttccaccaaatttttaaacaggaaatcgtcacttccgtatatcaacttttgcaagaacgtggtattttccccccactcccttcgcaaacaatacgctctcaaaccggtcccccttcttccggattgcctgacatttcatccgttcctggctctcaaacacctcccttttcttccgtcgagcccctgaacgccccttccccatcgagttctatagcagagtctatcacgagcacagcgaccaagcgaaagcgcggtcggccacccaaaaattcaatagatatatccactccgatgatgcctgtgaaacctcttccgtcaacttcaacttctacaccgacaagtgggactagtcagcttgctttcaagtctaagaagattccggctccaggagtaccaggaatctcggatctagtagatgagtcagatccagctgtagcagaatcgctagagatcatagctgatttggaggtgagaacaccaaagctggaagagtatggaccacaaggatggtggtcgatggacgtggattatatcgcatccaaaaaagatcgattcagatacatcttagataatctcaaaacattcaaagacgcaaagtcaatatactttgttcattttgaagcatccagctgcgaacatactgacatacctctgatcttgatgtccttgttttacagtggaatccgcgtagcagaatctttagaagcgttgcccatgcaaactgacaaccctctattaacattctccgtaagtttatcacaaacatatatcactggctaaattgttgacacctggtttttgctattcgttcatcatggtatcccatatccatctcagttcccacactctttacctctcattgaaggtcaagtagacgctgacggctacagtacatctgtggaatttgatgtggacatgatgagactctttgaaaagggtaggagatattattcggatgggactgcgccatacggccaggtcgtacttcttcaagtgagtcaagtctgcaccttcagctcggaagcgaaccgaaagtcatgtagcatcatcgaccctgttgttaatttttggcgccacttttcagagatattatcaatctcttacatctgcgaatcccaacttgactacggcgtccactaatttctcctctgtgcctggtggacctagtccctcaatcgctaagaatatcgagggtaggctaaattcagatgaggctgtcaccacattccggatcagtggaaaagatcgagattttgtggatgtagcgcattacaaagggttcagcttctctgttggtcagtgctgtttgcctttcttgcttgcttttcgtcttctcctttagatgtattcttaaacgttctcttttacttttcgggatcggacaacgagtaggtgattttgttcatgtcatgaatgcggacgacccatcaaaacctatttgtggacaggtcttcaaagttttcgtccccaaccggtatggtctttttcctgccaactgaaacatcttatcactactgatctttctgtgcttcggcaatctacagaggtgttcgacagaatcttgtttctcttacagtgtgctggtactatcgccccgaacaggtgagatgttttctgacctgcggattatgtgttgctcttatttatgtttcaacaacatgtttttcaatacatttagactgttcaccctgcaaatcgaacgttttttgaaaacgaactatttaaaacgggtatgcgttatgatttgttcttgctcacttgttgtgatcatcgtattgaaaactgaaaacgaaaaaaaatacctcttgtggtgtttctacaataggccatttcggagatcatgtgatagaagatgtgatcgaaaaagttggctgccagttctatagtcgagctatcaggggaagacctgtttccccattctggttagttttctatttgattcataaatcttctgtatttcatttcggggctgatcctgacaagggtttttacctctcgtctttcatttgaactcgtaggtacccaggatggcctgtatgtgagtgggactattctccaatcagcaagatagcgatgcatattcttaactcgactcttccttcatatcagacgtttgcgattctcgctataatgataaagacaagcttatggtccggatcaagaatagagatagctgtatccctgaagaacgtgagtaataaaaacaacattatctcaatggaggaagaccagtcagctgactcttcataccgaaatcatggacgatccgacgaaaagttcgaaagaaggacttcatgccttacgccccattctctgcccagatcaaacttcgtcgatacccgtcacctctcatctctggcatatccggaccaggatatataggtgaaccagaaagcaatgacgatgatggagagttcgatctagacgactctcaacctccaccggctcctgtcgctgctcctttgactcccagaacagaagcgcgtctccggaaactggaggaaatcagagcgaatcattcagctaaaggagcctctggatataacttgatgtataacagaggatcaccatcagctgtctcttcacctgtgtcggccggggcaaatggtgcggcatctacttcgatgtatggacgaacaggatcgactaccccggttggacaaggcggtgtagggtcgatgagcaggccttcggctctgcctgccagattgtcagggaacagcacaccgacagcaaagaccgggcaattcataccaagctcatcatcatcgtcatccgcgcctttcgtccagacaacacccctctcccgagcaggatcgtcgatcattccatcacagcagccgcagcaacagcagcaattgtaccaacagccatatcagcatcagcatcagcaacaacagaacagcccaggaagtaggtcaaaaacaatattggatcgttctgtagtagggaacagtggtgggatgggctggctttctcaagtagctcaccagagtttaatcaacgatgacgtcggtgcgtgttggcgttgtttcctctcacttctctctctttctcatttgttactacatattacccgaagagatcaagaatcaggtcttgacgcgagatattgcttcaactctttacaacagcaaaccgatttgaacgtgatccaacgacgaaaaagattctttggttctccggcgcgcctctagctcttcctttacatgtccagcccacccattctgctcaatacgccatgttcttagccgagaaagctctaggtaaaggcgctgatatcgacgtcgatgacggagacgagggagactcgtcagaattgagattaacggccggggaagatcatgggttggaccctcggttattggaggctgtcaaaggaaattttcaacctgatctgatgaagagtgcgttcttccgtctttccttctttcttcatttctcttcaactttgaaaaccaacacatagacttagatctgaaacctggtcttccctctttttctatctcataatgtcctttctaggcatagacgatttactagaaagcgctaatgaacagatcttgggttgcgagaccttgaaagagatggaaggtgcagagtagaatctattctcgtgatcaatcttgtttgtcatgtcatatcgtatgcgtgttcttctttacattctactcttttcttctctcttctactcgtctaggtgtattggcctggagcttgaaatgatatatgtatcggctctcaaatctcattggtgggacacaattgtccttttcaactcttcctcttcctttcataatcaaggtacggacggaagttcaaaaactgcttaagatggtatagcaatacgaaagaaggtcaaaaaacaaagcgaaagaaaggaacaatgcaagaacaaaggggtttggttcaatgtgtttaatggaaaaatcaagagaaaggagaacatgtcatgaaaaagtaaatgtaaatgggtatatgagggggatttaaatgcagagcatgcaaagcgaggtgaggcaaaaggtgcagagggtttcatgcggtacctaatcgaactctaaagatgatggtataaaggatcgagagtgatcgatctaggaaactgagtgtatcaagtttgaggagagagttcttatgccgatggcttttcatctgtcttctcagcctcgtacccatgctcttgctcatattcggcagcatcagcggcgtaagcaaggatgtgagcgggttcgtcctccagatcaagatcatagtgctccgccagggctgaagcgacagaccttctggcgtcgcctactgggtatctgaaagattctctcaaccgaccgaccgtctccttctttggtcgttgctggacatcgttggacaagagttcctcaacatcagcgttcgaccacggtccttgcttctgttcgggagagagtaggatgaggtctctgccctttccgtcgttcgtcatagcggaagcttcgattccagacactgaccacggcgcctttttgtgggaggaaactccttttttgaacttgtcaatcaatccactagactgtctcgagtgttgccgctcatgcgtcttttgctgctgctgctgctgttcctgcctagataacgaagaccttggaggggagtttgttgcaagttttgaaagagttccgtgaggcattgacttggaagttttcattcctctgactcgtccatggttgacgggaaaggaatgtgtgctagcccgattggcagcgaattcgtccttccttgcctcggcgaacgaaacccttggccgagcttctcccacaaatgaagctctgggccgagcttcaggactgtcgatcgagaatctggagatttcttgcatctgaggctcggtgccttcatcctgtccacgccatgtcccgaaaccagcaaagttgttggaagcaacagaatgaatcgttcgacgatcgccaccgatggtccggctgggagaggaacccacttcggattgccagccctcagacaggactgacattcgcttgtctggggtagtacatcggacgtcgaaaaaagatttatgtcaaacacggactttcattcgaagaaaatcacagagaagtggtgacacgaaccgacggcactgctccatctttttcgcttttcggcctgacgccgtcgggcatacacaaggtagacgccgatgagagcgaggagagcgaggacggggaagaatgtggcggcaaaaattttgccgacggagagagaatgcttagtggtcaagttgacgaccaccggatcaggagtggctaaatacccagcagaaggttagcagaagattttctatttaccgagcgcatcagattgagccggaaaataatcaccagtattggcggcggcagcggcagtggtgctgcctccggcgatggtagtaactaatagatcggcaggataggtaacgtggaaaataggtccgaccgggatagatgatacgaacgaaaggctcgagtccgagagggacatggtcatctgtaggtcaatcacagtactcgagttccacctgaagtagacattctatcatgagtaaagttcttagtgcgttaaggtcagagtggaagagtggctaccaaccatttgggggccaaagtaactgaataagatccatcggcatatgtaacaggactccaaatctgtttttaaaaagggtcaaagaatattgtgagcaggcgatgcacgcaacaggcatgagtgacaagaagtggcttaccttgatgactgggttcgaactagatggagctcgtagagtgagggtcaccttgctggcgtctaaacaggtagtgttctaagaaagaatacagtatagattttggaaaaaaaggagatggaaagaaaagagtgaataaaaatcgagtcaagtataaagattttgaaacatacccatgtaaactcgataggtccagaggaggcatcaaatgtagaccccaaaatggggttttggtagagttgagtggaggtacaatctgtgtggccatggtgagtatgaattgaagacatgagtgtgagtctcattacaacagtgtccgatgtgttaaaaacccaaaaattactaaccttgctgctgaagagatgcacgggaatgatgcttgattcctcgtcggactgctctagaaattggatcgcccattttgagaaaatatagttgttggtatgcgaaaaggtctgacgcagattatcaagctccttgccgagtcaggttacaggttgatgtggaaaccgaattggtaattaagaatgatcaggatagaacaaaaacgagtatcgaatgaacgagcgtgtgtatatgcgtgtgtgtacttgaacgagcgtggtcgaggtcagggaaggaacgtgttcctcaaagtgtcctgtatagtaagaggattagaaaagaggaaaagaaagaagaaagtaagcacgataggaaaaaagagaggaaacgaagaagatgttaaaggttaaaatcaaaagagaaaaatgcgaggaagaaaatcaagaaaccgcacgcgcgcgtgttacgcacagggcgtaaaaggtctcggcccttggacgcgtctgccgtatgacgcgtttcttacggtttgcacgcgacacgcgactgatttctcgccgatcaaccaacggcatgacgttcgtgatgatcgatcggtcgcgcagcggtcaagctatgcaagagggccatcggagctgtacagccgactggatgctgcgcgtggcaatttgctcaccgccttgagtagactacgcacttgccgccacactctcacgcgactgccgcgtaggctcagaaaattcggacgcgtcgttgttgctgttgctgctgctgctgctaatacaagaagacgcttaaacaagaacactctaaaaggagcaatcggtaaattcccttcttttctctacacacactcttgtttctcatatcaaccaccaccaccaccattattatcaccactgttataatccagagaaattttacttatgggtatccaatctatagtcgcgctcgctacctttgcctcggtggctcaggcaacttcttacactctcgtacgtctcaactgccgcttggctgcgcgttctctccctccgaaagtgtatgcacttacaatttaagctcatcgtaacctgcgctgttatatcctttaatccaatttttcacaatgtttcgcaggcaaagacgtactctggctcaacgttctttgatgactggtcatactacggcaactatgacaacctgaccctcggggatgtcacctgggtgaacaggacagtggccgatgccaacccagagctgacttacgtgaatgagtgcgttcctcttgtttagtaattcatagcgaaactatttttaactgaatcccattttgatatcatcggttttgctcaactcccttctttcctatacactgcagtgctggaaatgcgatcatcaaagtggtaagctcggccagaactaatttgcctcaaacttcctcctgtacgcttgctcactcacagacatttttgtccgccgcttggtttcctaggataacacatcgaccgtagcgtataattacaagcgagattctgtccggatcacctcgcttgattacatctctgtcggatctgtctgggtactcgacgcgactcatgtaccgtacggatgctcggtctggcctgcgttctggagcacaggcccgaactggccttatggaggagaaattgatactttcgaggtcggtcctacaaaaacgatcttctgtttctattttctttctaatcgtcaattctgacttgatatttatctttcgtaactcaagggagtgaatcaggtcacatacaatcagaatactctgcatacaacagccggttgcacacaggccagctcggtcaaccaaacaggaatcaccacgtcaagcgactgcgattactcggtggacagtaatgctggttgtgcagtcatcgataacagtacgaccaatacttacggtgaaggtttcgcttcggccggcggaggagcctgggtcaccgaaatggctaccgagggcatcaagttagttgctttcgttgcactctcaacctttctctactttcttactcattccttctttcttccctgtttaacttaatatgttctcgttctcctccccgcagcatctggttcttttctagagcagacatcccatctgccgtctccaacgccaactcttccatcgacacctccgctctcggtacaccggtagcttcgtggcccaagtcatcttgcgacattgattctcacttttccggtttgttcacccatccatactctttcttcctgtctctttttcccttcactgacagctctcctcgttctgacaatctccttgatttagctcaacaactcgtgtttgacatcactctctgcggctcatgggcaggcgaagcttccatcattgccgaaacttgtgacgccttagtcgggaccgacacatgttacacaacctatgttctcaactccacgaactacgaccaagcgtatttcgagatcaagtccgtcaaggtctacggttcggtttcgaccacattcaccaataccactggggactcaacctcttcttcgagctccacctctagttctgtcagctcgagcgcaagagagagaacgatggaatacggcgtggttgtgagcgcgggtgtcctgagtctgcttggggccatgactctgttcatttaacctggttcgattcgtctaaaaatatagatcttttgcttttctcttgttctttttcactcggacatgtttttttttggccttttctcttctcttttcttctcgcctttctttcgtcttttcgccttcttctctttgcctgtacttttgaaacctaggacatcacaaaattggacatggaaattaccgactcgccatacataaactcctcttctcaacccatcatttcttcttcttctgcttcacccgacgtatttggtcaggtgttcttgctttctttgtctctgtccctgtccatgtgtttgtatttaaatgcgattcttcttcttctctttgttctcgcgatcgacaatatctgacctcttgaggaagaacagatgaccaagaaggaaagttgaagcaagacatcacacatttgatcctgattatatctaaggcttttcttctttttgcgaaaagagagaagattaagaaaaaacaaagagtggaaagaagaagagaaaatcaaacatcggaaagaaaagaaaaaaagaagaagagaagaaagtaaaagggatcgatgctagatgagaggagagacaggggaaattgaaaaagaaagaggagatctaataggtacttgaacaattttttttggttttaatttgggtttagaactattcgagattcgcacacgaggagaaagtattccccctagagaggagattttggacttaggaattcgaaggagaggaaaaggatcggttgggttacagagttcacaaacataggcacaaggaaagacacagacaagcacagtgacatgaggggagagaacaaaaagagagaaaaggaaccatagacacacaatcacacatagaggaaagagtaaagattcagaataggaaagatcgaagggaaaatgattgttaaatgacatgttgaaggttttccctaccatcaaggaggagaaatgacaaggatgagagaggtgggtaggagaggaggtcatttgtttgtctgtttatttgtcggttggttgagcttgtcttctttcatctcttctcgacagaatctacatgccgtaagggaagccagcatgttgctgtccggcctgtccgtaatcacccaacccacccaatccaccagcacctccaaagcctgccgcacctaaacctccaaaagaggtcaagctaggtccgacggctgggtttccaaagtggtcgatctgttgctgttgctgctgctgctgttgtcgctgttggaggtgaccaccaccagcgtacccaccgatggaccgaggaccgtacatatcagcgagcgagtttgcgtgatgcattgttgggtttccgaggtttcgatgggggtgaacctggctagacgatccagcagccatcatacctcccatacccataggcccggttccaccaccaccaagagcgaggtttagaagagcagcctgctggttgtatcctccaccgcttcctcctccccctccgccagagccgcctccaataccggtactaccgccgagtcctcctccggctccgccggatccactgtaattgtggtggtgctccatgtgctctctttggagcttggattggattcgcttgccgtaaggagtgtttcggatcattggcaaaatcggtcgaatgcattccacgagctatgaaagaagaacacacggtcaaccgaccgaacataacttgatcaggtacgattgataaaaatcactcacaagcatcctctgtccgggctcggcgtaatccaaagcagtctgaacgacatagtttgcgaatgagtctcgcaagagtttttcaagtctgttacggttaagcagttcagagatcaaaattttcctcgtatccggctcggcgactcgaatgcactggaaaaaagcaagtatcgcccagataaaatgtcagccaacttggtctgagtttcacttctgtcgtttagaagaagaaacaattcaaaagataggtacacaccttttcgatcacgttcgaactgaacttttgaacggaaagcgcacagacgttcccaatgaattgcctagtgaccgcatccgagaacctgttatcgttcaagtccaatacgtattgctaacagacgcatagggagaaacatatgagcccttttgagcaagttaaaaagaacgagatggcaaagtagacgtacgacaacgtagtttccgaagggatcttgaaccaaagtcagaccatgataagtgatctcggtgacgagctggaccctctgagaatcagctgcgtgatcaatacaccgctgaaggacacaacatccatgtcggtgtgtagccacctcgacacagtgagcggcaacagcgttgtagataaactaatttgtagtcaacagctcgggttgagtcaatacattgatacggaagtttcgaaacaaagaccggtttgactgacctggttatcctcaggcacaagcctgttcaaacacttttggataacatggtttccgttcaaatctttgatcaggggcacaacattcgcagacaaggcaagaatgattgagtggatctatggacgcagtgatacatttgattgagaatggaaacaatgtaacgcatatgagatcagccattggtcgaactcaaggaagaaaaagaaagcaaagagacaacaaacctgtctgggagtagacaaaaaatcgatcatcttctgtacggccctcgttccgtgcatgttgagcgagattgtcaccaagtctccagcaacggattcacagatagcatttcgctgttcgtcagtcgaatactcgagaagcttctggcaaaggtagtttccgaaggggtctgataggtttgaaaatgtcgtcactagatcagcctcgatcgaacttgtttacaacgacgatgacatagagaggaagaacatcaagctctcaaagactcaccggtcatgagatccgagaaatggccgtaggtctctcggaagatcatatctcgatgctccggtactccctcttcgagcttcttttggagatatcggcagccgtgctggtccttgcagagcggaagaatttctccttgaagatcttcgatccgggttccggcaaatcggttgactaaaatgaagtgtgcacaaagatgagtctagtttttgaagcttggtgagacaaacgttcaaccgaaaatgaacgacgaacattcagcatctctatcgagttcggctcgtcggtgcttgacaccaccaagcccatcaattccgctgaaaccgtgcccgctagagtaatcggccgaaggagagaatccaccgaactgagagcttcctccgagcttgctagagtcccgaagaccgatcgattggtagacgtgaggatcgaccactccaaactgtgtagattgaaatttaaaggataaaacaaaattgagtttaacaatcagatcttcgttgttggacgaaacttggtacatcagaagagaataacgatagacagacctcgtcgtgaatggacgagccaaagtcatcggtcgccttggagaatccactacccagggctcggccgaacgtcttggtaagatcagggttagagaatcctctctgggcagcttcaagaccgccactggtacctaatcctgctcctccgagcgaaggactggcgattccggatgaactcaagtttccactaaaagcgctctgtgcaccggccaaaccgctgtggacggctcgatccctgctattcgaattggagtgcccgttcgaaccagtgacattggtagcactaccggtcgaggcaaagccgttctgaggagttcccggaacggaccgagcgttcagggcaggtagactggatccgatggaatcagacagggaaaccatatgagggggtgatcctctgttaaggtgctgattggcggcaacagccgacctgatagaaggcgaaccaccggactggggtcgtccggtaaggggaacggtttgagtttccatgatgggtcgagcggaagcgccagagtagagccaggcattggcatcggccgaggcattcaacttgactgctgtggacgtaaattcggtgagacaaagataggaaaaaaattagacgatcgaccaaaggttcaattacgaacatgtatcatgtgcaaagcaggtgaggtgggacagtaaggtgagcttaccattggagtttacaggctcgtcatcaaacccaaatttgccaggatatccgccggatgagaatccatcgagcttaccgatcgacttcatgttggattccaagctctttctttcggccgagtttgaaagtgcaagggcagccgagagaggaccgggagtgatggagagtttgttcagatggaagcttaggtcatccttacttccgccggaaggtcgtcgggaagcaggcattgacttgacaccagaaggaggaccaacaggaagggccttggtgcccgagttggcaaagcttttggccggaggcgacgagggagccgttgtggcgccttcaaacgtctgtccgtttaatgtatcgacagagccggtcgcaggaggcgtaccagcaggagacttgagaagcgcggcttcctctcggagctgttcttcttcgagagctttcatctgagcttcaaacagtgctcgctgagcggcacgctgtctctcgtgttcctgtcgcttttgttcgattcgctacatgagaggagatgatgaaacgcatgttgacgcacggtcagtatcagtatttgcctctcaatatacatgtaaacgaggtaactgtcagatggctcgaacaaggaagaaagcttacagcgttgacttcagcctgagaagcagccttcaaggtcaatcacacatccagggaagaacacgatgtgaaggatagcaaagaaaacagaggaattgaatgaacgttgtggattagttacacagtgtgaatttaccaatcctcgtggccttgagttttgatatacgtactgtatcagcgagatcaaggaaatcagatgctcctctggaaggagcggcagacatatttgtcggggacgaaggagtcgttgcagttgccatcttgtggaagaaggggtgtttaaaataagttgggaagaaggagttcgccaaatcaaatgtggtcgggtaaagttcgttctcgtaggaaaagacagcaagagtgagttctccttgttaagagagatgtcgacagttgagctgaaggagaggagggtatgtggataagatgtataatttttgaacaaaggatactaaacgagacagaaggggtttgggcaaaacaggtcaaacttcagataacgctcgagcagtcaaagttcgttctcttttcaatattggtgtggaaagagaaacccagacgactgattcgaagcagcggcgatgagacgatcaaaggtttatgagagggagaaggagagacctgaacgtaaagatcaaacttggaggaagagaataaaatggaccgaccagttctaagcgatctcacttgcgtacaaacaacgacgggatgagatattgctttggacgacagaggtcaggtgttacagagctggcgagcttggttaatctgaattgacagagcagggccaagagcaaggaagggaaacagagaaggagaggagaagaacaaggaggcaggcaaacagtcagccgagtcgggacaagaagagagaccgaatgaaaagtgaacgaatgggcgtgaagacgggaggagtgagaagagggagggaagcgagacgacgacgacgacgacggagggagccgctttgcgaagtgaccagagttgggatagtcggaaagagaagagagggagaaagaggaagtgtctgtctgtatctatgcacgtatccttggcacgacaaaggcgacgggaacgatactagcccagggtcaagagaggagaaggagaaagaggaggggaaaaagcacgacagcggcagaagcagccatgacgactgaggcagcctataaggaacaaatcaaccgacgacgcactaacctaaatccgacgaacacagatcttggtttacacagataaaacgggaaagctgatggaacagaacgggagatggacagagagagcaaagacgagaagagaagagtgagtggtgaatttcgaccgtgcgggcgaaggtgagatgcgggcgaagctggaagcaaaaaaaattgggcgtagaaaaaaaagaaaaaatcaaaaaattctatgttctatcttctccaaagccgctcttcttcggggtttctttcttattttcttccttctttctttactttttctgcagtaatttttaggcgccgtctgctcgtgttcatgtacattcattcatacacttgttgataataaaaaaagtggaagaagagagccggaagagaaggaaaaacagaggacaaatattttccggaagcgttcgagacacagattgtatccggcgtgaactttgctctttttttttctctttccttgcaatccctgtttttccaacccaagaaatcacgaaacatcctagcactggtcaaaggaggaggaggaagaggcagaaacagaggaaaaaaattagaagagaaaagagggacttggtgttttcattggctgatctgcttggtctccctggcttgggcttctttttcacttgccccacgggtcttttctcttgcttatttccccttgctgaagaaaaaaaaaagatccgggctccccggtcaccaagtccttcttcctcctttcttcttcctcttctttggctcatccttttttggatacatgtagaacgagaaagtgagcgcaagcgcgaataaaagggatgattcatactcagtttgcttcctgttacatcgctcgggtcacaatctcttatcttcatgcctggcctccacgtggcaaggggaacataaataaaaaaatctcggggaaatgtttggaatttcataagaatcctcttcttgaataaacaccctcctgctcttgttcgaatgcctttttcttctccttctgttcttctgaacttcaaatgctgaactatgtggagtctccttctcgcgcttacattctgcttgtgaagatggccgcgaagagacgacggtcccggcaaaagaagacgaaatagaaagagccgaacatagctcttcttcacatatgtaatatcggcggcaaaggctgttctcatcccgtgcatccgtccgttcttccaattgtacaagagtctgaaccaagatgagaaaaatgacgtgtgatccaccggatgcccacacacatatgcaacggagcattcatctagcactataccggtccttctcgaggcgccgttgctgtgggtctggcattccatccttcgtttccacctagtgtccgatcgttttccacttcgtcgtcaatgtcgtcgtcctcatcgtcgtcattacacctgtcattttcaattttactcatgtaaccatctctgctgtactcacgtccatgagagcgcctagttctacctccctgcccttgtccatagttatctccatgtggataaccatcagacactgaaggttggcccagccgaatttctcttgttcggtccataagccgatcgagttttgatctgtcgacctcgaaaataatcccatcgtggccaacctcgcttggtaagaggtatcggaccacccaaaaaatccatcctagacccttgattgatcccgatcccgatctcggagagagtgactgcaagttacggcgccatccaagatcccaagggttgattacttcagaagatgagacgggtctccgttcggctcgtgtcagcaggtggttcggtcgccaacggaggtgactcgtctgcgtgggtgaatcagggagcacaactgccggcggcgtgcgcgagatctccattgattctaacgttgtttggttcagcctgtgtacaaagccattggcgccggtcaacatgacataaactctcttcatcacccccagatacatatcactcacaacgcaagatacacatggtagcatgcgaatcctcctatactgagcccaaacgtcgtgcccatcatgatcagaataaaatgtgagacgaaagtgaatccgaattcagtctgtttgggggcaaaagacacccggttcatcaaacatggtgataaactatgagtcaacatgacgcgaatgggagaaggttgagtctatcttcaaattggagaacccaccatcgcgtcactctctcggacgaaaccgacgagcgtttgaatagattcgaccgcaacaaagacacagtagagcatggtatagaccagaaacagcacaaacgatcgatagttctttgcgccaatgctatttgtcaaacgaattgagttcaacggggttgttggagaatccaagcgccaatatcaagttcactcaccacgtgcctgtatggacgatcaggagcaattcaacccatattcagaaccatatcacaacgtcaaggcatcttcagggaatacctcaacctagagacgccattacatcggtgaacaacacttaccgagccagagacaatgatgatccattttgagctatcataaccgcataaatcgatcagtcaatcgattcctctggcaaaagcagcggtccatctgaagcgccaggacatacaatacaccttccacaagttgagcaatgatgacatctgtcgaagggaaacagcgagaaagtggtcaaatccagcgcaatggtgtatcaaagtttgactaaacaaatcgaacaaatatacgaacgtacctgtccggtttaccaaccccacattttcgacagaatctaggtcctccactcgaactctttgccatcactcccagcgcatcgttctccatcgcccttcctgtcggtccgtctcttacgaactcggtcaggccaatctctccctctcgttcttcgtcccgagtgtggttgtccagtagagcgtactctcctgttgggccacccactccaggtggtgatcctggcagagtagaccatgtgatatagtatgaccataacgatatccctgatagcccgtggaatatagtagcctgaaagatagcatatatgggtcggttctcgattccatatgtggtgcaccagcagagaaggtacacaaagggtatataaggatacatcatcaaacatatcacgactattgttgtgataaacaacacacaccacaaagcagaatatcatgagttctgagcaagttttctctcttggtgggtttatatatcagcgatcagaaacactcacgtccgatcggagcatatgtcttgaaggctttcaatttagaccggcgcttgaggtttgccaaatgggtaggtgtcatcccatacgaagggggcgttataggtgggaggcctgcgtagctatgagaaggcaaagttagtggacaagcgagaccagtggtcaaggtgcaggctcaattccttactagtctggatcaagtgccatgttgttgcagaaaaaaaacggtacaaggaatatcgtgtcgagcaaagaacttggctgggtctacaatgaaggactcggctttgcaccaggcctaggaaacgctattttatatattagacctctcagctagttagcgttatccctctgaatcccacgggctcaacgaaagcaacgacgaccagaagagggacaacaacgatgatgatggcgatgatggttatgacagaatctgagtgacaaccgtcaagattgtctttgtgtccgacgggcccccacgaaaatgaacctttggctttcgacacctttcgattcttgaccctcacctatcgacgtcgctgtctatcgcttccctttcgttctgatcattaaggatctcgtttagcctaacttctctctcttatggaagctattcgacggatgcatcctccgtaccgacttggacctcggcttatcactgcaagctccctccgaacgtgttccctttcgatatcaagaaacagagcatgcatcgttccttcctcctttcggcctcttttgcctcacaacgcgctctctgtccggtacgcccattcagagccaaagttgaaagctgatcctatcaccgagcttggaaagacttttggagaaacccagccgaggtttcctgtcagaggggacgagatcgaggtgctcagtgaacctgaacagttctataaggctttgctggtccgtttttctgtcttctttcttttatgctctcccctcagaagctgacaaatacgtgtccgtgtcgtatgtttgatgattcagggtcttatcaaacgagccaagagacggttggtgatcagtagcttgtatatcggtacagagcaagatgaactggttagacaactctctcttcatgtctttctgatctcgcttcagttcctcttgagtctatcctgactggcccagtatctcttctcgtggctgatcatcgttttgattcgtgttctcaatccagctagctgctattcggactgctctcaatacatctccttccctcaaagtgacattcctgctggatcataatcgatgtactcgagaaccttggcctaccaagtcgaccgcatcaatcttgtatcccctcgtccgtgatttccccggcagggctgaagcttggttttatcgaagcccaaagttgagcggagtgatggaatggttggttcccagacgctttgatgaaggatggggcacatggcacgcaaagatatacggtggtgacgaggaggtcatcatcagcgtaagttcttcattcaacgtctcttattcacagtttgccttagggatactcatgtatgctattccctcttgactccttctatcagggtgccaatttgtccaaagattacttctccaccagacaagaccgatacttctattttcgaaattcgctacacttgaccacctatctttcaaacctcctccgcctgtacaccggctactcatacctgctcacccctactacttttaccgcagcatccgcctctacttccactctcaaatcgtcctcttcatcctcttcgtcaccttcctcagctcttaccgcatcggcttctacagaacctcaaccctacgctctctactggcctcatactacagtcgatccgcgtgacttccatgcgcacgcctttgccaccctttcagcctttcaagcgagttggtcccgtaagacccgagattgggaaggaaaacgtgtcgacgctgatacgagtgtctggccggtccttcaagcaggggtccttggtatcaaagaggaagaacgtgcgatgagcgcggtttggaaggcggttgataagtttaaggaagagggaagggcattggttgatctgacgagtggatactttagtttgtatgatatgtacaagaaagccgttatcgagagcaaggcggacgtcaggatcatcgcggccgcaccgaaggtttgtgctttttgtaccatgtctagttttctctctatttctcctcgcttgaactttcgaactcaagactctttcttcttacgtccgatcatatttggacgatcaaagtccaatgggtttttcgggtctaaaggtatttctggattgatacctgaaggatataccctgctcgaacgagactttgagagagaagtctcacggcgaggaaggtcgtggactgtcactccttctcagacagattcctcttcctcctccctagtcaccaccacgaaatctataccggatgagaaatcggaaaaacctaccgggacctcaggcttgaccgggagtcatctaggctcatcccccgggaccggtcatggtgttgagttgacagagtggcagagagacggttggacatatcactctaaaggtttgtcttcttaacccctctctagattgacgttgaactcgaatggtaagaagaaagataccacttgcttatgttccaccttcgcttggtttctttggagaaactgtacaataggaatttgggtatccccaccgtctagcaaattgccttctcttactctcattggctcttccaacctttccacccgctcatgcgctcttgatgttgaaacctccttcttcatcagcacaagttcacccgaacttcgtcgtgcactcaaaaaagaagttgatagactcagagtgcatagtcaaccgtatgtcattggagcgcatacttggaaagagccaagcagacaggtcagttggcagacctgggtactggtcaaagtattaggagtgaaaaacatgctataatgagccttctggttcagagcattaggaagtataagagaggggtggtactattattccttctctctttcttgatatgttctctgtcgttgcttatgcatagattatgagggtgtgcaaggggatgggtgggtgaagacaggaacagaagattcgcatcaatcgttatagaagatcattagatagagttcatacaaccagatcagaccatggatacagaaaaacgatggcatgggatgaagggagagaatcaaagtctagctttgacatcttgtgaatctctcacatgaacaataactttgccccatgtttttctggattcaatatctgccagtccagtacctatcttgtctagcccacttttgacacggaaagttgaatttgtacgcgtggaatagataatagcatcaattcaggtcacattgtttcgtcgcatcgccgtgtatgttgattataaaaaaaaactggactgacttatatacccggtcataaaccacaggccgataggctccattatgaagacccttgaagagctctccccatataacaggtggctgggaaggttctttctctgtacatgcgtgccatataatgaaagagacgatcatgtcaaatggccgaatacaaaagagagaagaccgagatgtatatggggcttactgtagtatgctccgagatgtagtccgacgacgctaacattcttgaggaggattaagttagccggaatctatcacgtacgaaaagaaaaaaagatgaacatgtatcaattttacaatcgtctataatgttttgcctaactatcgggatgtcgctcaagagcagaagagactaggtaacgtactttctcgatagcgcctgcagcgaaaccgacgacaataagtcgacatttccaagcagcaacttttagactgggtatcaacagaccttttttcaatttttaatacatcgtattatcagaaatgaatcaagatgaaaaagtaagatgaaagctgatacaagaatagagaatgtgacataccgacagggtcaaacacaacgtcgacccctttacctcctgtgatttctaagacctccttctgccagctatccttcgagtagtcaattccaaaatcggctccaccgtgtttcttgcaaatttcgagcttatcagctgaggaagcagtagcgatcactttacatccgagggacttggcgatttgaatggcaggcaggccttccgatgtgagaatcacaaggcgccaaagagagagcaagttatggcttcgagtcgagtcagaaatcagaagctcgtgtgaaagaagagaactaagacagagacgaaccgactccacctgcacccgcatgaacgagaacccaatcccccttcttagcttgtcctcgttcgacgattccctcccaactagtctgtatcatatcatcatcccagtaggcagacaactccatcaaaatgagttttccgctagcgcttcaagatctcatcggtcataaaacttattacaactcacaggccaggtaatacaaagcccggcttgatagagcaacagtcatgaaggaacactcagtatatatacacatcacttaataatcaagatgaacctaccggcttcatcaaaggtaattccgggtggtacgggaagcaactgggtgtgatggacagcgacttgctctgcaaaggaacctatagaaaagcagaggccgatgagcagatacagcttttagtgaaattttttgaagagaaacctgattcagtggttttaccttgggccgctccaaaaaccttgtctatttcatcgcgaggtttcacactgtcagtcgtcagcttgacgcgcttgtttcgttatgtcagatacggagggttgatgctgccactgaccgccagccttgaagacagatccagttgggatgaccgcatctttcgaaacgactcctgcgaactctgtcccgagaacaaaaggtaagggcggttgaactgataccgaggcgaccgatcagtccgttgccagcgatatgccaattttatgtcagctggacgaacgttgatatttgttttgagcttgaagcaccttgatgatttttagagatccagatttaaacgcaaaaagcaaatatctttcagtccagataccgtcgcaacatcgaatttagcaatcctcggcaaagagacaatcttacatcgaagaagttcaacctgtagttagaaaacccgtggatatatcagtgaggatctgcgcgcatcaaagattttcgaaaacgaagaacgccaacgaacccgcaactgtacacgtcgactagaatctctcctttcttggccaccggtgcaggagaatgatgagagctaatccgtaagactagttagccctatgacccactaccaggatgatcctggcgaagagtgatagactcacacagagatcttggtaggatgtgcgtgtttttcgacgacaaaggctctgatgccacgaaattggtcacaagtttatcaaatcagtcaacataaactacaagacgagcgatactatttactgacttcattttgagataggtaatcgatgttgatggtgaacaagatataagttgaaatctccaccacaggtatttctgttgcccggctatatctactgagttaaccgagaaccggcatactgtaaccatgtgatgtatcctaaacgaccactggttacggttcccttcctcatcgtcatcaccgactggctttttcaatcttgcattctttgttggttgtatatcgacaacatcaatgaccatgtttagtcctcagtacaatcagccgtttacaatcgagtgagctgctcttatctgtctagatctagaatttatcacattaaaactgaaaactgactttccagctttcctcaacttcaccagagaggcattcgctctcgaccctcctatcatcaccgaaggtaagacagatagacccactcgacctacactcctgaattatatcccttcagatggaaccgatcgttttacctaatcgatcatcgtcaattctcttacatcctctgtcagaaatctcaagactccaaaattcaatccaacatctcgaacgatcaaacttggatctggtcacgttcctcgcgtcggaaactgatccggatgtagccctgttcgtgcgttcctctgttctcttagaaaccctcaattcaacaattgatcatgtcgttaacgtatctcattatgggtctactttctgtttgatctgaggatttgagtagtgcattacaagataacaagatcacgatcgctactcaatctgagcgaatccagatccttcagatcgcgcttggatctaaactagggatcagggtgtccgactctcattatgcaccgaactccatacagagcttaaattcatctgccgatccgtctagaccaacgaacggagcgagtacagtaccggaagtggtcacgagctcggtcccttctatagtatccgtagagacatccacaacggcgggctcagaatcgcgagcgaatggtacatcctctagtcgagacaatcaggatgactcagaagaaggtgtctatctctaggatatatgaaaatcactagtgataggtataagcataagattcgatacatctgtagttagaactggatccgttgggaccttaacatatggcatgacaacaaagctttcatcgaatcatgaccgagacgacagaaagagtgtatatgaagcgaaaagggagacaaaaggtatgcatgtacagaatagagaattggtgtttttggctagattggagttggatgataagagagataaaggaggggaaagtggacactggacataagcgcaacagaagagagaacgagataggggaccaaggggaaaaccatgcgaaggtgtttgtgtaatctcttctaaaggaagaacgaaggggaatagaaaagagaggaagtgtcaaggaatagtagtttgtgatggtgtgaaaccaagacatgtgttgaaggagtgagtgaaggggaccgagcgaaacgtctgaaagaatttactttcgaaaaaaaaaaaacgttaacaaaatgggagagaagagaagaaacaaaaaaaaacagaaacatggatgtagatggacagaagtgaagatatatctcgaagagcaccaacgacgtcgatatcaacgtgcaagtcctaaattatcccgtcaagggaagaagtgagtgtaaattcgactggtgggatggacctccatctcttccaacttgaactggttcaagaaagctttgatctcttgggcgagctggggagtaagcctgttacatgtcgccggttctgaacgccgatcgtattcgcttccatggaacgtatggtacaccgcacagttcggcgcccaaattaactcccttttcttctccggctgtacggagaccgaccgatgagttcccatcatcatcggcggcgtgttgaataacgagagtgtgggcgcggatgagttctgggcatgattactgtacggaaagctttgtcggtcaacaggatctattcggttggtcaaatcctcgaacggcgcgaacgggggggaagacaggatattcttcccgctcttgtcggtagaaacagcttgtgattgagtacggtcgatgagatcagagcttggagtagggagttgattaaacgaagaagaagaagaaaggcctccagaataggtcatgttgtctgaagagtttgatcgtgatcggttccatgccgggcctgagttttctttcgtagagtcgggctgagccggtatgactgacaaaaagataaacaagacgagcccggtcattagcatcgacagcgtcacaattagatgattgaggaatccatcgctaaccttttagaatcgacttaggaggcgttctatccagagaaaccggctgtacgtcccaagttaaaacctcttcgtcatcgtcaactagaatagattgacccagtttgtcaaccacctcatcgacatctttagcgccgacctctccttccaagtctgtaagacttccaaccgaactatgatcgtcgtctctgtctccatccataaaaggttctacgagaccaagtgaaccaactggctcgattccccctagctgtggtcgatcggcacttctggagacagtattgctctcccaagtggttggtacgtcgatcgacaacctatgtccatcctcgttgacggtcgcagcccatcggtttgagagagcgtcgtcctctgcacgagatcgcagggtgtgctgtcgagcgagcttagcagccgggctaagaatagcgctgtcggtagctgcgactcggtcggtttccacactgaaatgggtgacggttggggacgggacatcacacttccgactccggaacggactgccttttttcttgtctttaggtgaatcggaaccgtcaaggtccttgtttttcttgtccttgtccttaaacatatttgagataccaatgagactatattgtcgagaaatcacatgtatgcattcggatacaataggcatgtcagcgccgaaaaataggaaatggttcaggagatcaagaacgatgataatgtggaaatttccggactgacctgttctttgaggccagcttcccgaacgatccgattttcttcatcatcatacttgtggtactcgcagcagaagcgattgagatattatctgtactggcgttcctcatgttgaagagcgatctcgaccgtttgattgctggtggtctggagtcgtcatctgggagggttgtggatgtgcctccgtcgggtttggcggcctgtattccggaggatgacactgaccggccttgcaaagcgggcttgctaggagaaaccatcgttgccgacactcggggctgagcttctgtcgcaggagcggacgctttgccttttcccttgaacttgctcatcaggcctttactcttttccttcttctcgacgaccgctgtcggtgcgggagatgttctggaaggcggagaagagcctgatgtggaaacggttgtgagtgaagatgtggccgaggtttctctggctcgctcgacaagaggaacatcctgggctcgagacaaaggcgatggtttcggaggacctgatttgacgactactggagcgccgagaggagaaacagtcttaaagggcgcacgcggaaccgtattgggtggactcgagacaggcgacgatttactgggggattgagtagagctagatccgtttgagagtgaagatgggtttttgggtggtcctccgatcacagatgaagatccagagccggtggatgagttcccagtggaagaagacaccgagacgtttcgcgcatgcgcctctcgatattcattctctcgttctctttccctctctactcgacgtttgtgatctgacttgatgctcgagcccacggacgtttgggaagacgttgcctcggttcggatataaggtcttgaaggagcgatcagttcctgggcgttagatgcatccgatacttcttcagtgggtaccgctttccgattcggtcgacgatatgagtggaacccgcctggcggtggaactgcgctggagttggtttgggaggcctcagatgaagcaagaggagcggcagaagacggagtttgagcggggttgtgttgagagtatgaggattgtcgggaatggctcgggggcgtcggattattggagtgatacgacgtatcgagcgatgggcgtgggttatgttggagaccattagaatttgtccgtcgacgttgaggatcaacaaaggaggaagacgaagcttgaaagtcgttcaggttcggattggagtaaggagagcttggagggaaaggtccaaccggaggagttgacccgttgatcatcatctgtgtcacacggcaagtgtgaattgttagtgaatagataaatgaatacatctttttggaaggcgaagagacagaaagtatagctttgaaaaagacgtacatgctgataagccgctgcccatgctgccaattgctgttgttgttggtaaaactgctgatgattgttcattggtgatggaaatggcatcccaggaaacccagggttccagccattgggtgcgttgtagtgctgctgaggtggcggctgctgttgatgctgatgttgatgttggtgttgttgatgctgctgctgctgcggcggcggttgggttgagccccggatgccgtaagcggatacgccgatttgttgggaagacgacgacgacgacgccgacggacgatggctaaacggaggagtagacttgcttcgaggtgggagatcgagactggttcccgagtttgcgttgttgattgacggtcgactctgatgttggctcgcggaggacatgtgggcggatatgtgggaggggcgatccaaagagatcatgtagaaaggtttgagcgatagtagtggtaggaaacccaggggtctatttttgttgtaaaggagaaggaccgaaagaaccagaagccaggtcaggtaaattcatgacaaacagacatagttgattgccctgaagacaagtgacggctagttgtctgaaatcgacgtaatgaatctgacgtactaagcggagaacagagagtagtatattctgtataaaggacccatgttcggtttcaagaaggacgtgtgagtttatagttcgacttgtgctgcatagaatgagctgtatggatgaagtgtgtcctaagactcgggtagagatgattggagggaattgaaaacaggggatagcaggataatttcgtcgaaacgagaatttcttgcccttgaattctaccatggttgtatgccgtctccatctcaaaggtctagagaagtatatttctctggaaaatcttaaaatctaattcatcactcacctcagctaaaccgagaacgcttcttgaatgacgagagcactcgacaaagctcggaaaagacgttttgttcgaacgaaggataggatcaaggaaagaaaggtagagaaagatgtattgccgattcttcggcactagccgatgtgaaaccgccgagcgagttcgatagagagaaaaagcttaattccgacggaatgactgcctgggaaagatgttgaggaagcaaagaaggcggtggtcccaaaaagctagagctagagcttgaagggagtttgtttcaaagatccggtggaccgttcctttttgagaatgatccggctggggtgtgatttctcagagggtaaaagttgtctgtctggggatcccgcaagtgtcagagaacacgaaagagagaaacggcaaagcttgaatggcaggtaagaacaaagatttgagaacaagaagagtgtcgacaacacaagacaaagctgaatctctccagaaacaacgagcaggacacaaagaagaagaagaagaagaaagaaggagatccaaagaagagggaagagtggtcacccaattaagctgaggcgtgtactggggaatctgtgatagtagatctctgaccgcgcgtatgaccacaactcattctcttacgatctttgcttccttctatttctctctggccttctatctccctctggtcgacaacttgttgagcgacactctggatgaacaagctcaatagacgtacctagaaagaactgaccaaacgagacagtgtgagtgtgtgagtgtgtgtgagaagcaataaaggagaaagaaaggacgggaagaaagaaatcaaccgggctcggtatcgcgcaaatagaaatttcccaatcggtttttcttactcttcttgtcacatttcgtccgttctttgggtagtcacaactgagctttagatcgatcttcttacacgtcatatccatcgcaccgcttcgtcggatatatgataccatgttctctcttcttccgagcttatttctatagatatcttggtacacacacacatatacatatacactttagaagcaagtagagcacgatatacagcaaagatcttatctggtgaaagggatttctgactggcagcaaaatcaaaacagactaaaataaagctgatatgtcatcctcgcttgttgctcgtcaccactatacaaagaatcccatatatttatcacacaacttgaggagaagatgtctatcgtccttgttacaatcatgcgtgcgacccaaggattttacattttgaggtctaccagccatcctcctcgtcatcctgctcgttcttcgtaggctgatatttcgccgtccagtccaaccaagagcctgtgtagtttcggacgctatcaaggtttcattaattgagatgagaatgagtgtttagccaatggactggatagttcaccgatgacctgttaatgtgtagtacaagttgaggcaactcacttggtgaaagcatgtccagcgattggtgtggcctgcaaggtctccaatgcgctctgacttcgccttccacttcggcagtaaacaacaataggttgatccggctctggcttcttgtaggcgtactttgactggaacacatccggctccatagcgagagcatctttaagctctgacagggggagaggaagagagcttgggatgttaccctgcttgatctcatctcgctctcgaacatccaacaagagaacctcctagattgggcgaaagatcattcgcaatcaatacaaaaaaaacaccccgcaatgagttttggattccgttattggattaaattgagctgatacccggcttgatataaaaatatgataaaaaaggagaactcaccccagggttcttggaaagctcccttacttcctcaaactcgaccggtcccttgtcggcccaatcgtgcctccccctcggaacttctatcgagtacagccgtcgagccgagttgataggagcaatgactgcgggaatgacgtgttgatgagaggcagctatagcaggagtagacatgggcaagatggactttgagaggacgactgaagacgtgaccagtgatcgacgaaacattgttttattggttcttcttttctgtctttccttcttatttctttcttctttgaaactgatagagcttgagagacgatgagtagatatgccgatagttctatgtagaagaagcacggaatgtagaggtagcgttttaggtgatggatgaatggtagaagaggataaagtagaccacagattggtaggccggcttttgctttcttcgttttcctctcatattcgcacagatcacgtaataggcatcgtcggtctcagccttagcccaggctcacttattcgctgcgaccaccttcaatatagtagataaagaaagaccacattcggaatggatatatttcataactcaattaaatacaaaaagtcgagaggacggaggagatagagaaaaagaatgaaacaagaaacaacacatctagtcatcttttcgacatcatacccgcttccggctacttagcattcccaactccagttgcttcccggaggtccctcaaggctgccctcctgaatggcagtcaccctggcgtggaggccagtggcgataggcccaagtccggtgggtccgatagggatatggatgtccttgacggcttttgattctgatccggtggggagaccgattctagataaataagacgattttgatgttcaacaatgatgaagaaaaccaaggttattcagtgagactttcgaattggcccgagaacgccatggagcttacctctcgacagagcagacgacttgatcatccagtaccgacgaagaaaagaacaaaaagatttaggaaatcaacataagaaccacgacgaaacatatcaaggagagcatgagagcaaagactcaccagcagcagttccagcaccgaaagcctccctcaaagcgtccttctcgctccaagccctcaggtcgctcaagccaaactcgcgctcctcgatgacaaacttggatttctctggcagaccaggaagagttatctcgcccttctgatgtgatcgagcgagggcgagaagagatgctcgagtgattccaggcagaatcagaccgttgagaggaggagtgataagatgggttactgttgagcagaagaagactggatcagacgatgtacaaggcggctggtgtgaagagataaagacgcgcaaagagagaatcttgtcacaaacctccctcatcatcctcataagagacgaacaagttcatctgaccacatctaaaacacgtcaacgacaccgttaatgcaactgaacccgagaagaccaaacacacgatcaagaagaaactaactccgtgatttgatctccaaggcaccacaaattctgatcgtatcccagcgacttagctttctcttgaggtcggaagcaaggagcataattcaaggccagcttgtactgtccagttcctagaatagagcaacggctctcaggtcagcatcgcaagagatgcccaacaacggttgggcgtcgatgagattttgtttggcaagaaatcatacatacctccaggccatgatctgacggcatcagtagtagcgagcagggacacaggcttgaagcctttggggaagaacggtccgacaggacacatgatgacatagagcatacactcgtccgaagcgccgactccgagagcaggtcgagtaccgatcatggttggtcggatgtagagcgaataaggtggtggaggaatcaaatgttcgtcctccttgacgagcgtcttgatgagagagatcacagcctcctggttgaaaggctggttgcaaaaaagtaagggagcagatgaacttcaactttgtctagcatacgatgatagcatcatatggaaacggacgaacaggaagggcgacccggtcggcagaccggctcattcgggccatattctcatccggtcggaacaacctaggggttttaccctcttgtttgtaggccttcatacctatgagaccgcgattggaaaaagaaaagaaaaatcaaatcagcctcggaatcacaagacgagggagagttcgcgataaatgtttcctcgattctttctcattgcacaagaggatggtgagaataaagaaacgtaccttcgaacaaactgggagcatagtggaacttgatatgagaggaagaagaacacgaagaaaaagaagaagaaaaaggaaaagaaataaatttggaactctgtaaacgattacggtgttctccgaacagagtgaacccaagagactcggaggcatgaaacacgtacgacggctgaagcaggactgagctcaaggggtccgtaaggcttgatgaccggagcttgccatcctttcctgatacaggttgaacatatgtatagaagaagtggatgataccataaacaatcgatacaagacgctgggctgaaagtgagtcgatagatttagggtcacatacccggctacgtgcttgatgataagcatgtggtcagaaaagttggctccgaacaacatctgttccggcagagcagacttgacgggattccgctcaatggtaagcaaggaaggctggtgtggtttttgttttgtttacatgaaaaaagtttgagcaagaggacacaaagcacagctcaaccatcagtccttccacaagagttctaactgagagaaggattgtatgatttcgggaaagatgaaaactatagacatacgtcgatatccgtccaagcaggagcctcagtggggatggtcatgatagaaggtaagatgtgttgaaggagtgtatgtgtggataacagaagagaagaagaaaaggagcaaagaaagagaaagactaggttctttatttaaaaaacggagatggaagaagaggaatcaagagaaaaagaacgaaagcggaggaaaaagaaatttagttaaatacggaagtgacgattacgcgcgagacgagtcatcgtgaaatgattgtgaaatagccgcgactaagattagagaatgtactacaggtctatctacaaaacgactacagcacgcgctatcacatgaattttccgagtggcgattacgagacctattaggacggaagctacagaactctccggaaaactctatatggaacggaaaacagtatatacaacagaaacacgataaagactacaatctctgcccggctttatctagaaggctttggagaaaaaaccaggaacagttcacccaaaatagcccttgtcgcctccctctcttcttccgcctgtgccgtacgcccactcgcttacgcccacgcatcgtcgtctttttaaccttcaaccagtataatcatccaggtcgaattctacccaaaccctttctgtttcgtgttcccttttgtgtttctctttcttttctttcttaacctttaatcatccatctcctctttgatcggctcttccaaagtctcgtcctcagcagtttctcgtcaaaacggtggttttctggcgttgatcggctgacgtggtgagtgatttaactttcttctcagggccactcgtcctgcaccggatccataatcgcccagaggtcgactctccatctttgttctctttgtacgatcctggaacatcgtttatggatctttgtcgtccgacatacctcgagtgaggatctcgaccaatctctttcgacattcatcttctctctttctggatctctcgcttatcattcttgtgtgcatacgttgttgatcctggcctttctatctttctgtcctattcagaagagtcccggtacttttcgccatagctagactgctgaactagcctcgcttcgtgcattggacagccgcatataccccttgccactttaagctttcgatactgttccttctgatcgctcgtctgtcctcatccaacggggtcgaccgaataaagcctcatgtctgatattcccaatctctcgccagacgtacctcctttggacgaaccgataggcagtgacgagcgtcttttgggctcgccttctgtacctcgtccgatccctcagcactcgaactcgtttaattcttatactcgtccccggctctctcagacatcctcctctaataattcgttctccccggcaccttctgatgcagactccaatagctccccttcgtccaactcgaactcgcctcggtcggttgcatccggactgccggtaaccaggtccatcctcggtcgtcagtctccggcgaagaaaacgaccgggctgccgccgtccggcgacaggtctgaaaagattctcgaccatggaaaggatcagtctgtcagcggtgcccaatctctcgaggcccttgtctccccaacgtctgcttcgacattgaatgcctccctcggactttccctcccttcaaacgtcatcctcccacccggtccatccaagcgcacttttgacacgacaccgtcgtttccctctcctctggcacgggcatccattgttcctagattcgacgattccgatgaagaagacccgaatgcagatatcgaggcaaccagtctggagggagtccctcattccgggttcttattcggtcccgatgggtccaaaaaggctcgtccgaggagaacgtccaccaatcttctccgctcaggtagagcagcctctcccagcacgatgcttcacataatggcaaacgctaggcagacgtcttccggcataccgagctcccctggctcagaagctagcagtcacgccagtcctacgtcgatgggagatccaatctcgcccgggttgacaataagagacagagacccgagtcggcggagcagacaaacgtcagaaggaggttcctttcgacgcgctgggttccctgatggaggctcatctcccagtagatcgtgagtatctcgatcgaaccatcgacctgttgttcccattgtttttatattattttttaaacttctgcttacttcttgctttttcgttgcgtttgcctcagccccactcgttctcgccgaagatcagatatggtcatggccagctctcctgataaaagttccaacctgagacacccaatcactatctctcgacctcttccgatcgcctctctgaccattccaacgccttccagcacagtttccccactaaatgcccttcctgtgccctggggtaattccccaacatcatccgccccgtcctcaccaacagaaagcaactttacgggcgctatccgcttgcagcgagtccctacttctgttaggctcgcttcagacctgatgggatcctctcctcatagtctgagcccacttagctcagcggcgttccttcgaaggggaagcttagggaatccggacgcattgaacatgggagcccttgcctcttcctttggatcgacaacagagagagaccctcttgctggtacgagtaatattgtgaacccacacacgatcaagactcccaacccatcgccagaagaaggccatctgtccttgccgagtgtgacagtcactccactttctaccccgctggtcgaacagaacgatcctatgggcacctcgccgtgggctcccggagcatctacctctctcggcgcattttcaggtagaagcccgttggtgtacgcaagaccctcaagatctcccattcctgctccttcggcattcgagccactggttgcagcaagcccggcatccctgaaaccttctggactacatcacaaatatcgaacgtcggtccacgagacatcttccctcggtcctctattaggaaatgcaactcccacggacatactgtatggtgaaaacttgggagactctaagaaggaagactatgatccaacagaggtggcgaggactataatgaactcgagatcggccaaggtatcaaagtggaagcggaaaagtcaggtacgtatgacacgttggcaattcagacactctgatatactctcgatactcggtcattcatatactgagacgttctttctctcatttcatcgtgttgtccatcatatagacctcggcttcgtctgacatgcccgactcctcgtcgattcttccgagaacacctgcgcagtggatgcctcccaaagagccaagtatatcaatcaaagattcagagtcaaaaagccctcatcttttgggtgaaccactctctcgatcttcaactgttcctcggaggttgaacgaacgagacgttaccgacacgccaacggacgatgtggaatctggacaattcgtcttggatcgtccagaaacaatttccggtccgagctcacagcactatatcgagtgggttgattggttggacgagtataagcagttcaaagaggccaagatccgtgcagagcttcagaatttcaccatgcctacgacgagccatcctgaacctcgaaagggagaaggcattgaatcagaatcctcgatgtattctgatcgtcccagtcgtcaagcttctgcagaatcaagctctgatataggtgatgtccgcctagagacactttcacctcaaatctcatcaagagaaagagtagttttgacagcttcgtctctgatggaaggaaacgagggaaagagagcacctcatcgacgtacgctctccgggatctcggccggagggcagaacctccaggacaaccatatccaccgggttccttctcaacgactggccaatgtctttgataggccacgaaatttctccagctcgactactgattctagagagagtacagatagttggaaaccgaaacgcaacgttggaaataaactcgaggggtggtggaagactgtcaagagcacgctcgctttatccgatcatcctcactcaaagcatacaaaaataacctcgaaaccatctgaggcttcaaatcaaccttccacaagatctcttcaatcaaattacccatccgccatccgtatcgaaccaggcgccccatcttcatctccaattactgtccctgccccaccttctgctgttatcggattcttcccatcaacagggcaatctcctcgtcaaccactgaaacaccgaacatctgcttatgac

SEQ ID NO: 1804 - DNA, 21894 bp, Xanthophyllomyces dendrorhous
ctctctacggagcttaccatcccgggaagcattggcgcccgccgtctctctcgtttcttctcttcgaccaaataaagcggctgaatcttcagaacaagatgcccttgtgcctcctctccttcgggccttgtcttccaaaagcgacaagacaatggatcgtcaaccttctgccgagctcagcctcgaagctcgccgaagacaacctccactgtctctaaaattcgataagcctcaacttcgacccacccccacccattcaagctcgggacatggctctgtctccagcactgaccgccctctccatcggacgcttcagtcccgtacttcttcatttggaacggattttgatagctcttcttcttacaacaaaaacgctatatgggctcaaacgcccagtccgttgtacgctcttcttccggacgacactcgaaacgctactgatgcaacaacgcccggaatgtcgtcacaatcgttcaacacggcagctatacagcgagaaatcaggcatcggttgaccactcagaaggaagtttgtaacaaggagctgaataagataatacatttgattactctctttgtagaggagaagctcgatgaggtcaacgaggcagatcttcaggcggatatcgatatggataatctgggcatgtattctgcaatggacagtcagagcgactttggtggagatgaatcggatcgggcagagtatgtaccggcgagaagaagtaggtttcttaaaatttcttggtcatgctgttcaaactctcgagttgctcactgatcgatgtgttcggttttctctgatatcaggagtatctcgaccatcttctcgcagaccttctatttcgcttgccagtagccctgcgaaacgtcgagactcgttacgtccaactgatgtggggggtcttccagcaccacgtcgtcgatctcgaactcaagagcagcgcttcaatcagactttgtcaagctcgttcaaacctacatcttcaaactcctcatctcgatccacttctcgttcacgatctccatacctgccacaaagttctctcaatccggatgacaacaccggtctttcttctcccttcttggctacgttgcaggaaatcatcggtattgccactgaagtcttggatatgtccatttcggcaatgactgctcgcccggggatttgtccagaatacgtgcagaaagttcaacaagttgggacaacttgggacaagcatccggattggcctggccgagggtggtgagtatatctatgactgttgtctgactctgtcagacattttcagtaggctctgctgtcatcaagatgggagggaatgctaatcattctgttattggtttatcaatcataggtacgtgcagcttctgctagctgtagcaggcttaagccgagtgatcgagtggtgggaggccgaaaaaggattttggaattttgccgatcacgataaagaagatgagcctctatcgtttgtgataaagccgacaggcagaatcggttcccccgtcatctctccttatgctcgacacgaagctttgccatcctctatgggtctcggttttggagggaaattcgagccacgctcatcgcagttttcttctatcgggctcaggatggacgattcggaccttcagtttgaaggagataaaccgagtaccgtgcccaagcttgatattggtccacctagggaggacttaaagctacaagtcgagcaggcaaaaacagtcaatctcgtgctcgagctgagtctggatggagatattgtcgagtggatcaatccagcgtggcaggaagttgttgggtacgtgtcttcatttcttggtcgtttgttctactctgattcttagggttctgtcttttggcctgggtctgttcttcgtttgcgctttgttaggtcggatcctggagatgtcataggacggcctattcatgaatacctcgctcctgcggacgtctctgtctttttggatgccagtcgagaactcttgaaagatgactcgcacactgttgaggctcgatttcgattacaagtgggttcaaaattgtttcttcgcttccacagtcttgtctgttgaccctcgccatatctctatatctgtaggttctaccagaagctagcgacgaagagtcagatgttcgcgagccaggtccagtctttatcgagatggatggaagcggaatgcttatgcgcgaccggttcaatggcgaaccctcccacagtatgtgggtgatcaagccagtcgctcttccagcgggtgccgaagttgaacgggccaacaaccctctgcttcctctcaccctcaatttcggtgttggctctcaacgtcgagctcctattcattctgtctctccgtttcctcatggaaaacccatctcgacagttgattttttatgtcggatttgcgagcgacaagtgccagcttggttcttcgagaagcataacgaaacctgtcatgaagttcatcgcttagaggccgatatcggcgagcggaatgaacgaattggagaatatcttcagcaagccgccgatctcgccaacgtgttggatcgaagtcagccgtcttccccactggcttatcgaggagtctctgtgtcgtatttccctgcaccctcatcaagcccgagcaagacctcttcttctcgaccccttggatccaattctatagatcaccaacgatcgatagttcatcaagttgttgatatccttcaagtctgtctgaacgtctccaccccctccatcaaagaggacgctaccgatgtcccgatcgaggagcagtgtcttctttctcctcgctcagaagacaatatgacgttgatgaatacctggatccagccgacctgtaacgaccccgccctcaggatgttggttgaagacacgatctctattgtcagaagcaaattgaatgctgtcaatcgattacgaaacactattgtgtactcggaaagagtgcgttgcgaatgggaggacaaggtagagaaggcgctgtgcgctttgtctgatgggagcgacactgatctctcttcggatacgccatcggatgaagacgtgccggtcgaacgttcggaaactggtttccaaggcttctcagactctcctttggatatatcgatggcttctataggacccttggaccaatccctctctcccccgactgcatcttcgctgccttcatcttctccgggtagctcacagcatcgaagttcaattcatactgccagtagagccccaacccttccctcaatcttatcgacaaacgagatacccatggagagggccacgctgagtgttccatcacagcatatatcgattcctcaaaccgagtcactctactcgtcttctcccaggtctccactcgctcagagtatcgaacgttcgcctactagatctcggcggctttcgataacccgaaaaggacgattctcagtgggctcggatgctccactatctcccagacttccttcaactacccccacatctagatccacttcggtctccattaaagattttgagatcatcaagccgatcagtaaaggagcctttggagcggtctatctggccaagaagaccaccacgggagactactttgcgatcaagatgctcaaaaaggctgatatgatctcgaaaaatcaaatcaccaacgtgaaggctgaaagaaagattcttatgaaccaagctgagtccccttatgtcgtgaggctgttctacacctttcaaaacaagcactctctttatctcgtcatggaataccttcccggtggtgatcttggggggcttgtcaagaaactgggaacacttggtgaagactggacgaagcactttgttgcagagatcattcttgggttggaatcgctacatgacaagggcatagttcatcggtaagactgaatctcctttctctacttgagtatctgggacaatctctgatagagtaaaaatgttgtcttttctcttcgatgttttaaccccagtgatgtcaaaccagacaatcttcttatcgatgctaagggccacttgaagctcaccgatttcggtctttcaaggattggtctgctgggtcggcaagccggaggatctcgcttcccattctcatccaaatcatccttccggggcccactagatcatcgttcggcttggtccagagaccattccatagattcctcagattctaacaacttctccccaaagggcccaataccagctggagcttcaagtctaagccaatcatatttcggttcgcttctcgacaacgatggtcgaacctccgctgatgagtccagtagagtagagagtgggtcaggaggaggtcttatcactcctggaacacccgctgtgttcggggtgaaaccatcgggctcggataatgctcccatatcggatacccataagtttgtcggaaccgtggattatgtagcgcctgagagtattctgggactcgggggtgacaatgcagctgttgattgggtaagtcgaactatcaaattcttgatacaaaatcccttatttgctaatatgtgaaacttctgttctgtttccgatccctatacagtgggcactgggagtcatgatgtacgagctcctctatggttgccctccattcaatgatgagaccccagagaaggtattcgacaacatcatatctcgccgaatcgtgtggccagaccctgaagatgacgaggcctcccctgaggcacgcgatcttatggaacgactaatgtgcactgatccagatcaacgtctaggcgcgcacggcgcggacgaaatcaagcgacatcccttctttgacgatatcaactgggatacaatttctagcgaggaaggctgcttcattcctcaagtgagcgagaatatctccacggactatttcgacgctcgaggtttggtagagcttcctgaagagttagactctagcaaccttgccgtggatccttcagctctcaacacagaatctgctcgcgatgccgatgatttcggaaccttcagcttccgaaatctgtgggccagtaaggctgccaatgaccaggttgttcaagatatgagtaagcctgtttcgtctaattggttttcgttcgtacatggatctaatctcattcttgcaacatttgacttgtgttccttcagaggctcaagcggaggcagatgccctattgcctccctctatcgaatcttcccaaggctccttcagaggggatcggaggaggagtatcgttacttcacgcaagcgagctaaaggtccactgtactggaatgaaaaccaaaaggtttgttgttttcttctcctctcttccgcgatgcaaaccctgtgcaagactctcaaaccgaaaattatcctttgtaaaacacagccgaatgtgccttccacttctgcaaacaactcttcggccaatccaccatctccatccgcctcgtcttcctctggaggatccttcggatttgttccatacccagttgggcataatcgtcgaacaagcgatctagacagagttcaagctgacagtgatctcagccgaaaaagcagcttgccaagtcgcttacgggctagctcaacatcacaggcgtcgaacgacaccaacccttcctctttatctcctccatcttcgttatcttcgccgcaaacatcaaatatgattgccacagccagtcaaggtcgggtgcaggtgcttttggcagaggataacccgttagtatatttcttgatttctttgttatatgctgggactctaatctggtgtttttgtgtatgtactgcagtgtctctctcaaagttgcttgcaatattcttacaaaacttggtatcgaatgcgccacggtctccagcggatcagacgcgctagctgtggctacgacatgtggtcagtgatttctctccccgaaaaagatttgaatgaccatctgttttaacatcctttgaatctcttgtttcactctagcctttgatgttctgttcttggacgttcgtttgcctcatcttgatggcgatggtgttgctcggtatttgaaatcagtcgccggtcccaattctgttagtcccaaatttcaacctacatggatttagatcaagcctgagctaatctttgtgtacacgtatttgatctaggaaacacctagtaagcttatgatcacttgggtaaatagaatcctaagtacaatacactgacctccaattttatggacacatcaaacagtcgtcgctgtcaccgctgtcgcggaagatgactcaacaaccctctccgaacatggcactctcttctcggcagtcgttagcaaacctatcaccagggagaacgttctggcggtaggtcctacatcttaatacagtccttgttattgttgtctcggtggaactgacgtgagaatatatgtcaactctcacaggtccttctcaagcttggcttcaaagtcgaaaactctgccaactgattgaaatagctactcgatgtgatttctctcgtatccttcttcatcttcttattgcattttctcttctcgaatcgccaatcatgtgtaaaattatgcgccaatcatcacgtctcgtctgcttttctttttctttttctttccatattttggcctttctcaaatcatagcatctttcttcgttctgcgcatttctcttggatgggacatagcaacgacctcatttcatcgtttacatatttgccccttccttcgatttctattcgttccgacgtctccttgatcccaagtctatcaagtttagttttctttggctcttgtttctttttgtcaagctcccggatatctctgatcgacatcaggtttcttctttttttcctcttaatcttgatggcttcactctatctatcagtccgagatcatgttttgggtcggttactctgtcttctgattgcgaactgcgaactgcacgtacatcttttgaagcgcggccatgatgtaaacaatcattttatggccctacagtatctacaatacaaatgtgaacaggcatcctgaaggggggcaagttgagtgtacaatgaattctcaagaagatgggaaagatgggtgagtatacgaagaagatagagagaaaggaggggcagatgaacgccagaagagacatcaaaccaaaccaagaacgactgtagctcgtaaactgtgcattcttctactcgtatctaccacacctgtccaacctagaactccatcgtccggcgaatcctccttattgtctggaaggacagatagatactcttctgatcttagggacgagctcttccatcctggtgatcggaaaaaaattaacaatagtgaaggtagaggaataagtcaagttgtttgtagatgatcaggaagaatagacacgtaccccatgattgagagctgaacagaattcagagtcggttatgttagttatagatcataagaggagaataggttgaacttgtaaaaaatcacgtacactgtaaagtaatctggcgccgatgagaactgtgcgtatacatggtaatcaggatgagtctcatcgaaatcgtattttataatgaaagtagactttgctcactctggtaagagctgttcctaaggccgaaggacacgaaatactaaaatacgtcttgactaccttgcgagctatagacatcccaatacgtgttcaagcacatgactgttagctattcgaatgtacatagaacactctagagcgtacttacgatctttgaaggtttctgtaggagttttcgacaaaggggcgcctaaagtcacctgattatccatgttgttaggtagcgcccttgaagaatttgatccgtttgagctcaatgatgacggtcctgctcctaagctggatggtcttctttgcatagatggtgtcgaaggtagggattggcctggaccagtgatggatctgacgagagggatgtgaacatcatgattgagcataagatgggaagcagaggcggaggcatgaatatttgtatatgtgttattgctaggagccgaagatgagaagttgatagttcgagacgaggggggagagaccacagtagaaagctgataagatggctgcgagggtgtaagcagagaaggaggggaaggagaaacaggaggcgcggatggggtgggcactacgtaaataatgagatcaactcgtcagcacactgatggagaagaattgacaagcaggataaggataagtcttacgaggttccagcatcgattgtctatgcaagtagatccctaattgaatctgtcggtccttttttcgaatcgtctgcacgtatacattaaagtctatgtccgtccgaaatataggaacacaactattcgataaacaaggttcatctaacgtgagtagttatggagaaaagaacctacaactcccagcataaaacaccgtccgactgtattctctctgtttctccttcagcccatccacaccccagaactcaaccgagaacctaaatggttcgtattttgtccatctcgcctcatcctctgcattatcctgatctccagtcccagtcgcatccgagtactttctcctagcatctacgatatccctgcccgtcctttgactagacccaattccaaaaaagtcttcctctctcatcggtgcgcctccggctataccatccttcttggctctagccgcgaaagaagcatccgtcatagacagtggaggccccatatctggtacggctcctgataacgtgaatgataaagctggaccttcgagcggtatgaacccaccatactcgcccaatctctgggtatcatcctgtggaaccggataatatgtgatgacttcttgagataataatggggttttaccaggaaacgatgttggactcgtgcttagtccgtaagagattgaagatccagacataggtgtcgacggctgacgttgagaacccatacttaatatggctgggaccctcaacccgaaacttgtatcaagaggatctacctgggccagcggggaatttcccttaaaaacaggtgaggaagtagtacctgatctcgagcgggtttctgatcggcttcgtctcctctgacgtctagtttccttctcaactagtcgagtaagctgacgtgcaatgttcttagtgatgagactgattcctaattcagcatctgcctgctcggttgagctagggttggatgtggatgcagttgcagttgcagtggtagaagcgacgggagacagagcgcctgcttgagccgaaggggaagaaaggattttagatttgagttcttgatgctcccaaagggacgtttggagaacagagagaggcgcataagggagttgagtgaagggacagatatcggaagagatatacgagagctcctcgaacgtctataagaagtaattgttcagaatgaagatgaagtcagttctcgcgctcataatcgatcgtctatatgactgggtgaattcgtgaaaagatggtgaacgcaaaaggacataccatatgcgtataatatataccctcgaaggtcttttcaaattcgacttcctcatcatcttcctcccaaccaacctcactcccctcgctatctctgtcttgctcttgatcatcactccttcttctatcgccactcttggccagcgctctttgggtctttctaagtgtgtacacctttttagccacatgataccgatctatctccgatggaacgaagaatgcgtccgatgcaatgactgctcgaacccaggaaggaggaagaccagaaatagaccacactggaggaaacggctggttcggcttgttaccagtagtgttcggtcctgtcgttgttgatattctcgggaagtccgtgtaatagactggaaatcttgtatgagaagacgtgtttggtgtgtgtttttttcctgtagagctccaggaagcatcccccaacgacattccctccaactgacgattgatttcaggactatgatcctcctctattcttgagtaccagatcttctcttcgacatccagaatgtcaactccccacctggttaaccaacaggcgcagccttctccgattttgctgctcgtcaacccataaaagtaggatggctcttcctcgctttcctcttcgtaatcatgcccatcgtacccatctccaatactatgagtatttcttctgaaaggatgtttaccttcaccaggatcctccctgagccctgatatttgagatgatgcaatggaggagctcatggaaagtgctggggaagcactacgcgaacgggtgcctgaagggctcggtcgcgaaccggaaggcttggagtcccttctttctacttctacacctgccgctcgttcctgcgctacagcaggattttcagcttgtttgcctctttcgtcgtcttcgaaggatggaatcggtcttcctaaatcttctagcccagtagctccaacaccaatgatcccatcttcctccgagtcttcccaatcttctccttgataaccccctatgccttttccgattgaaaacccaaggaagacattgacgctccaggggcttattgatcccagaatcaagcccaacaccccactcgaaattccagggacccctagaaaaattgaggtcgcaagcaaagagagaaggaatcgaggggtggcgatttgagagcctgaaggtggaggagaggaaggtgggacatagaatgggaacgagcgcgtcaacggatgagaaggtgtcggatgggtcgtaggcggcagatggagagagggtccggctgagtataaccgtgcgatgatgatcctgagcgtgagaacaagcagaaaggtgggacaaccacgacatcaatactataactttttctccaaggacgcccccaggtgacactggctctcttactcaaatgcggcccggctgatatttggatcatccaatctcaggttgatcttcatcctaccattcttcaaagttgaactatgcacatccggtgccgtttctaacagtataggtcttactagagcttctcttagtcgagaagacgcgtcttgctcttcgtcttgaccttcatagaaatcgcctgtgaataaagaatggaaaaacccctggaaaaataggtacaaccaccacatcgtgagcggcgttcataagaacaagagatatgtcagcttcgaaattcactctattgttgtgaatgtcgttcttgaatcattactcacagcctgagcgagtacgaccctgtgaagtctatacacctttccccatctgtcgaccctaacgttcacgtctgagcagagccccttgagaaacgcgtgtctcagatgattatgcaatatctgaggaccaagaaccgggtctaggatgatccctggatgagctggaacctgaggtggatctattgtagtagtatctgcagagttgaatgtggtcatctatgaacggggatgtcttctatgacgagaacgacgaggaggatgggtcgaacaagcgagaagtatgtgcttgaatgttccgctttcctttcgcccgggccccaggccgggaacccggctaaggccgaactctacgcttggctacaccttaccaatcaaaatagacaaatggtcttgagttccttcgtttgtcactctcgttctttgttccaacccattgacataacatgcaccacaaacatatcttgatatctcttgaagcctctcagagatatcaagacatagtgaaaagttactcatggatcataagaaaaagaacatacaacacttgatacataaccgaaacattagctaaggattcacctataagagagaaaaaggatactattaaatgagaacacactctccccttctccttgtcactctatcgatctgttgttcagactgcagacttttccgagatcgccggcccaagtggtttgatccctgttttctgcccatctatctggctcaaaggtggaaagagtcctctctctaggtccccaagctcatctcgtccggaactcgatgactcgatctttcgtcctcgatcttgtccttgtgctttttcggaaaagtcctcgccttgaacctcgtccgtatttccaaaagtagactcttcctcggtttgatcttgtttccaactgggttcgtcgctggacgtcgttgatgagacttgctcaattcctagggctgttcggagtctgttctctacggtgtctaccttctttgtgcgttgtcctcctttccatatgatgacggcagcgcctaacaagaacagaggtggcagatcgaaagaagagaccgttcggttagtaaaagagaaagaacagctgtctgttgtaagctcgaatgccgaaagggacaaaccaattccacagaggaaagaacaaggaattagacaaccctgatacatagtaaacgttccatcacatccggagaaaacgatattgttcatcagctgcacgaatgagagtactagagagggactttagatgatcttcccaaggaaaatcctgaggaacacgaaccgtggtccaggatggtcttgaatgagttgtgcccatatggagcaggatacgatccccactataagcgcttaggatccacatgcagcaacataacatgatttgaaacaacgagttccacacctttttatttgaagttttgatgcaagaaagaggataggagagaaatgggaaatgcgtcaagtgatgagttgggaagaagaagacggcaatcggatctggacaaaccatcagtattgtgttccatagagccaggcgcaccgagaatgcccagtgagtatctgtctcgtacggtcggtaccatgtctttgtaggatgagagaaagagaaggggaaaagagaatcaaaaccaggctctccttacaagaatttgacatcggtcttgtttcatttacctgggatcgagaaaatttcttctgatgatgatccagtgtcgctctctgcttctttgtaagaacctatagagagtttgataaagacccatgaagaacatctggctcgtcagttcaaatccgattctggaaacaaaaaacaaggttaaaatggatccaagcgcattggagtcaagtgcgtttggacaaagaacgagaagacgaaccgacataaagtacgaaggatcctgcgcgggatcagggaacagatccggatgatctaccaacacccacccaaataggagcccgtctcgcatttgtcagcaatccatcatatctgtctcctttgtgtcttatccggtaagaggtactcaccaggatggtagagacctcgtttctttagtttcttcattgccagattttttaatcgccagatcgtgagaatgcctaaaatctcaagagaatgcgggtcagctgtttgtgacgacccgtggagatacgattatgaaggaaggccacggacggtacgcatccaaacatctttggggaaacagccctacaccggtcacagtgaatgctccgttgatgatctgagatgatatctctatcagcgtatacatgtgaaagtcagagacggttagcacgtgaagttaatacctagacttgattaccaagggagaggacgagaggtacgtagagaaccatctcaagactgaccgacccaataatcattcttgtacttgttatgaaagttaatgaacctggccaaaaagaacactacatgcgatcgaccgagagcgacgaattaagttgggaaagaatgagaatcagactatcctccaaatgttctctataaagtaatgaaaagcttaccgagagcggctccccagaatctgaaagcatatgaaacccaagggtgagaacggaacggatttcgatgaagaaggatgaacatacacaacgaccagaccgtagagcgcgacaaagattcctaacggtgtcatcaagaaatgaccaagacctttgagaccacgctttatcttctgcttctttgttagacaatccgcaacgtgcctatccagcggatcatcatggtcgatcaccgcctcatactcgatcttattcccagctctactgacggtccgttttgctactgacatagcagagggtctggcgacgttggaaggccgagttctgttagccgggcgagattcggggtcggtacggggtagatctggaagggcaatgacaggttttgagacgaggtagcctgggagaacgataccggaggtgatattctgaaagtgagacataagagataccgttggatctgtttggatggagtatgaaaaggcctaaacatgttcagaagaagcactagagcaaaccgagaacaataaagagaactgaagatcgaggcggaacgtaccgacgatatctagatgatctactaccgcatcatgatgttcctcgccgagttctgcatgatgttcactctgctcgctcgtgctcatcctctgttcctcggacagaatctctcctgccactgatctgcgccgagagccactcctggatcgagcatctacctggttctctctcttcgtcgccgccgttgcctcttgcgctaccgccgattctctctgctgttcttcttcctcttcttcctcgttcaacatggtttgaactctgcctaccctattaagattcgactcatccaccggtactttgatcacaacttgggtgttccctccggaatgaatagacgaaacggacgatctccgagcgttcgtcgtaccgactgtaccttgccgtctgataggacttccagcacctacgcttccacgcctgcccaccgtgttggtaggacttcctccaggagcgaacgactgatagtcaaatattgactgaatcgtctttgatcgagctctcgtacggtacgccttctgttgaccttccgggccggacggttcaggtgaggacgtcaaccgggcgtcatccgtaggtctcgacgtgactgtgttgaaatggtccgaccgtatggagtcatcgatagggttggtcgtgcctaatgccgatgctggacttctgagtggacgggcggagagtgaaccggaccgaacacgttggtcaaacactacatgggcaggatgttctgtggacgattcgaccggcgggttgagaatagtcgcccttcgggccgtcggttgacgtccgtatgggatttgatcaccgacgtttgcaggaaacggattggactgacggcgtctatcggttcgaaccaatgattgaacggagaaatcgttaggaacagggaaaagagagtcatagatagcgaagagagagagaactggatagtgacccaactggacgcgacggcaagtgagtaggaggcttcggagtaaagaaacttacactctaactgcctgagacatgtccgcggcctacactatttgtacaagagaccgaagaagcaagagacgaaggagaagagaacaacggaagagatggaaggttgtccggatgtgtagaatggaatggatgttgcgcactaagataaccaaacgcgaacttcttggggttcttcaacggatgcatccgaaacatgcttacgcctagatgtccgatcacgtggtttagccggagagaggaactatcttgggacacgcatcaaacgcttgatgactgcttagtttcagcgcggacataattctatcagtgcgcgcttctgtctggatgaggacagatgatctgcagtccataaggcaagtcgagagagtatctcactcgatacttcagacccaatacccggaaaaaacaataggaaagaaggccaatcagacaatcacccactcagattttctggccatgtttccattgtttcttccgatatatcgctgctctgtatgtgtatgtctatgcgcgtgtgtatatgtgtgtttctaactccaatccacagaatccataatgatcgaaccatggctgaatcattctctcctggtcatttaggtctctctatttcacttgtatcatctttatgtccgtatagatgacaaaaacaaagcgactatttcccgcaaccctaaccaccgagggaatgcacagcagttgtaacacgtgcacgggtgtaagtcgtaaccctaacatattaccactggaatgtggattgcctttgaaacgaaagtcctgaacgctacgaagtttgggtccattcgatttactcctttgtttagtgcgagccgggatgcctaaggatacgacatcttccaagaagaaaaactctgcaggagccgggagtcgtccgagtacgggatcgggaaacggagagagcataccgaaggatagctcgagctcgttcgacatcgactctatctttgcgtccaaaccgaagccaagtcccgcggtgactgcacctgccactggctccgggtcgaaagaccaatccgcttcccagccgacggacgacaaggacaagaagaagaaaaagaaaaagacaaagacgataacggcagtagggacggacgaatcaaagacaattctcgatccaagtctcggtgtcggatccaagccggacggacagggtgggaaggagaaggagaaagggaaaggtaagggtgacggaggggataaggagttggaggctttcatggattccagaggtcaacgttcgtccctcttcctccttcttatgtgctagacctctgtgtgtgagctacgctcttggctatgcgaattacgagactgaactctcgaacctcctccacacaggatcgaccggtagaaagacagacgaaggatggtctatctataaggaagatcatctagggatcaaccccgaggctggtggttcgtcgtttttgtttttgtttcttcttattctttcagtgacaaaccgtgggtttactcacatcctgaaaatccttcctgtgcttcttattcggattgtcttctctcctcctctccggcgcggtttccctctttgaacattcttgctcctgtcgacatcatgggcttgttgaatgatgtgcggagagcagataccgaactctgtccgttcgactgtgaatgctgtatgtccctcctcttcttcgccatgcgttgtgcccatgagatcaaagacgcacactaggacttactccctttcccttcttgggtttcctctttcgttttcatcccttttcggatcaatctatcgataggttactgagcagacaccggtacctcggccttaaccttcaaagcaagcctaatctaaaataaaaaaggagcttcagagctcaaaacttgacctagggtcttaacttaaaaacacacgatctggtaaagaatgaaatgcacaataatatacccaccaaaaggagcgatgacacctactctatacaagtcggcgtttgacagatcagagtagaaaagcaaggacaaagaaagagggagatagagagaaggggatataaatcattataggacctcggtataaagagctgatgaggctgaaggagcgatataaagaggatgcgagggacaattggattgaagaagcgtatggggcatacacacaatgcggaagaagaaccaaggggcaaaggggtggatagcatggttgcttgggcgtaggaagcgaaggaagatgaagggacataactatgggatgataggcgtaacgggtgttttgcttaagaaagagaggaaaaaaagacaatgagaagaatagaaagataaataggaagggcccgaaatacaatacgaaaaagagagaaagcacgactggttgattacatacacgaggacaacgttctcgagcttctaagggtagaggacacgaagagaaggcaaaaaggcaaaaaggaaagaagaagaagaagaagaaaaaagacagaagctatggattgatagatgtacgcaaagagacacttaatttcctcctttctcaaacagacgtttctcgaacacgttccgtctcgaaggaccaagctctgcttgtgctcgcacttctatttctgtaggaaacgccaagctcaagatcctgctctttttgcgggttgaccgaccggggatcgacggtgacgaatgagtcgacccagtcaaagtcgtcgagggcgtggaggtctatatcccaagtgtctgccagaccagacccaatcttgacgacgagccaaaatctatcgtagcgcgatgtgtgtgtgggcgggagggagaaagaggagataggaagacagatcaggcgcgcggagagagcaattcagattgatcaagcaagaaggaaggaaagtgatcagatgattgcaaagatactagaggcacagaaagcacaaggtgatagacctacccgtagtaagcaaagccaagacaggcgagaccgaccatgacccagaagcaatgcttgtaggcatcactccagaagccaaagatccagagaccgagatagtagtacaccgtacctgccgcccagagtgcgatggagccgaggatgaagaacgtgagacagggaatgaggatgtgaaatgcggtgtggacgagtttgagtgagagcggtaaccggggggcaaagtgggaagacggagagcggtacgaccaatgtcggcggtgatgatgatggtggtgatggtgatgataggaccgaacagacgacaagtgcgacggagagagggcagaaagagagacgttctcttttggaagaatgtcgccgtgaaggagaggattcgagagcgcgtacgtcaattgactgctaagcagtggttccagggaaagagacggcggatgagacggcggctggggtggtggtgatgagggcgaggagagcccagaagatgagagtgagggaacctccgagacgacgcagactggcgggcaaggcgagagagtatcttgatcttggtcttcgagagacgttctcgagtcgagcgaggaacgtgccgagtaagtggtaaccgaatctgttccacttcgactatcatcatcatcatcatcatcgtccagagtagaggaaggagcgtttgttgggaaggagtcgaggccaaacaggcgttgactttgccagagtgaggttgaaccattcgggccatattgtgccggatgaagtctgtcccccagcggattcattcgatgggtggaagaactgggcctgtccgcaggcgattctacggcgaacgcacctaacgggcaatctggcgaccaaggaggcgttattggctcttgggtctgactggaagtctttgtggagctgtgttgatggtgttggctggatggttgccagccaaggaagttggacgagctgccaagagagtgggtagagttcgtcgactgggagctacctctacggatgtctggcggtgccaacggtgaggtcgacctcggaggcgtcggcaggtcgtaggaggaaccggccgaggaactgccggaggaagaggtgtgtgatgaggacgagctgtccgaggagaaagatgaatgccgcatgtagaatgttatgttgcgccgaaagcgattggctggctggctggcaaaagaagggcgatgatgggaaaagcacgagggagagagaaaaaaaaatcacaaaagaaggttgaccctgaaggcgaataatacctgtcagtgagagtggattcttaacaggaaagaaaagacaaccgtgatggaagcctgaagagaatgaaggatggagagatgtatgctgatgggatgtaacagaacgaggacaaagagtctgagcctctgtttgtggaaccgagatagagggatgatgatctgtgtgaccgacccaagagaccgatgaaaaacccttggcaggcgagagtggagtacaagtaggagaatggatagacattatagagttcaaaagtaatataacttaagtactgaccgaaaggaagcgatgtaaggatgatccttgggacactgaccgaggacacacggacacggcctcactctcactaacgctgatactgccactaccactcacagacccaactgtaggtagaatgagctcgaaggaacgagggatgaggaaggattcaggccaatggtaagtcctactagcagaagcgtctaataatagtagtgttggcaacaataataaagccatgtgaagaaaaggaaaagattatgggcaaggcgaataagcagtgtacgataggagccttcgtagtgggcctcgagtcgcgtcgtagtcggttaatatcgatgcgctcatcagtttactgcggaaagtatggatgtacactgcggaaagtgcatccggattcttggttcctgccgcgggcacagagtatcaacatcaggaaaaggggcaggtgcatcgatgacgaaggatgttctgaacagagtcgggtttcatcaaatctcgccctgccctgctcattctcgcagctccggaaacgccgagctgccggtgtcatgccgatccgcagcggacctgatgctgtaaccggtctgtaaccagatcggtctagatagttaaaccgtccgccactatgtttgctgcgcactgacgatcctgataaacaagatccgccaaacaagcttgaggtttattcttgtctctcctttcagcgccgccgtgggccgccagccatgtgtttctctttggttcctctgggttctctctccgcgtgttccctccggattctgttctctagtatcattcacccactcgtccagctcactcgctcacttgctcacatactttatctcttctcttgtcttttttcggacatgtttatctccttcttgtactctgatctactctgatctgatctgatttgaactttgatcgatcatgttgactgacctattcgcctaatagcctctggacatcttattactttgtgtgcaggtgtgagactgatgtctgggcgttgctctcctcgtgctaactttactcgctctactcaccctcgtcgtttgcccacgttgtcttaccgggttcatctttgttcttcttttgccttcctcggtcgtcagacagacagacagacagacagacagacagacacagacacagacacagacacagacacacacaagacaaaatgttttatatcttttttccttctttgccttcattccattccttacatcgtctccatccccttccctctattctctcattcctttcctccatctcttaatccttcccttcccttctcccttctgctcttcagcatccactctcttaattctgctcttcagcgttcttcctttcccttcgcccttgtacccccggtccgttcgttcttgaccatttaccttctaaatcagccctcttctctcacccatccacccacccacctccagtcctaccttcacctttaatccccttcctcctccctcatggccccaccggcaagttccaaatggggaagctacatcgtcggccaaaactcggctcacgtcgctgtagcacccacagcacccactaacccacccgccagcaaactctcgttcggcaggcataagaagggtgactcaaaatcaaagcctgacgtatctcatccaaaggtagagccagagaaggccttggaagcttcagatacctcaatcactccggtcattcctgccgcccaggtcatccagatcaccccggtcgccccggtcaccccaacccagttgacactcgaggagagaaaacaggccaggacggaacaacaccgtcaaaagattaaggagcgaatggaagcagaggccgcagaagaagccagaagggccgaagatcagagacgaaagatcgaagagatcaacgagagagagtaccttgaggacctcgcctggcaggaagaacaggaagaactcaagctaagaatggaagaacgcatcagagcgggttaccactcgaacggtctctcctcagaagctagttctgatcacgccctcttcatctctcccgggtcacatcaaccccaggagcaatctcagcctcagcctgtaccgcccacggtgttggtcaccagtccgccccacgagagctcgtcccccgtcaccaatgtctcttcgaccccgaagacagtcgctcgggctgatcggtccgagattgcgtcccccacgaactcggtcttggcctcgaccatctcttattcagactcaccttccactgtcgtcgatgccgccatcgttgctacgcctg

SEQ ID NO: 1805 - DNA, 2521 bp, Xanthophyllomyces dendrorhous
ccgtcctcgcccctgtcattacatctgccccctcttacacacctcaaggtctgttcagcaaactgaagtcaaagccaaagccgctcgtccagaattcaaccgagacatcgaccgtcgcggctcacctcagaccgacgacatcccggttaccctacgccatcgttcctattgcgacaccccgagttgcacccgtccctaccggggtcatcggtttcgaggaggaagaacaggacgaggatggattctcaagccaagatcgaagacatcatcaacccgggaactactatcttgggactccttctttgagatcgcctgcgtcatcgccagagccagacctcgtccggcaccagagaaactcggcatcccctctgcctgtcgtgtttgccagtagcgatgagaaggccgatagaacgctcggtcatcagaaatcgatctcctccgtcaagacgatgaacgacagtctccagaaacatggattggagaaatccgccgtacctactttggctttcgcctcttctccctcctcctcggccgatgtcgagaaaggaggaaggatcagacagatcgataccggttatccctccgagccagaagaactgacgatagagagatcgttggctcatctgttgatcgttctgccctacgcaatgttgggattcctcgtcaggtatggtctgacggaattaggaacgtacgctgggtcctccgtcgcttccctcgtctggtcgcagggagtgtcttgtgtgatctttggtctggttatgggtaaacgaagagatctcgtcgcgttgtatgcatgctctctttacattttatgtatcatcttgtctcagcctcctctcctaatcaaacactcatttcattcatacctacaggtacccccctctttggacgggtgtatgcgtcgggttcgcaggttccgtcaacagtttcgccggctggttgcttcaggccttccttagctttgcaaacttcgatggctatgctcgaaactcctggcagtctgtatgtcctctttcctttcctttcctccgcgcctggtccttggggatgtcaatcgactgacaagctcgtccttaatttaacctccaggccatggatggaattggacagatcctgctcaccctactcgtcgcctctgctgcgctttccctcggacttcacctagccaatatcatccctgccatccctgtcggctcactctccaaaccgactcgaaccccatggacggacagattgacggcattgatctctctcggcctgtacgccgttgccgttgtcggttacttcctcttcggatcggtctactggagaagacagttgattctccccttggtgtttgctcctgccggtgccgtactgagatacgtactcggattcctcaacccccgggatcgacggtctcccaaacaggcgactacacgcaagggtctcagtccaatgcgggtggacaggtcgatgaccgttccggtagggacgttcctagcaaacatgttcggaaccgtcggccttgcagtttgttttgccatgagccaattggacaaaatcactccctttgctccttttacttgcgctgttcgtcatgttttcttctctcgctcttgtcctctctgaaaacagactaatccgatagatatcttcactctccccatacacaatacaggccgtccttgccatcggtacaggtctcgctggtagtatgacctccctccccggcttgatctttgagatcaaatacggtttccgatcaacgatcgccaggtggatatatctattcagcagtgtcatcgtcgggatgggaatcgtcgtcggggtcgttggcggtatctggtggaagggcccagggttcgatggggtttgtcgatttgtctagattcggtattttcttctctgcgccctttgcggcgtgtcctcctctctttgtccatctctcggggttctcgtctttctttcgttcattcttcctatacatccacacattagtgtacacttatcacattaatcttgctcatctcgctgccttgaatcttgcgcgtggcctctgatttagtcagttctatcgttcagttcgttgtttgccgattttcacttattcttttcttcccgcgagaccactcgcgtctattagatgaatgatccttcctcaccttgtaagagccgagagacaacagtaggactagcgttgggacgtttgagcttttgacgagcggaggaacgcacatgtccggggacagagccatggccaatcaaatcctcccaaaagaagaagaaaaaaagaaaaaggggattccaaggaaagaaacgttctgtgaaattctcagggacccaacccagctcaacagacgcccgatcgttcgtttctttgcccggttcgcgttctggcgatcacagagaggattttcgtcttggacacccatgagattagcttacaacagatctgattcaacgacaagaccttgggcgcaggggattatgtacacaacacaagctgacacaacaaagaaaacacacacacacacac

SEQ ID NO: 1806 - DNA, 6284 bp, Xanthophyllomyces dendrorhous
  misc_feature (748)..(757): n is a, c, g, or t
atataattaccatgccctttcttctcatcagcacttttcttcttctatatcccccacgacctctactcttttcttttccctggaataccggtcttcttggctactttatttaatccaactttctctgtcttgtttagctcttcttctctgcctgatgcatattcactcctctcttcaatcttttccttctcatcttgttttactccatcccggactcttcctcatactcttttagttccatcttggaaacatcatcaagtgtttgatgatatcagtagcactgccaccaaaaacgattatgactaggattgaatactgaatccatgctatactcctagtctttctctcttcttttcccttcttttgttttctctattcttctcggtcatactttcgtcttttcttttccattctcttcgctcttgtcgtatcgtgcccctttattgtcttttcctttttgccttccttatgtcgtccattcttagcttgatttctggcttcagcttttttgcaccttcggaatccattccctgcgctcttcgagtctcgaggatcggaattcgacgttcattccatcttcgactttatctagtctattctaatgtagtctgctctcatctctcatctctcatcccgtttcttttcttttcttttcttcttgtcttttattgttttctctcttctttctctcctcggtctgactatcagtcttagaacacggaatcgaaaacacacacacacacacacnnnnnnnnnncatacacaccacaagaggcaggcacaacagagagaaagcccagaagaggaaagagaagaagaataaaacggaaaaagaaggagaagaagaggagagaagagttcgggaccccgtttaatgtttgatggccgtgttatagtttttgtcctgtgtgtccccatgattcagatggaagagtccgcccgacaacccagtcaaagagtgaaaaaaaataaaacacatttgaataatcttgtcccttttctagttgtacttcctggaacagacagttgcctccccatcccatctaattctattacgccttgtagcgttttttgttttgtttctttggttccaattccttctctataattttcgtggatgtggatgtgggggtatatgtatgcagagagaatagaaagagaaagtaaaaaaagatcaagctctgtaaagaggacctacccgacctcgaagtctagtgatctctgtcgctccgttgaccctgggaatctctggcacccaacctttggagacttcctcatccttcatgactctgacgagctcgataaagtcctcgacagcctgggggtcgagttggtagtggcataccaatcgggcaccattgaatgcgatcgggttcggcagagcagcagctcgggcgatgacggcgttcatcgggaggttcaaaggaaggaagttgacaaagacctatgaaaacacgcgtcagaaaaagacatgatctgaagaaacagcagaagaaaaagaaaagagtagcgaagcgaagagacataccatgcaagtctctgcctcgtacaagatctgaacacccaactctttgagtccagcagagagtcgcttggcgagcttgtgactatccctcaatcgctcaaagttgtgggtgagcgcgaaatcggcggcagcggcgatagcaccactctgcctgattcctccaccgaagagctttcggaagtgaatagccttcttgatgagtgcggccggtccgacgaggacgctatgaatcagaagaaagagcaacatgcgattagggtcggtttgagatatatatatgagaacacaatacgtagaggaggcttacgatccgataggcgcgcccaatcccttggacaaacagaccgaaaccgagtcgaacggatcacagagttccttcattctgttaaatcccgaggcatgaagaacaaaaaacatgatcagacgagcacgagaaatttcctcacacgtgtgcgcaaagaatgcaaacttacacctcgggaagagtctccattgtagcacccttttcagcggcgacgttccaaagtctaattgaggatgaacatcaaaaatgatggaaaaaattaagccctcgatcatgatattaagcttgagagtcatgatccgacgaaccgagctccatcacagtgcatgatctgtatgcaataacaagggcttagtataacagacgcgtcgaaagaagtacaatcatgatgggtacgtacaagaccctcttccttagccttcttagaaattttgacgatctcgtccttaaaaaaaagttacaacaacgattgtttgagcatacgtggaccgacggcaccaacgcggatgagatagaggagataaatcggatcttacttgggggaagatggtaccgttcaaagtgttctgccattgccagtcaaagagcaaaagaagagtctcagttgtagaaagttaacagagaaaagtaaaggcgatttggaaccgacctccaagcagataatcttggtcgaggcgcagtgaatgttatctcccaagatcaagtcatcagcgatatcatcatcccacgtaaggtgatggccattccagggcttcaacggaagtgggctagcctgggagtggaaagcgaggccaccggctagataagagatattgagagaagaagagacacggcgttatcaatacctcaagaaatgattgcgcccattatcaatgaccctctccacataccctcgtactggaagacatgtgatcggaagtccaatctgtgaataagaagatcaggaacggggatgaccgatgagcgccgcatatctcttgagtcacatgcagttatcaagacagataaattaacagcgacacgtacagaacagagtggggaggctgggtcaaccaagccctaagaccgagttctagaaataacaagtataaaaatgaaggataagcatggccaattgtattgggaacaagacaaaagctgactcacggttgctcatagtgccgctaacgacgaaaagaccagcttccttgccgcaaagcttagcgactcgagcctctagggcggcagtagtggcacactcgttgtagactatgggacgcgatgaacgttgaatttagggcgcgatgcttgagttacatgtagtaaacagtgaagctcttaccatcgtcacctcgagtcgcctgcataccaactgataaggagaagcatcagagacaagatgtcaccatcgattcggagttgagcgactatagaagactcatccgataacgtgaatggtatcaaaaggactcaccttgaagcatggcatcgctattgatgtacagcggagaccggaaacgaatcaagaaaggaaaggaaaaaattggttataaaaataaatcaatatcaaatacgacaagaaacctgatgacccatccgacggaatgcttgccggaacggaactctgagcgcaccttggaatagtaatcgtgtcggctggaaagtggaacggaaacagatgagagagcggaagaagagaaaagaatcaataccgttttcaaatacaaaggaagaacagaatctcaagaagaagttctaagaaaacagagacaagaaggaagactaactcctaaaatcgcgctgaacggctttgagcttctcgacgtttgcctgacctcccacattggcggtgatagcgtaaggatccataatcatgttgaagatatctgcgctacgggagaagggtcttgatgagaagactgagctggcaagagcactagagcgactcgatcgaagcagagaagagaatttggtggtggtggtaaaagagtgaatcatgactctccgaatccccaagctgatgttctttcttgcaaaaaagagagaaattagttggaggagtcagccgtaggacaaattcgatttgaggctgatgtcaacctgagacaattgtgcctgggctcttaactgcgcctttgtgccttgatctaatgatgattatgtctctttgaggtgcaccgaggaaaacgcatgtatcccatccttaacaagccattcatcgattcttgccagtactaaacagaatatcatgagattcctacacccttgacgattaatcagagcgagagagaggacgtccttggtgcaaagatccgtccagagatcgggattgaacagtcaagtacaataaagatgaacatgcagtcagagtctggtcactacaatcggctatgtacaaacacaggtacagcagaacgcaacatatcgcatcgtaacacagagacacaagtcatgtcggtatcagagtgaacaagtgatctgtaggagatgaatcacagatcacctgttgttttaagaataccctgacagtatccgcaccgggatagaccgcatggccactgtttctgcactcgatccaacatcaccgtgcttcccgataggaaaggatacatgacagaccgaaccagaaagaccagccgaagtaatgggtgcgtggagaaattttctccttttgggatgcgatgccagatggaaacacaagacgtaagttgggaatacataccggtggggtgagctgggatgttgtgaatgctcaatatgtcgaataccatcatggttagttttcggatgatcagaacaacatacacaattagttgaagaacacagagatcaaagcagtaagaatattagtgtatcgactgaatcgatgagaaatacacatgtatgtatcctcggcatggatgtgttgtgtgtatgcaggtatacgcgtagatggttaggcggacacatacacaatgcatctctacatagagacggttgctatgagtcgatttgttggttagtaactttggtggcctgtacccaacagaatcgcggcccaagcgcaaaagttcccaaagtccagtagccgtgctgaaacctctcgtctcaataccacccttcctcaagcatctcaaggttcgtctatttttcttcatgtgctcgttcataccatgtttgaaaccagacagacgtatagcatacacatacatacatacagacatgtcgttttgatggatgactgacttgagggaactttgaatatacgacttttgttttgtgcacgcaaaaaaaatctttgccaattcttcggactctgaacttttggtcgccgccttctcgcctctcgaatcgcaaatttacttttcctccgaactacgttcatccatcgacgttgatcattcacagaaatgggtttcggaaagaacaacggtgagattctacgtttttgttgagctgtgttttgacgccgtggttcgtacatagacgggaaactgattttgtttcttttttttctcttctcttatcgcttagtgctccacgctaaccacttccgaaaggattggcaggttcgcatcagcattttattgtatgccgaaggggaagtcttgaaagtatttgagctggaaaactgatcagacaatgcatcccttgtatttatcttcgtcaaaattatcgacttctgccctcctgaaccccaaaaatttcccttgacaattcctgtccctccctacaaaactatcaattcaacatcttgtgttttcatgaatcttccatccaacgcaccttatccctcctctatttcccaccctctcaaattctaaacaatccagagccgagtgaagacctggtttgaccagcctggacgaaagacccgccgaagacaggctcgatccaccaaggctaccgctttgggagctcgacccgtcaagtccctccgacctgccgtccgatgccccaccgttcgatacaacaccaaggtccgagagggcaagggtttcaccctccaggagttgaagctcgccggtgtcggtaagaaggaggcccgaggactcggtatctccgtcgaccaccgacgacgaggtggagccgtcgttggccaggaggctaacgtcgagcgacttaaggcttaccgagcccggttagtttgcttcccggtctttcaacctcagtcctttgttgtctggagagtgttttttgagtggcttagaaagctggaggtggaagagaagacttttagtgacagctggaaaagaagatactggggctatttactggcataatgaagggagaacggatcaacaggcttgagggaaggggtggccagacaacacaaggacccatccaggacgacatgaaattacaggcaaacttgactaaaccaatctcctttcttatgtttcgttcataacagactcatcgtcttcccccgaaaggctggaaagcccaagtctggagactctgccgaggccgatctttctgccgagactacccgag

SEQ ID NO: 1807 - DNA, 10012 bp, Xanthophyllomyces dendrorhous
acccgagcccccatccctctccccaccctttacgaggctgagaagccccgagctatcaccgctgaggagaaggagttcaacgctttccgagctctccgagacgcccgagccactggccgaaacgccggtaaggtcaaggcccgagccgagaagaaggctgctgaggaggctgccgccaagaagtaaacggggttctctctctctcgttttagttctaggaggttttctatcatgcacgttccaacatcttgatatgttttccttgaaacaaagacacccctctgttctacttgcaggatcgggccttttgtttcccgacccactgagttctccaaatgaagaccagtcacaagcacatacttcgaaatctaacctcagtcgaaagcaacagaaaagcagttatgacaggtgacatcagatacgcggtttttcttgtcggaagtctgctcatcatacacacttagcagccttaggcttggtgagagtaacctcaactgacgatggctggcatatgtcccttttggacttgactgtcctcagaccacaaaccactacgtggtcaggcatgtgacctacgacgtacagattccttaccacgactcctactcgttttgcgatgcattaaccttcaattatataatcgtagaacggatttagtcctggcgcattctatgatctcttcttttatgtaattcttttgcgcagtatatcttcttggaggaatcgcctgtgtgcagtatctctgtaatctagggatcagatataagatgggcttcgtttgccatctttagcgtagtctctcaagcccgggttctttgttaatccccagttatccttgtccccagtccatgcgcttgtatggtcacattgaagatccataatcctaatcccgattgcaagccaaagtacatcctccctatcaccctccttcgatcggtccaaaggaagaagcgaaagaactatattttcgagtttccgccggcaagatgaccacggttcatccgagacaacagcgcatgtttgatgtcatctgtcatggctgccttttgtccaagattatgatcgtacaccacacactcactgtcgtttcagaaggaaaaaagatgtttgcgcgtacacatagaacgtcaggtacctgtctgcttaatgagatgaccacatagggaaagaagtagagaacaaaagaaggggatgaacgaacgtctcgcaggtggcgaccaatttttccgttttcaaactccatgctgcgatctcgatatggaagctcgacggcatagagaccgatttcggtcgagcgaggacgatgagagagtctgggtgtgtgatcggggcctgaagttgatgtcatccgagtagagaaagaagcgcacagggaagagagaagacgaagttggctcgtgatgaatatcaaaatcatgatcagaggagtatcaagaggaggcaacagaagagaacggaccttgtacacgatattgtgagatttgatgacgaaaccagtattctgaccttccaataaatctgtcaccttcgaggccggtatgtgtgaagaaagactttgtataaagcctagccgagcggtttcaaagtacctcaagtaatggacctgttgacgtccgggcaagcagaccatgatacacgaaacaggcgtatattgtgtaagcaagtggtcccaaagcttggtagggcgacacatacacacgtacattattcagatgtctggaatagatgattttgggaagacaacgatctcacaaaccgtcagcgatgatgacgacgacgacaacaactacaaggtctctcgatcacatacctaaacttgtcgacatgaccccatgcgatcggaagctcaaacgcggctcgctcgacatcccagccttctctgaccgctctctccaggatagtctttctgttctccatccacgtctctgagtacgtcgtatccggccatccagtcagaggccggtcgtacttgatcagtggtggttcggaggaaacgatgttggctgtaggcggtatatgagccaaagaggtagaggcggaagcattcgtcggcagaggaatcgtataatttggggtaatgtctccttcatcagctgggccacaagtccctggaggaaggtacataggagagtgcgggttcttgaattgctctaacagatccttagttttttaatatcatgacgatcaaggagggttccaaagcaataggagattggtagaatgagcgaccgatatagagaccatcaaccagctgaaggaaacccatcgagatactgaccataacggaaggctctgaagacggcatccttcttgctgctactgtttgtttgatggcagaacggctggcgataaacagtctatgtatgcttggtgagatgtgcatccagatcagtagagaggaatggataactggagagaaaggtgcatagccgaggtgtgagtagtgccaggcttacggtctgcaggcatggttacgaaattcatctatctactcctactcgaatctggacccttaggtaactcgctttttggcctcgactagacaactctagcactttctttctttcgctttctcgcactccttccatcaaaccctcttctcctctataccattagcatcatgcaaggccagggtagacttccgtacatggtaagcttgtcgtttgtttggtcgtgtgaggagtgaatgtgtcttgtttggaggtcatttgaaagttgaccggttgattataaattcgatggatctctcttctatctagcaacccactgtggttctcctccgaggtttgttcttctcttcttttcttcttcgtcatctttcatgtctttattaaccgtctcaagaaactgctctgacgcttggtatcgcctcttctcatgatatgaattgtcggcgtctgcttccatcgaaacagagggtaccgattcctcccagggtgttcctcagcttctctccaacatctctgcttgtttatcagtagccagcgtggtctcaaccacgcttggtcctcgaggaatggacaagcttattgtcgacgccagtgtatgtactccttctttttaaggtctcctcccgttagtagctctacgactgatcaaagtagccgttcctgacaacgaaacacgatcctcgattatcttccttttgtctccggggtttttcttattcggctgacagggaaacgcaactatctcaaatgacggagccaccattctcaagcttcttgacatcgttcaccccgccgccaagaccctcgtcgatatcgctcgagctcaggacgccgaggttggagatggaacaacctctgttgttctgcttgctggagagatcttgaaagagatccgaccctttgtcgaggatggtgttggtgtgtggatcatccagaagggtttgagaacaggttgccagttggtaagcatacatcctacttgttctttttcttagatttggtcgagaccttttgcattacgctgtgttaaagaatactgagctaaccatttattgttctgatttcataggcccttgacaagatcaaggagatcgctgtacccatcgacaagtccaaccccgagttcgtatatttctcatccctctttattcactgctgaacccctgaatttcacgagtaccgagctaaaacctcaaatgaaacaactttaaaggcaattccgaaaacatcttcaccttctcgcctctacctccatgtcttccaaactcattcactctcagaaacctttcttttcgaaaatggtggtcgacgctgtgctctgcttggatcaggatgatcttgatgaaaacttgattggtgtgaaaaaagtggccggaggtggaatgcaggtaggtcgttaaccatggtgctgcttgtccctccaggatgaattgactaatatctaggttgtgtcgtgatggatctattgcattattcaggattccttgttggtccagggtgttgctttcaagaagacgttctcctacgccggtttcgagcagcagcctaagagcttcaaggaccccaaggttctttgcttgaacgtcgaattggagttgaaggccgagaaggataacgctgaggtccgagtcaaccaagtttcggtacgtcgactctctcttgaatacttgtgcgatctagtttggtgtaccaataacaaataactgatcactcgaattccatcccgggttatcaacaggaataccaagccatcgtcgatgccgagtggacgatcatctacaacaagctcgaggctatcgtggccactggagcaaaggtcgttctctccaagcttcctattggtgatcttgccactcagtactttgccgaccgagatatcttctgcgctggtcgagtcagcccggatgaccttcgccgagtggtccaggctgtcggtggatccgtccagtcgacatgctctgatattgatgacaagcaccttggttcgtgtggaaagttcgaagagaagcagatcggaggcgagcgattcaacatctttgaggattgcccgcaggcaaagacgtgcacacttgtgttgaggggtggagccgatcaattcattgccgaagtcgagagaagtttgcatgattcgattatgatcgtcaagcgggctatcaaaaactcacatgtcgtggccggtggaggagctaccgaggttagtcttcacattttacctttgttgacgggtcgatctgtttgaactgagagccatcgttcttttccttctcttctcttcctctcccccgcaaatccttgacacagatggagatctctgcctacctccgaaaccactcccgaactattcagggcaagcagcagctcatcatcggtgcgctcgccaaggctctcgaaatcatccctcgacaaatctgtgacaatgccgggtttgacgcaaccgacgtgttgaacaagcttcgaatgagccacgccaagggagacatttgggctggtgtggatatcgacagcgagggtgtgaaggacaacatggagaaggttcgtttgtttccttttttgagaacgaatagagtcaatacaaaaaatcaactagctaaccatagaggtcactggcgtcctgatagtttgtttgggagcccagtttggtcaagacgaatgcgctcagctcggcggtcgaggctgcctgcctgattcttagtattgacgagactgtccgaaaccctcagagcgagcaggtacgtgcatctattctgtcttctgtcgatatcgttgtcaaatcattagacttatatcattacttcttcaattctactttcgacttaatcagccccaggctggacctcctatgcctcggggtgcacagggtgcgatccgaggacgaggacgaggaatgcccagacgttaagacacgtggtgagaacgatgaaaggaaaagaaagaacgaaagtgaaagagaaaagacacgatgtaacggttcgcttcgtcgaacaggggctccctttgtgttataacatagaatatggttatcttcttggccttctttcctgtctttgaaatctctccgttgtacatgaactcgactgtgtaagagacgaacaagcaaggccaacggtgataatgtgtagcacaaacgcgcagcacaaacgagatctaatcagtgtccaaagcacactctttcccatcgtcccactgataatcatcaaccaacagaagatatagaaggatctctcagctacttcctcttctctccagcctgttcctctccggtttgagactgggatcgacctctgcccgtcaaaatctggacttggtggttgggaaggtgatacttagtcttcgaaccctctaccattgcggtcgtcatctctgattagaaaggaaggtaaaaaaaagagtaggacaaatgtctttcttgccctcgttcgcgtcctctctgacctcatcactgaaggtcgcccaggaggatagcccacctcccaagctacttgtcactgtgacgcctcttcggccgtctgtgtttgcgggtgaactctttcaggcgaaaatctcgctctcgtgcgttccgtttacttcagcatctgctgttggtacggctacgccgaccgggtcaacaggtatagctacagcttcatcttcagcagtccatcttccgcaacccaactcgccttatatacctccgtctcctgccattcctccgtataccccaaagaaaccggtccatcgggcggtccaaagtttgagtacaccggcgaatagatccttccgggaacaagtcccccctcgaacgggagattcgccttacgcacacctccaatctgaagtattttccctcgaaaagtacagctcggatgacctcccacctaggcgtggactagttggtcggagaagaaagtcaacagatgcaacttccaaacagttgaaggtcttgccatcatcgtcatcatcatcgttgccgtcagaaattcaaccgaaaggtcattgcaggcgatcgtcgtctgggtcggagcttgccggtttggtcaaggagttagctctcgagaagcagccagatacagacgaaccttccacgaccgcttactcggcagaggatccgatccagataggagagagtccgaaaacagaagataagaaggggaaggggaggacgaacagactacaattcggaagatctcagtcagtttcaacaattcctgcgatggcctcattagtttctactgctgaggagtcgtcaaccattcaacgttagtctctctataccctcctttctttctctatctgcttgctccttaagtttgatatcggataattttaacgaactatctcctttcgttggttgtgcggtctgcgctctcggttttagcatcaccgttacaaacacctccacggaccaacactctccgaccgacgtacacatccccctccactcgaaatatttctgcctttccaccttcccatcctcatgctcgaaagccatcacacattcctgcctcactgtttcaatcacctctatcaacaaccaagcccggaggaggatcaagatcagtttctagcgcgtcgacttcatcaaatctgtctatgccttccattcttgaaaccgaaccatctcatcaatctgagatcgaatctgaagactatacaatcaatccgatggatgaaatgaaaggaaaaggtcttgctctagatctctcgacatcgacaggatcgctagactcgcccatccaagaggaatcatcatccgtctcaaattcaacggctgcaacagatgaggacgatgccttttcttctcctttacgtccgccgacctcgactcgtccatctggagcgggtcatcgatcccgaccgtcatattcatccaatttaggacttggcgttccttctcctcagactcctcgagcaagttctcttaccagacctcccgagagcgcacttccacctctatcaccatcatcgtcgccatcaccatcgttgccaccgtcgccgtcctctacaaacggattaaaaatcacctggtcgtacgtccatctagtcgccaacctaacgccttccccacagtatcttccagcagaatctcttctcccgctgcgacatgccttattagaaacttcctctgttggatctgggatgttacctaccccggattcaccaaagcctggcgaatctagtttcacaggctctctctcgctgatgagtccagggtcgttaaaccccgcttcgtggttctcacttccgccaccggcccttcacgccaagccgcccagtttaacaagctcgttgtttgggatcgcgagaggcgtatggacaggtgtaggcgttcaagcgacagggtctatggaggctgaaaggaggaaacaatgggagaggacggtgagggaggttccggtattggagacgctaaaaagcgtgctgggggtcggattagagttgaaacctacagtggaacagacagaatcaggtctgatctcttcagattgtgagtgatttattcttttcttgcttcgactatcttagcgctctgtaggcaacaaaagacttacaaacacggctgacctgtgggatttatctcgacacgtattcctttgctgttaatgacatgatatagatatgtattctctccctattccagcaacattaccgcccagttttagagggcgagcgctcaagatctcgtactcccttgtcatcgggatcgagatcgaatactcacttcctgcccttcgaccaggttttgacaatccaaacgcgttccgtcggaagaaaacgctgagtcaggttatcaaagtccctcttcgagtctggggaggggttgatagtctggccaggaaagacggatacgacctgatgaaaccggtgatacagaggaaagaagaggcgtctctccaaaagttagagccaacactagtcgggaaaggaaatcggacgagctcaaagaagaggaaagaacgcaaagaggaagcagattttaatcgtgagttcttatcgtttgagacgttcctctctctgcgccgttcctaagattccacatggtgtaacgtatactcatcgtacataaaaaaacatagccgctccttcgaccgagtcttctttccggtcctatgtcgcccatctgctctccactattcctctgcaagagccagaactccctcccctccctccagatgcaccccctccaaacccacagcttggccctgatgcaatgacccctaaacacaagcacacccgaagtcaggcactcagccctacgactcattcaatcatgctgcctaaacttcagataaacggagaaacctcgacggaggttgattcggtggacaacgaaccgggcgcgaacaggaagaaatctagagccttgttggagactagtagatcggacgaagatgagatacagtgcgaggagatcttggaggggctgttgagaagtagtcggaaaggttagttgaccggattttctctcttccttcggatcctccgtcaccatgagcctgatgtcgtttgtcctctctctgctttgggcgatgccttggcttagcttcatatgatattgaaaaggatgggcagatcgtcgctgtatttactctcgtcaaatccgctttcagattaggcgagactgtccaaggtgttgtggaatttaacgaacccaatgcaacccgaaaagttctcaaggttggtttcccttccctttatgttcaatataaagactcccaaggggagctaggtctgttatactcgatgctaatctcgcccgacattgatgattgtcctctcagttttccgcgcaactgcaagcacatgagatcatcccctcctccctccatccaccccactcgtcttccctccaatcactcatccgaacacacgccgatttccacaactcgctcacgatacatacatctcgacttccgttctcgcttgatatcccctctccgggaacagcaggcggcagctcggtctcaccttctttcgtccttcgcgccgagcctgaatcagccgagactcctcgacggttctcatcttcccgtagtagcagtcataccgggatcaacaatggcgccaccagcggtggtacgaaccgaaccggtcaaaccccacgttcccatcctggaggactcgaatggaagatcaaactgtcattcctagtctcggtaccgatgaaagctcgtcagggacaggatccgtcgactatctctctgccctcacacctgttaccgatggttcctgatccccagtatcaagagtttgatgatcctaggcaccatgcgttcctaccaggtccatccatcgcacctgttgtctctatgcccgcttctccttcttcttcttcggcaacggcatcggtagggaaggctcaagacgaaggagtggtatgggcggagatgaggacagaagtcgtagaatgtgatgtgcccatcgtcgtttatccaccttcgagattaggcatcggtgttaccggggccggtggagggatgggtcgaggagacggaagtgagcggaaagggggggtcgtttatgtcgtttgttgagtccttcctctttcttgagattggaattgggtcgggttcggttgtgatctt

SEQ ID NO: 1808 - DNA, 14720 bp, Xanthophyllomyces dendrorhous
cgttttctacttctttcgtaaacaatctatcttttttctttttctttttacctttacatggtagatataaacggagatagagagttgtagcatgaaacattgagatagttagagaagcatcgtgttacgacaggcaggatgagaaagaaaggaagaaagatgattggaagcctcttgagcaaagtcaaccaagaaagcggaggctgcatgtgtaccagacagacaacataaaggctaatattacagaagatgataaggagagagacaagaagaagaagaaaaaagaagagggacagagaaagatgagagaatgtagaggaaaggataggtggttcgtgttttctccacaccttcccttctccctttcccgacccccctaaaagaatgtatcgtcttttccgacgttctttcccccgcgattccgtgcatcctgcatgttgtataagattgttcgctttgttggtgttttttttgttcgaatcagagtgagatgtggagatgtgaattgtgtacgtagataaacagaacagacatcgacaaacaaaaaaaaacccacaaggagatgacgaagagtgaaggaagaagacaacattgggttagaaagagaggaaagaaaaaagagaggcatcacaagtaactttggaggatctcgcccgtgtctacacgtctagacgggtctccttacatctagaagaaaataaaataggataaagaagaagagggaaggaaaggaaaggaaaaaagttggtcaaggtagggattccttaggccggtccatcttgagggagaccgttcagtccgccgaggcaagccatccagatcctcgtcttaaatgtgcggaacatctctcgtacctgtagagatatcatatgcaagacaaagagggacgaaggaggaagaagaaacaggaacgatcaacaaggacagtcctatggtctctaagatcatcgttcttacccgcatggtctcgatcgagcgaagaagaagaatgaatgacgtacaagctctctaaagtctatccttctctcggcaacaaagtagaaggtgagcttccgacggtccctagagaaaagaacaagtcagggacaaaacacaatcagaaaaggataggcgaaaggattgggatcatagacgaaaatgataaaaactaaccattggtactcggcatcgacaacttccataggcaacttcttttgctttactttctgctggcagagccctgtggttgaagagaaaatgatcttcttcaataagagctctccaatgagccgcacatggaggaaatgacttacaaagagctttagcctcgtcctgcatcttggtggcaagcagtctgatgagaggagaacgtcaagtaagaaacaccccaaacatctcatctttaaattagaaacgaacggagagacactgactgtgcgtctaacggctgagccttggagtatatcctcttcggcatgatctccttcgcaagccctctaaccgtgacccctccctgtccacttgcgcttgggccacctcctccaccaccaccaccaccgctaccgctgccgccgccctggttacccaaaccggcctgttgagccaagaacgcaagctcggcttgatgctcctggaactgcttgacctcctccagtgagatactatcatttatgatctttcccaggtcttttcctctatcagcttcgacgatgacaaggtcccctttggcaagtggctgggtcggatcgatcgcgtaaaacagatcggttcggccggctttgaactcgacgatataaagcttggtagccgtagggacggcatgaagaggaagccctttacctagatcgagtagagcagaactattcgagaccgcggcggcgggaatggtagtcgaggaaggcggggaggacgaggaggaggactgacggtaatgatgaggtccctgtgggtagagcgcagagggaacactgtgctgagatccctgttgaagttgtagctgctgctgctgttgttgttgttgttgttgtaactgttgctggggtggttgttggtgcgactgctgttgcaatgactgagacgacagttgctgaggctgtgatagctgtggctgctgctggaaaggagaccgttggatagaaggcacgaaccctcgctgagggcccccgaaaggggtctggtaagccgtaggttgaagaccaccaggtgcgttcgaaggagggtacattctgcccaaacttgccgaaggtgcaaagctcgatgtagtctgtccaaagtccgtacgagccgagaggccctgtggctgggactgggacgaaccgaaaggttggaagccaccgacggacgattggacaggtaggtaggtcgactgcctgccgacagccggggaaaacccggactgaccaccttgagacggagacaagggtggagggagttggaccgcatgggttgacgacgatcgaccgtatccgatcggggatgtgggcgagcctcggaaagatggcgaatctaaccgtcttccggtagacaatcctatggaagagggcatcgagtgatctctctccctggcaccttctccgggggcgagactgaatccgcctcgacctctggggtaagagatttcctcatccggctgttcatccctattcaacatggcactcagaccgccccaagtagacgttcctccgccactgccgttgccgttgaagcttgcacttctcgacttcgttcccggtctttccagctgtcggccctcggcaggtaatggacgcaagaacgacgcggccgacaatgagttttggtagacacttcctccaaaggacgacggagacgaaggcgcgagaatcggaagggaggcagggtgctggaacgtgtttgtcgacgaaggcacgtggtagtgcttgttggtcgagtgttggcctgaagcgagagcgagcagatcgtcgtcctcgttcacgtctaacttcttcaaactgctgataaattcatcgtcggtgaaacccccgccgccgttccgggaagaattgtttgcaccggggtaaataaacgagggatagctcgtaggggccctggacgattgaatatcagatcggaagccgccttgtaagatctgatttccagcctgattggcgaacccggtcgattctattaagctcatttcgagtaacccactggaacctcggtcgaagcctcgtcggttgacaacactgacgctatgtcgtctgctggtcgcgccacttcctcctgcgccaccgccaagaggaggtgacgtgccttccaggccaagaaccccgcctccgtgttcatcgagaccgtatccggcaagagcacctcggccgaaaccgaactcatcggtgagttggttgggagacttgagaggctcgaagagagagccgttgttggaacgcatgatattctgaaagtcgcgggagaacggagactgtcacacaggtcgagactgtgagtacatgcgcgtcaaaggaaaagaaagaagcttgtctgcatacacagagaatgaagaaggtgggggatcgactgaccatgttgcttgcgtctcccaagccggagctgggcatatcccttcgatcgaacccaatggctgatgactttgtcttgtcgatcggctgatcgaatctccttcctcctgggaatctctcatcctcctcgtcgtcttcgaaaacgtcggtcgagtctggctgattcgagctaacccaattgttgcctagggtgagcggaccgacggaaaagtgggtcataccggtcatcgctggtcggtctgtttgcctgtgagtgccgtaaccaggtgcgaacgattgagatcgagaccgagacgtgccgggtggcgcatggggcggcgaatgtgtgcgagaaggggggaaatgattgatctgtagacgaggtgagggtgtgctatcataatcttcatcgcgtgtgctgaacggttcgccgttgttgttgttgttgtcgtcactgctgttgttattgctattattgaagaatgaagtggaacttgcttctaaggttgacacaggattctcaggttggaaggaggcccgttgcgggaaacccggtgagggcgacgtcgaattccgaggtctagagcccgatcgatctctattgtgagcggaggacgaggacgacgtggtggtggacaaagagactgggttgagcgagctgggttgatacgatggtgattgaccccaaggtccaccttcggtcacccttccaccggccgagggtgagcgggacaatctacgttcgtagctggacgcgggagatcctgagggtgccatccaagcagggtagtttgagaggagcgtcggctttgggagagatggttgaactctctgagaggacgcagcaggaaaggacgcgttcgaaggagcgtaagacgaagggatcgacactgggtgggaggaagacgggatggatgaggacgatgatgaaggcggggagagagaaggaggtggatgaggggaggacggtcttgattcctgtgggatccagaagggcgtgttgaaagagggaaataagaaatcagtaatgcttttaattttggttttaatcttattcagaggggtgtgatgtcaggatggaagtatccatgatctgttgacagatgacctccgtcttcggatttatcctgacggatggagaacgagagaccggaagacgcgggaaaattgaaacatggagaggagagagactcacccagagatcgcttggtaggagatcaaaggaatttatcattcacgataattgtttctcttgcagagagaaaagagtaggtgtttgtatagagaagatggccaagagagtagagagaaaatagaatagtctatttagatcgagggatggagagaacgaggaacgggacgaagcgatgaagcgatggatggatgagtggatggatgagtggatgggtgagtggatgggtgagtggatgggtgagtggatgggtgagtgggtggatgggtggatgagtagatggagggacggataagtaggcgaatgagttatcgtatgagctctgtgagtgtgagtgtgtacacgatcaatcgaaagacgatgtttcaggacaatgaaccgatcaaccagatgctaagccacgaggtcgacagaagcaagagtccgaaaaaagaaaaggtcagcagatggagaaggagaagaggaaaataaaacggacagagccaaaacaaccaggagaagcgaccgaaagaaagaatgggagaaggggagaagggaaggaagcaagaacacaagaacacaagacagcaagaaagcaagaaagcgagacagcaagaaagatgggaacaagcaagagaacgacgaaagactctgtgttgcatgatgtgagatgtccactgcatgcatcccctatgtggatggaaacagacgtcgaacgatggacacatacacacagatacacatacatacacacatacacaagatggtgtatcctgtgtttcatctgtctgtgtggtcgtccgtcatgcatctcacccgatcagccggtcatcgtcccgtcccgtttccggctgggacctctcttcttatggtcgttctcttcgacggtcagagctgccatcttccggttctctttctggatagcatgtgacagaccgagaggacagagtagacaggagaatgagggggaaagcggataaacagatttaagcatcagaaacttaccggacaagaacgtaagggatattttatcgtttagtatcctctatgtgtcttcttcttcttcttcctctgacgttgtcaatatcgtcttcgtcttcttcgtcgtcgtcttcgtcgtcgtttttgttgttgtggaagatgggatggacgagcggagatcgattggtcggaatgtcggcacaagcgaaatcccctggccttttttcttcctttcctttccccatctctctttctttcgctcgcttcccttcttcctagttctctccttctttccttatttcttcctctcttcttgctcttcccctctctatctctctccttgacctataccgttttcttgctctgtgtctgttctctgtaccgtctatgaaaaaattccatgtatgctctctgcaaggcctcccacacgccccctctttcgggcgctctcccatctcacacatccctcgattgcctccatcgggttgtctcggctctttttcccggggaagggtaaccctaggttacaacttacaacacatggttacgccatcatcattcggctaacaatcctcctcaccgctggaatgcaccctagaaccggtcgcttacagtgccaatcatcatcatcatcatcgccagcatacagatgcctcctatcaaacggatcaggatcgcacagccaaagtcagatccgatcactacaggcagaggatggcttttgtcaaagattgacgagctagaggcttccctcaaagactatgtgatcgcgagcgggttagtccttcggtaccatgccgatctactacagcaacaacagacaaagtgagtggtctcgttgcggatcagtagactcttggcgtgtttgggacaacctcggatcttgcctgttatcttgtgttgctcatatgttttctactgctttcctttttgtttgagggggaaaagaaacgaactctccgctcagttagctcaaccacccaaagaactcttggacagacttcaacagaataactatgcctggatacgagcagagctcgacgagtatcttgtctgttcttcctttctattctattctcctcttcttctccatctttttctctgctttctttgagcgataaacgcttctttcaccgggtagaccttctgaccgtccttctctcttcccttttcccccttcctcgtggctgcttgtctgtacagcgcctcgcacagacacccgaacaagcgcctgaggattctaccttggcgaacactgacgatcagatcaattcctcctctttggtaccgtcaacagcatctgcaaccacatcagccgcgtccacatcaacagcacaaccagtcccagagcccgtttctcgtcaacctatcgtagtcaaaaaccaactgacgggcgaacatgccatttctgctcagccttcactcggacaggctgatcctttcaaacctgctggtcaaagctctacgccttccctctcatctacgactccttctgtgcctgcacccgtacctgcatccgcacctccacctctcaccgtcgctgccgccgtcgccgccgcgtcatccacgaatgaccacatcaacactatcaacgatagagacaacgacgggaaattaaacccggctctctctttcaatcctcagaacccccactttcccaggtcagcatcaacccttccaggatcctcgatgatgatgacgacgacggaagaacagccgtctcctgtgccattcgtgaccaaacctcgactgaaacctaaacctcggatgaaacctttgctgggtacgatggagaccgagaccgaggatgagatgagaacgtcaggggtggggggtacaaggatgagctcgatcgtcgatccgttgttgggcgtggtggatgatagtttggtacaacccaatatgatcattacacccggtggagggacgaccaggcctgatgggtcgttagcgtctcacccgtccactttcttccctcccccaccaccatcgccgccgttagcggcaccgccagtgccgacaccggcgacatcgctgacgacaacaccatcatcccttctacaaccactaccaactgcatcgtcctcatccgcgcaaacgcagatgcagatgcaactaccgatccagatgcaagggttcccacagacgttgacggcagcagagatcgactcgatgacatccgagcaggctcaggctataatggatcaactcaacgctgctgtttctgcctctgcatccgcatccgcgcctgtacttccatccgcacccgtgtctgtcagtcagtcacaatcccagtcccaatcccagcctcagaaaccgtcgatgtcgataccgatcccaccgatggacggcgtcatcgatctcactgatgaatcagacgaactcaacatggcaagcacggccatgaataccaacaccaacaccaacgtcagcgccaacgccgatgccggcgccgggacgataaacatcgaaacaggagacatgacagatctgtcagagtttcttaatgacgtggacggagagaattggcagcagatcttgaaccagttcggccaatcttgagacctctgcctaggggccgaaagagaaggaagtgcttgctatggatgcagtttcatcgtgttttcttttctttcttctcctcccttcaactctctgtatcaaccttgtgaactatcttgagtatcgtaacaaaagaagagaacccaaaggatacagaatgtatgcgattgatttatttttggttcgttttgcttgttcatactgagagagaaaattgagtggggggatcaagtcatgatacatccatcccaccttcgtccctttcctgtttcattcttccgacctgaacgaccgcatcgctcaccctatccgatccgacgtcttgtctgacgtcaggaccgtgctgcttgttcttcccacccagccttccgttcctcgatcgagtcgacacccctcctatacttcctgccgtcccgggtcgatctagatcgaaagattcgtcttcaccttcttcttcctcgtcttcctcctctcttccttcacctccgtcgccaccttcccgttctgcttccgcttcctcgtcgtcgtcttcttcttcttcttcttcatcctcctcggcctcggcttcctcgacatcgtcattctcagtcccattactcgaaccggcacctccgtcaacctcgacatccgcctcgtcctcctcccgctcacaatggtcaacgtcgaattctaacaagtcgatgtgacgggtgtcgatcggatagatcggatcagagttcgagttcgaataggtgtggccggactgggaaagcggcagggcaacgggaagggatcgaccggtggtgcggagagagtgtatttctttcttaagatgctcgatgaactacaaaggggtttttttttgggtcgaatgtgcgcgaagggggagaaaaaaaagaagaaagataaagtttttgggatttttttttaaagttaaatattagtttggtaagtttaatttctgggggaaaggaaaatcaacaattcggtaaaccgatcaaagagcaaaaagaaaagacgaacatcatctcgtctactgattcgagaattcaacgtcccaatgtgttggttcgaacatctcagtagcgcaactttgctcacacctagacacatgcgcatatgatcatctatccgtcagcttttctctttggctcgatgagtaatcatcagaaaaaggaaaggaaaaagaaaggaaaaaagaaaataggtcctacctcgattaggattcgaatctggcacactcctggccggcaatctcggcatactagcaccagcaatcagttcacctgtatccgggtcgacacaatccacattgataggcggcaggaggagccggagttcgtcgaatcctgctttgagggaatcccttcgacgctgttcggctactttgtgagatgtctttttgatcacgtcggggagctttcctccggccggtgggaccggtggggcggcgggtttggtggcaggcgctttcgctttcgatttacctagaagagtgaaaccaaatcacgacatcaaccataatgttcgccatgtgacacacacacacacacacacacacatatgtatacgcaaaagaaaacaaaccttttttcccactagacgtagccttctcctttcctttcgtaggcaccaacagaggtgacttgatgatggtgacgtccatcgagagtttactcagcgagctcttcctcttcactcctgtcgatcctttcttcccggcttcccctccgtctttagcagtcgcagccgaggcggaagaaggattcgagtggtcatcactcgtggcggaccttcgtttggttctctgattctttccgggtggcgatccagagaaagacgacctcctggaggatgatccggtgcgcgctcctgggccatgtacgttctttcctcttccgctctcgaccgtctcgatcgatccgatggcgatgggcggggagccatccaagctgaaggccataggtgaagtagagctttcctccgaggcgttcatcgctgtgaccaaaggagaagccctgaccggtctgctggcgccagacccgccacccatccgaacggtaggagatccaaaggcggaaggagagtcagaaaaggtggacgaggaggatgagcctctgccactgggaccggatgggttggctgtcgcacgcatcgttggacttccgctggtagtgttcaagttcggtctggtcgacaagttcaaaaacgtggccggtgtctgaggagctaacggtccacctgggggaatagcaagcccaacaccgatcggaccggccacgggtgaggacgaagcggaggaagagtttattcggtgttggatgtgcgcgggaagaggaggtggcggcatggccgatggattgaaatcgatgggcgagggcgacgaatgtatgcttgttaattggttcattccgtctatcatgtttgacgggatggctgatgagagtgaagacggagagaatctcatggattgttgttgttgttgttgctgctgttgctgttgttgccgctggtatagagctgcctctgtatcttccgagagagagatctccatttcttcgatcccttcgagtggtatctggggacttgcgagtagagctggagaaccaatgagagcactcgaatccctgttcgctttcgatcctcctccggactttcttccattgacgggtttcatcaacggactcggtcgagtctttgcgtttctgccttctccgttcgagccggccgagccggcttctcgactacttcgactgcttcttgacgagcgtccttctttggaactgttgccggctatcgttcctgttcctaccgatccatcggtactaccgttcccgggttgagcgagcagacggggcgacatgctcgctccgggctggtatctatcggcagaagagggaggttggcgaggaaatacgttcggtccgagcgccggggatgtcaaaggagagaaaaactcgtgtgatgggaaggaagaggccggagtggttgaatgagagaacgggttgacactctggaaggcagagcctggagtggtcatgcatgaatgggtggacatgactggagatattaatggtgtgaacaagagcttcattgttgttatcattggttcaagaacataagagaaggtcggatgagcaaatgtagggcacggaaggaggcaaaagagagacaagaaaaacgcacatttccgtcctggtcgtagttggcattgtctctgtaagctcccgccgaggttgacatgtttcctgagttcatcaactcgtgatgtagggaagagagggtatcggagttggggactggatctcaagaaagaaaggtgggagtaagaagagaagggaaggagaagagagagagagaacgcgctctatttgagcagaaggtggatagttcgtttttactcaccctgcgtaggaagaccttgacgtaagagatgagcggcgttgacgagactgttgtaatttggcaattgagattgaggttgagattggcgttgttgttgtgcgaccagaaaaggcgagctctgttgttgaggagcgaggaagggtgaaggatgctgctgctgctgcgactgcagttgatgggatcgataggcctgttcgacggcttgacgggatataaggttgagctgaagcaatggcggagatatacggaactatgtcaacttggatgaaagggagagaatgactctgacggagagtatgaggaaacaaaaggcttacttgttcttggatgaaagcagtctggaactgttgtagttgctgcagttgctgaactttttggaaagcagaagcggtatctatccagtctggttggccacccgggttggaagcgctctcacttgaagtggccgaggtggcctgatccagatgagggaccatcaggtcgattgcctgaagaaacgcgttcaagttgattggtcccgagtccgcaccgccgagagggctactcccattgccgttattgcctcctgctccgccggactctccagaagctgactgggaaccattcgggaggacaccatcgagaagtcttctgaattcgtcatcattcataggggacgttgcggccgaggcttgctgagagctacctatcggactcggtcggggtgaattcgagggctgacccagatagagaggactcatgctagcgttagcatttgtgttcagtgagtgatggccataatggttcatgtcggaggatggctgacggagatgctgttgatgagaggaggaagagaacgaggatgggctggcattgtcggcgtagactggcccggacgagctggatgagacggaagaagtcgaggcggaagccgaaggaggaaaattgtctgtgtgcggtgggtcgaatgccatctggttgattgatagtgagaacggggagtgttgttggtgactactataatggtgactgtctttgttctgtcctccctgttgatgatgctggtgttgttgctgctgctgatgttgatgaataccaggagaaggatgcataccggccgaaaaggacgatgcttctaacgaaaactcattcatactatcatcctgaggagacttaacgaaatccgagatgtcgaacgtcggtgtggtggagatgaccgtagtcgagtccgacggaggatgcatccgagtcgaacgaatcttccttggtgatcctgatggttatctgatcgatcgaccgagtgaactcagatatcagcgagtgatctggatgtgagcaagcgacaaaaggctaaaaaaaattataataaaaaagaatgatgagtgagaatgagaatgaatgaatgaatgaacccaaaaaaaaagaagagagaagaaaaaaaggctatcgaacgttggtgctcaaggccgacggattagaacgtgaatctaataaacaccgaggcgatagaaaaagctgtgaggcgagcgtgaactatctccgggtaagatctttacatgtactagtccttttttccgtggacacccggtctgaccgactgcttgagatccagttgatggtctgaaggaggatgtgagtgagagaatattttttacgtggatgtatgtgagtgtctgtgagtgttggagacagacatagacatcgacagagacccaaagaagattgaaaaaaaaataaaaaaataaaaaaatatatataaaaaatcgttctgggtcgaaacccaagtgatgtccgaaaaggcgcttcggtttggacaaccggacgaagggaaaagagtcggcaagggaaaatccgcaaggcagccgagggaaattcggctggcgctaccgaacggctgaattcaatttgtgggcgcagcggttgatcgcatcatgcaaagccacacgtaacttgatgtttgaaggactcaagttccggtaatcgattctcagctgtgccttgtcctgatcgttgtgcccgagacgttcagggctcacccatttaggtttaatcgtctcccagttgatcgaatggaggatcggatgaatggtttgggagtgtggtggccacattcatggagactcacgtgtatatgcagtgtcacgtgactacacacagcatatcacttttatctattccttctttcctacgcgtctccttccgtactttctcactttctttccttctttccttctttctcactttcttcccttctttctctctttcttgctggccttcgccgcgttcacacacatatctataaacaaactccccgcgtcaccatgtctgatcctgcccggcagctggcccaactgagagcaagcttccaggcagaaggcaagcttgaaccggagtcatactcgttcgattcagaagcttctttcttgcacaccctcaagtcgtcatccagaccgtcgcgcgcaagacaactcgtcacggtttccggatgggaacctgattcatcagcggtgccctcggcccggtcgttcgaagatctagtccgaggtcagtctgtgtttctttgtcctcctctttctcggtcagaccaaatgaacggccctcattcctacgcgcttctcagtgagcgacctgcgctcgctcagactgaacgagaagcacaccggcaaatacatcctcctccgcgttcttccctcgtcgactatcggacagctttcagatccactccatctgacgatcacactacctgtatgctccccctccggatgcgctaccctgcttcgaattcgatatttcccactccgaccgtcgagcctgggcgtgccgactgcgtccgatgttcgtgcagtctttcccgacggccagatcttggccgttaaggaacctcgagtaggaagagacctattggacgccggtcgggtcgctctctgggtcgactccaagagtgacttggcgttcattgaaaaagatgatcctttagggacgggagtggattgggtagagaatggacgaccgtgggagaaaccaaaggaggcggagagaccgctcgatgaatggaaaaacctcggaaacaaggtatttctttttcactctcgttccactcatggccctcgcgttgactattacattctattgtcttttttttttttttcttt

SEQ ID NO: 1809 - DNA, 53963 bp, Xanthophyllomyces dendrorhous
ttttctttttttctttttttgctcttcccactccctcttatgttcgataggagtttgcatcaaaaaattacctggcggccctccgagcttatacaaccggcctcaaccaacacccctgctctccctctagacaccttgtcctcctcaaccgagcgcaccttaacaatactctcgaacgacacactcctgcgttagccgacctggccgtcgtccttgaaaccctatcctctcctgcttgttcttccgcctcagacacaaagaccctcatggaaaaggcgctaagcaggcaggcagccgcattctgttcgctcagacgttggtctcatgctctggaaacattttcaactctagcaaacctgtctcctgaactgcctgaaggcccggcaggcatcgcccagtccgaggctcggctgaacgagtcttcagagggagcgtttgacattcgatcgctctaccagacctctctgaacggaccgaaagacggcatccagcgaatcaaacatgtcgcagactacatctctccctcggccatcgtcggaccgatcaaaggcaaaggacgagggttgatagcgacgaaagaaattcaacccggagaaatcatcctggccgtccgttcgctcgcgctcgtcagctcacacgagatccctagtaaacccgagttggtcaggtttgatctcgaacaggatgtcatcgaccgatcatccagtgaggtctacaccaggaatgtgctctggaggctggcggaccaacccgaactggcaacaaaggtctcacaggcttatctcggaccaaactcggatttcgagatgccgcccgatttcgagttgcattcccctctcccgcctccattccctgctctcaaacagaaagacatcccgaatagagccggtctcttgtcatttcctaccgagaacgagaacggcgaggagaatggagaggcgcgagcggtcagaccgaaagacatctctcgagcggtgttctacaatgcttctactcctttcagactcttgccagtccctgtacagggggatagcatagcctacgcggccgaggaagctcccggagcgttgttctccgagtctgctttaatcaaccactcttgtgcttggaacgcctaccacgtatgttttatctgctctcattctcatttgcccatctctcctcctatgcttacttgacatctgttcctttggctggtgcatccagtgcttcttcggagactttcaaattacacgggcgactcaactgatccctgctcacaccgagatcctcgcctcatacgttcctgatctccccctgcagttccgatcatcccgactggaaaagtactttgggaaatgcacatgcaccctgtgtgagaccgacagactcgatccaggtttagacgagcgtcctggttgggtcgtcaaggctatgagagaatcagcggatgacgaagaccttttccctccttcttcctcgacgacgggatccaaaggactgagcatgacccagttgacggcgctcgtcaagaaacgtgaggaaatcactcggtcgatcgacaagacctatcttcaaacccggcggatccccagggttgatagatatttcggtcaccaagccttgagaacccctcttcgagcgatcatcaaccgacgactcgaaggggctaccggagccaccggcacaggtacgggcgcaacaggtgggaagataaaaataaaagaactcgcagcttgcatgaggaacgaagtctccgctctggattccctaggtgtccggattaaacccgactcgttcgctttcttgggtcttccctcacactcgtccaacggtactgatccgaacacggccgaggacgtgagcacccatgacgaggccgagatcaaaggaatgaaagatctaccgatatcgactcctccgatgttcagacactcagaagccacccgaacgctcctcgccatggcttctctcgtccgtcttcgatctcaagctctcgagggtgagaccgagtcgatagggttaggaacccaggtcaaagcttggttggatgccgctgtttgggtcgaggacgtgaccgtcggtggtggtctgggtttgttcaaagagaggtggcaggccgtcttggagaatgccgggttaatagatttgatcgagtgatcgttagatgtgtttttcttgctttctcactttttcttttttctttgtcacatgcacgcgtgtgtatatcttatcgttcactcttggaatcgtacaatgatacaatgactgatggggactacaatgagggaattaaaaagaaaaagaaaagaagatgaagtggggatttttataacacatccttcaagtttgttttgcccgaccctctctctagcggcttcggctgagagtccgccggcttccatcccatctgttgcaagcaggtcaggttcataagtaagacgagtacaagaagtgtgaaaacttcggtctctgtccagatggcatcagatacaagaaggacataccagaaagatcacctcgaacgtcgctggaatgtttgtcgtttgaccgttttctgaggggaccccatgtaaagctaagtttggaacccacacatcatcaccattattgtcagcatcgttgaatatcaaccaatccaagaagcttggaagagaaccaaaggacagaacagatagtcaatgtccgaaccttcatatatggcagaggcagagatcaacgtatcccgcttgaggaacgttctccgtccgaggatcgcgttaccttcgcccatatctctcagatcctcgacaagctcatacatcgatggataaccgaatccgatatcctcgacgtcaacggtaagcagagtgaagcccgctcgttggagaaggttcgaagcatcttttggatctgtcgtggtccaatgacttgacattgagcatgcactttcacagagagtcaaataggacaaaaaaaaggtcactaaccggccataggggagatgtgcggagagattcctccttcccgttcttggtccgccagttgaagagacgtcctaaaacaggcagaccaagcagatggagacagacgattagcttgagcagacagattaagaaatgcgttggggcggaatgttaatttcttgcgaacctgagctcgaacaaagattccccaccgatcatggcgcctaggaagaacccatcaggtttaagggccttttgaatttgtgtaagaacacctaagggttgttgagatttaataatattgttccaatcagcaccatgatacctgtttagaaagaagagcagcataacaagaaacataccagggagatcattgacccagtgtaagcccatgcatgtcacgatagcatcttgcgagttttcagggatatgcgtcaacagatcttcttcatctagctgcgtccgagtgattgactcaactgatgaggtccagtgtgagcgtgatcagaaccgtggggccagtatacatggaacagttcgaccaaacggttatagaaagaacaacaatagaactgaccatcgaattcagaatccggatctctatgaagggaggcttcttttaaaccggaaacgagcacaagcagtcaaggtaaacaaacgcgctacatcagaagtccgagtggctgatttaaacgaactgctcatatcaatcaactcgatcgaatcgactttatcaggatcaagaagctgagagaatattcctgagccggagcttaattctagcactcttttcggtgaattcttgacgtcctataggatggatatgtttcgatgacgggcaacagatcgagacgtcataacatgttaacatcatcaacatcagcagtcggtgagatcagcgtgtgcgcgaagaatcaaacagcatcgaaagtaagaaacaaggaagcaaacatacctcgaaccgctcaagtactctctcagagatttctcttctaaggtaatccaccagcttgcttctcgccccatcctctctcgagaccgccctgtccttctgaagagcctttgcccgacggtcaaacacctggtaaggcgagactggcgagttcggagacaaagcagcgtaagttctgaaagagaatggagagcccattgaacgggcgagggatctgtttcgaagcatcccaaacagtaggcgatagagtgacgacttggaggacagatcgccatcgggaccagcacggagagatcagagagatgacggaggcgaacgaaaacggatgtgattacctaagcaagaatggaccggtaccatttatctggttacaacgggagagaggcgaaaaccccttctcggttcagattgagatcccttgcttgtcagagtcgatctcttgatgagctcaagtggtgcgcgagaacagagacagtacctgtgtgaaggagatgaccgtggaaagagcataaatcaaatttatttgagcattcaaagtgaatgactatttcttcttcatcgatctggagtttactatgattgactaagaaagatgagtgttggccgagaggtaagctttgaaacgtatcagaacctcttggactcaacgatacagaacgtccggatacgaggtgaaggagcgcatcaacaaacagcattgtgttgtgtgtgtttggttgagcggtctgtcagctcctatgtttaagtagctctgaaggggcttcaaatctatcgtctttctgcctttatttattcggtctgtgtggccttgaaagatcatatgagctttatctacatcatacgatgacaacgagttcccatcaaccaaagaggttctcggtacgcatgaccaccatcgcgggcgcaaggatgaggatgaccatgaaagctgggtgccagtcgatggctcccgggtaaaagaaggattaattacgtaaggcgatcgcccgaaagggccgacaagcaatatttctgaaaactccgactttccaactcgacaacgaccctcctgtgctccgcttgagcttcctctatccttttctcttcttctctttcctttgactcttccccctctcctggacagatgttgctgttgaacattgtcgaggacagaccgacgcctcctcagatctagtaagtcagcttttattcgctgtttaaaggagccgccttgccgtcgctccgcttgtccttcttcgtattttttctctgtgcttaatttctgttcattttgtccgcaacagtaattacaaggtctacctgaccgctctatgcatcagttggggagcatgtttgtttggatatgactcttcttacatcggcactactatcgtccttccttccttccaaacggcgtttggactaagcaagctatccacacatgagctcgctgtgagtcattccttcctcccttcttctcgcgcctttcttctcgtccatctcaaatataaatgtaccgaccaaccaaacctcttcacctttgcagaacgtttcagccaacatcgtttccactttccaactaggagctttcggaggagctggtacgtgttgccaagcgcatcaatttttaaactagtttccgtttgtccattaggcgacaagaggtctaactctggtctatcctcgtagctctcggatttcctttaatggaaaagtatggccgaaagattgcgcttatcatagccactgctgtgttcatcattggagccatcgtacagacggtcgccactcaccagctttcatacgtctactcgggtagattccttgtcggtcttggagttggatcgatgtgagtctccttgtcctcttctgttcgtgtgtgcgcagttgttgacccgccgctgtatgtacttgtcctctggtcagtacgagtgctgctcccgtgtttttagcagagatcagtcctcctgctatccgaggtcgattggtcggattgtgtgagtgatcatgttttgtttggtagattgcactcgaactaaattcgtactcaccgcctgatattttctcatggtatcatacgaatgtgcgcagacgaaatctcataccagtaagcgcatgtcacgattgtcttgtattcctactctcttcttctgtattcttaaacgagacttctctcggaacacacatcacgatcacagagtgggagccgtcgtcggattcttcatcaactatggaatcaagcagcaccaaaacactaaggccgccgagtcatggagaattcccactgctcttcaactcgttccggccggaatgctgatgctcggattggtcagtcccctttcctcatccgttatttaaaaaaatcgtcatgaggtctaaatagacagtgtttgtgctctatcaggtctttgttcgagagactcctcgattcctcttcaagcaagcccgagatgccgaagcaacgagaaacttgtgtattcttcgagatctctctccagatcacccatacatcctggatgagatagcctcgatccggactcagatttcggacgtcactgtgctacacgcaaaggaagagactgaaggcagagtagcttggttcaagtcctactggagaggtattgcaaagtactgtctggctaaaggaattcgaaataggatggcgatcgggttcatgatgatgttgttccagaacatggtgggaaccaatgcgatcaactactacaggttcgtcaccttgtctatcagtctgcgccctctattgctataaacttatctaaatgtgaatgcttgaaacttccgtcttagtccgaccatattcaagtctatcggtgtctcgtaagtttcccttccgctcaagagcacttgatagctcgtgagtcatatttcatcgttccacatccgatagcacgctgaggtcaccttgttcttcttcttttctcactctatagaaacacctcgttgtacacgggaatcttcggagctctcaaggctgccgcgtctgttgttttcttgggattcctggtcgatcgacttggtcgaaggctgcctttgctcgttggaggaattacttgctgtatctgcatgttctatatcgtatgttcaattcctttctcgtgttcatcgattatcggtcgtcggtcattgtgattgatctaaaaacaccttttctccatctacacagggtgcatacatcaaggttgcacatccggcctcatatgctagtgcttcgctgatgagttcttcgactcaggctggggccaaagctgccacagctgctatctttatctttggaatgagttttgctgcttcctggaacggactcgcttggattattgtgagtctctctcttctttcaccctggccaccctcactctcttttatcgagactgattgtcaaccttctgttgatctcgccactcagtgttccgagatatacccactcaagatcagaggcttctgtgcagcctacacagcgatggcccaatggctctggcaatttgtcatcgctagaagtacaccttatgcagccgcttccctcggatacggcttgttcttcttgttcggatctttctgtgcatgtgcagttgtgtttgcctactttttcatccctggtaagtcattgtcggtttgatggaaagaaaaaaaaacgcaagggagggttgatgggctatagaaacgcacatgtcgtgatggaactgaagatcatttaacctactgtttcttattcttctgaaactcaacagaaatcaaagggctcacgttggagcagatggatcaagtgttcggttacgtagactttgacgtgagtcgccctatctatgtatgtgcctgtcgtttgctcaagttgttaatctgatcataatgtctttccgttttgccaaacaggccaatcctcttctacaggatagacaactatcgaacgacgagatcgaaaagcagactgtttgaaacatctgtcatccatttctttggcttttgcgcccaattcttttcctctatttcttttggtctttttgcaagaacaacacaaaacaaaacgattatatgctctctccatcgatcatgtaagtccttccttcttctccggattgatcacatcgctccttccagctcatattcgccatccgttatgaccatttcttgatcagtgccccaaaaattgaaaaatagttccctttcgaggaaacgatgtacaactatactccaaagagtaaaaaagaacaatttcgatcttggattgaaacatatatcttgattcttcttccctcttctttcatttctctctgatcgtgtctttcttcaggttgcaacttcaattctaattttaaaaaaagtcagatattcagatatttgttgtaatatcttccttgtagattcctcattgctttctagttctattttgtccaacctcaatcgatgttggattcttcttcaacggcatctacgaactctctcatcttgtgaacgagagaagacagaagaaaacatcccaacaagtgatagagtcaaaacctctcttctttctgcttctcgttcccagcaacacatgaacaaactagtgaaagaatacagaaagcgcaacgaactagtttctgccgttttatggctaatctttgaccgagaggcgtctggttccacgagccaacagaccagttgttatttgacttgttatagaaaatagaaaagaagcacctagacacgcaccttcagagaagactcgtcgatcttgaacaacctatcatggaattgctgtatagcagatcctccaggaattgtatgctcgatctcagaacggacatgtagtgggcggttgacggccgctgaatatgccgcgcatctcaggatacctgctcaacccaaacagaaccgagaaaaacaaacgagcgaggagaagcgtcgaaagagggatcaggcgcaaaacataaagcgatcgcggggaaacagtacgaaccaaaccctccgatagcatccaatcgatctgcatcctgcacacatttcaactcccaacatctctctctccatccatcttcccattctcccagttttctcagtttctgttctttagaccaagaggtgttgtcaacgatccgacaaataacagatccctgactagaggaggatatgaaggggtcaggcaatatggatctagtgatcgggtgattgaagaagtcatccaagatagacagagtagtcgtcggagacgcctggattgtgtatttcgctagaaaagcaaggaacggaacgaacaaaatacaatcaaggtatcatggtcatgaacggtaacaaatacagtgaacaagagagaggtgagcggtcctaccatcagtgagatcatgaaacaacgctgctagctctagattcaaccggagagaccgtgcctgtaagtttctttgtcattctactgagggtaaaagacagaacacaaagctcaccaacgacgagaaggtcaaccggctcttccaaagatcgtgctaatgacaatgcagtattcctgactcggtttacttgtgagtatcataaacgaattcttttttatgaatccagcgtatcctcgatatcgaaaagcaagagatgttgagacaaaccgtgataccagtcatgagacggatcgtagtcagccatgtgtcttttgaccaactcctctgccaagtcgacacatctttggttggcttgcatctctgaatggagaagggtactttaagctactggtgagtgagagttacgagttgatttgactccgtcagcacgacatgatacaacacaaagttcagtatccaataagtttggccttatttcatgagaacaataccaaggaggtagagcggaaagaagctcaagagatcagccaggttgaagttgtcaagatacagaaacttactagatgttatgtggatgttgtcgactttctcaatcaacgcaacgtctccttactcaataatttcaacagtttcagccatcagccggtgggctccctccaaaacgctcttttcttcagccacggctatctccgatctgtctattgcccttgagccattggatgttctcagacccgctcggtagaccatacgatagaaacgtcgggcatgccgagttgattaaactttatgatgtcaaaaacgaaattggtgtctgtagatagggacatgtggttgtcattcaatgaatggatgggcaagatcatagttgagtttcatccttccaaaaagactacatctgactaacatacactaaagggtcaagatcaattgaagattcacacaagctatataaagacattcttatagtgtatacatatatgacatcgcatattctaaggtctctagaggtcaaacaaacccggatctttgaattcgtgctggcagagtaagaaagaacatagcagaggagcaaatgccttccgtcaggccacgcacaacagaagtgatagtagatgtagaagagaaggacaggtctcaccagagcacgagtatcccaatattgtcctccaaactcccagctctccccatccggaccggcctcaaaccagagaggcttccacttctcgcctcgttcatccctagctctattccgagctcgttgtctggtctctagtatgagctttgtctcttcggcagcatcaacgttaccttcttcgagataccgttgggatggattgaaccgagagtctgttcttggaagcagggactacgagataggatagaatgagtttaccgaactaaagctaagtagaaagaaacacgataaggtacatggagacgactcacctcaaaagacggatcgagttggttaagagacatcgtaaagtatccccactacaaccgagaacatgcgtagacaatttaacaagagacttcccagacaagcacagtctcatggcgagagaagaccgaaacggaagagacgtacgccatagtatttctctgcgtcagacggccattgcctggcctgccaaagcatatgagctggatcttttgcacttccatatctcacgtcaagtctcgagtcccactttccttctatccaagctgctttcgatccagaggccaagacatacccactgatcgaacggtttgatcgagttcagtacgtgaacgagattttaccttttgagtgatgattgacttacgaaacgacatttcgtccacttcccccccaacctccttctttgaaattcagatggcaaacatccccagtcgtcagattataaatttccatcggacctatggtctcgacgtattttgtacccgctactaggtttcgaatgtaggacggtggtttggtcctagcaacgtcgagggtccgagatcatcagtagtcaagagatattagtagacaaatcggacaccatacgaggccagaggagagaggtttttttcgctcaccagctgaaagtctcaccactcttttctagataaactgtagtcggtcctttgggagaaatttccaaggacatacctaccaatcattgatttgacccggtgttagcgcttgaagcagatgagacaatgacagacacaacgggaaacgaagattgatcttctctcttaccagacagtttattctttgccgaactcgtctgtttcatatgccatccttccccggtagcatgactgacgatgatgggaggatgatgcgaaaccttctcagccacgaacttgagtcctgtgatttagatacagaaactggtcagaccacctggtctttcacaagggaagcgtatttcaaacataaaaaaataacgcgtaccctgttgaacatattcaaatgtttctccctgtgtgtaagaagagaaaaggaagtattacgttgacctttagcaaaagtccagtctttatgatatgatctcaaccttcaaagaatggaaacgaagaacaaacaagcattggattgctaatcaaagagggaaagaagtcaaacagaaagatcttagacaattttcggactgaagggttcggagatgacgacacaagatccctgaacaggaaaacacatacaacggttttcgagaatttcgaagctttgtcgacgcataaccagagattgcaaaagcggcaacatgggccagccgttcgactggatcaattgagttgacggccatagataagagtgggaaatattcgacgtcttctgccgctctgatagatataagagatctcagcacatgcatccgctgatggagaaaactctactctttgtgcatctcgtggacttgaagagtaaacttaccgttgaagcagagaaagtggctcgttgaacgtcaccggcattgaaatctgggacatatccttcccgacgcttttcctcagcaccgagatcaatgatccttcatccctcggtgtctgagctggcagactcgtccgcagctgacatattgggatgggcgtttctaagctcttcactggcactggtaccgtcgtcgtcgcttctactgtctctgattgcaccttggccggccgggttgtctcaaccgatgctctcagatccgctcctgctgctgatgatgatgatgatgttgacaacaaggacgaagaagattttgaggattgtatggccgttgacatcgatttggaatcatcgaaccctgacggacccatcaaggtagacgtcgagtttgatgatgggaagcttgtccctgagtctgaagaaggagaggtaacatcctccacgtcctcgaactcttccacatcatcactacttccttcggacgagttgtcgctatcctcttcttcccgcttcgttggttcattgtcttcgtcctcttcttcaaagacttgttcggcatcataccagacagataacacattggacaccatgctcgacgttgaactcgatcggacatgcgctctttctctctgtcgagcgaatcgagcagcagcatcttcagccgctgcgcgttccaattcttgttgttggttcgcggataacgtcgaggaaggagtgagcttggcggagagcgagctgtgaagttgtctgaggttgaacaaactcagactgagttgtgagatcgcaggggaagactcagacagaagtgaattcgagccgatggacgatggtcgatatgcgactgctcttggtgtcgttggagttgacgaagagtgagaggagaactgatgagaaggtgacggagaattctgaaggttgctataaggagaactaggaagcaggagcggacttcctttggaagagttcgggaacgtagaaggttgcgatggtgatggagaggaagagagaacataaggaggaacggtccgcgatgcagaagaagctgtcgttgtttttgttccgtattgttttgaaatatatcaatgaatcaagaagaatcagtaaggtcttggatcaagtagagcttcattcaaggaatcaaatgactgtttctataaactgacatcttctaaagatccctttgattcctttgtgatggtgatgcgattttgttgatccgaccgtcccgtgagtagtgaccagaaccgagggcatgggtgacccactggggaagagatgctcgttctggatcgctctggtctctgctccaccaccgtagtggcccgaggcaagggtagtcgatgaagatataagaccgctcacgccgggtgcttgaggcatgatagttgtgattgaggggtctgaacgatggcgcaacggtacaggcgaggctatcggtcacacgagcgtactcagacaagtggattagctggacttcgcttagactaaagatatgggagcaaagcgagaaatgcttacctgtggaaactgacgcagacttacttctgtctctctttgagcttcctttgtctttctccttatctttgtgcccaccgtgacttttctccttctccttcgtcttgaccttcgcgtccttctttttcttgtgtgcgttctgtttcttggcatgagatttcatactgaaattctctgccagtgcccggagttcaggtttgatcacaaccatcgcaatttccatctcggtgatcgcctgtttatcctcattggattccaggaaacgaaagggatcggatgatccggacgcataaagaaagtacatacgcgacaggtgtcgaggaaaccaaaagcaagataccagatgagatcagtacaaggttcattgttctacttgatctgccgtatccgtcttctctaatctacccttttcttggtaagacgaaggacagaaagaacatctggaaacaccttgcttcatcccaattcactatccagtgcctcatatcttagaacacaccgaccgatcggatgacagatcaaaggcgaaacataccttatccatctccctaaggatattccattctgaagctgtcattctcgcctgcttttgtctttctcagatatataacttggtcttctaacacggctatgtttgattggggtgaaacagtgaaggaagaaaataggatggaggatggaaacggcctaaatcgtgaaaagataggtgacgatctgttcatgcacaaatgatattgtgatgatcaagatggtgttaatgttagggttgtgagagtcaatgttctgcctatatttttctcctttgttccgacatcaaagtcttgacaagaagagatgccaggaagtttgagagcgagaagagatagatcagattggacattctgtttgtttgtttgtttgtttgtttgtttgtttatttgtttttctcaagtttatatctcatcccagtccgacacagttataatcatcttttgatgagcgccgaataaacgggagcgtgtatgcgcaaatcataataccgaggctggatacgacgagtaaatggaaagccaggaaattatgcgaaggtgcaaaacgaggaacaaaagatgaaatatgtccatgtaaagagtgtggtgtgtggcaaatacgatgtgttgtccaggctggctagctatcagacaaggaggcgaataaaaacagaaaccagaacaaatgaatagggaaaaaagtttagggcaaaagaagagatacaccagattacaaggtgaggaagctatcgaaaagcgtcagcccgatcgaatttagaccggctacttaaaggatagcaagacctcctacgataccgacgacggtagcagaaaggaaatatccgactgctccgctcaagatagacatacttcgttcggccccgctgacagcagcggatgaggaagctgaagccgctgccgaaacagcgccagtgactctgccagcactagcagcagcagaggccgatgacgaccgagcactcgctgctgaggtcgatgcggagatggaggcggaagaagtgatacttgagctagtagcggaggcgctcgaggcggatctggaagcggaggaagcggcagtcgtgggaacgacgagaagagcggtatcgattccgttggagatggtcgagaacgtctggcagttggaagtagcaggggtcgagtaaggtccggcaggggttacagtctgaccgacagtctgtttcaatgtttacattaagagaaaaaaggaggttggagcacaggttgagggagtggagagtaaaataggcaagaaagaagaagagaccaacccatccctcaagtgtgtgagaccagaactgcctgaaagttgacgttgagccgtcaggttgagggtagagtccaggaggcacagcgggctctccgtcacatgaggtgaacgagttgttggtgtagtctccaggcatgacgaactggcaacccatgacgtcgagctcgtgctcgcacattagggcagccgggacgtcaggtgtctctgagatacagactcgaagacagaattggttatacgacatgaagctcatccactcttcatagaagacgtcctgtccagaaacgttggaagttacatttcctccaatcgggtttccaaggttctcggcaccatgcggatcaagctctcctccgtcgtcaccgtaaggaatgttgatttttgttccgtcgaaaactgattgacgatcacattcgacaaaaacaggaaggagcatgtctgaatgagctatgatacaaggctagtcagacacggaaagggcgtgatacatacatccttgaatctgaacgtaggcagctgaaagatgtggcaaacatatatacacgatgcacgcatggtaagtaaacggacgtctctcatgtgctttgaattaactttctgggtcactaacaagtcttgatgaactgttgacaaaagatcaattgaaaaaaaaaaagtttttaaaaaggagcgcatcaatgacgagcttggcatattaaaatatacactaacaagtgacagagaagaaatttaaaaaccagaagaatacgcacatgagcggactggatggttccatcagggatcaatcgagcattatttcgaggtttaaggcagtactattgaagaaaggaacagagcaagagaaatatagaacaggacagtatcagttgtacgcatcatcttcagtaagagaaaagatgtaatgatttcggtctcgtaactcacagctacaacgataggctcaacatttccgatcaaactgtctggtccagagtcgggaggtccgtagaggcaaaagtcatcgataccgttcaaggtgagcagtctagacatcgatgtctgattaatggcagctcctggttgagcaaggaagggtgcatcggggttagtctctccattgggataggcggcggtgacctgagcgtgagcgactgatgccaagggaagtgcgagtgcaagagcttgaaggaaagaagacattgcaagatgaatgcgagagagatagagagagagagacaggaagaggaaagatgggtataagaggaatacaaagttgttaggcgtttccgagtggcaaacaggaaagaagagaatcaaacggatagaagatggaccaggtttatgtaccctaataagattgcacttgttgtttcttttttctcttcttgtcgatcgaccacagcgggtctgtctgccaagggagaatgccaagcgagaatgcgaccaacgactcgtcaagataaaataacatttgccactgcgcctcttggctacattagttgcatgctgtactgtttcatgagcttaatttcagtatgtctatgtttctagatcggagatcagctttacaggtcagcatgccatggtctgagcgtgttagtgatatatacgaggcagagcagatagttactcgaacggatggctgatctggaggtgagcgagataactcgaaagccgaattgtcaatatgtatttgcataagctaccaaacgcctagtagagtttcgctgtcttttccccttgtctttcttgggagttcatagaccgaactgcgtagcgaaaaccacttttttgaatctaaatttgaatcttacctttcgacttaaccaagtgggcctcggcccgactcttatagcagacgtaggcgtgcggtgacgtcagtgcgcatcatggagatggcgcagcaagggcaagtgtcatcggcagccctcttccgccctggcgcacatagcgagcgaaaaagaggagacaagaaacccttcaaaaaagggcaaaggctcgttcggttttttcttcttcttctttcttctttccacacactcaatccatccgtttcttacagaccactcaatcaaaaaactacctgactcttaacctctcaacatgcctagcatcagtactcttctctgggactctcctcgaaacccctacctcgtcagtctataacccttgtctcttgccgtcatctcgatctgtactaatccaacccgctccatctcgcccgcttttgtttgttcttgttgccttatttcgaattcctctaggctgttggtattcccttgctcatcggtggagccacctcctacgccgtcaacggtactaagcccaacggcctgcgaaacaccggtacatccacctggtggtacaactccctcaaggctcccaagggagaggtctcgagcgaggctcacgcctacgcttggcccgccctttatgctgccgccggtttcggatcctacctgattgcccaggtttgtgtcttctctttcccttgtacatctcgccttatgacattgtatatgctgacctttttcggccccaaaagaacctcgatgtccccggagcttacggatctatcaaccctgccgcccgagccactgctatcgacgcccttaacttgtactggattgctatcggtcttaacactggtcggttccattcaattcaagtgctacttttgaatagacgttgtggctaattattgtttcccttattgctttttctctccatccagcctggtctcctctgttcttcggtctccgacagcctgcccttgccgccgttgatctccttgccttgtctggtgtcatcggagctttgaccgttaaggctcacagcttgcctaccatccacaacatccccacttcctgtacgtttcgttttctctaatctagctctgacggcatacatacacattggcttcttgaaactgaccgtttggcgactctgatcatcttttcaaaactagtgttctttgttccctacctctgctgggtctcctactccacttatcttagcgccggttactggtggaacaactacggacctggaaagcgaatctaaatgcctttcaaagtgaggataggatgattgagcggtgactggcgggtttgaaaccaagcgttttcgattgtttatcttctctgttccattagtctctctaatttgtagtcttctgtgcgccttgaacgtccatgtatctcttagcatctctttatgcacttgctcataagttcgcctggttgcatcaaagacggttgacgcaacatcacatcctgctcacccatcgaaccacagattcgtgtgctttggaatcgtagaaacggaacgattcggcgtaaaacaaacggcagacttagtttcgatagatttgacggtccatcagattaccattagatccattgtcgttttctctagcttcatgtgttgctcatgaacactcgaagagaaaggagacaaaagagaagaaaaagggatatgaagagacagcgggaatggaacgaggtggatagatgtactaaacgtaacaggagagacgagacgagaaagagataggcagaaggagaacggacgatgaagagtagaaacgtaaaagaaaaacgcttacagcgacgaaaagaagcaaacaaagggagtagaggaaggaacagactaaaggtgacatggctagagaaataagcggaaagaagaaagagaaagattatttgatattgacgagtctgaggtttccatccttcagttcaagacttgacttgatgtgtttcctcctttagaaaaagatgtacgtcattataaacacacccaagcaaagcgcggcgacaacctcaatcggtacgccctgcacgacctggggctgctgaacgtcgacggccgaacctccaatggatgaagtctccacacctcctcctcgcttcctaagaccagacacagcagtctgttccgaactctcaagcttcgccttgagagcttggatctccgcctgggccttttcgagagcggatgagccgatgtcaacggctttgtttgtcaaatcggccgcaccagctgacacggcggtggcagcattggaggcggtctgagcagcaacgttgacggccgcggtcgctggagctgggttcgaactcaggctggaaggagcagagaatgccgatgcggtcgtggccggaggaggtgtcgaaagaggcagcgatgggctgatcgttcggctagacccaccatacgccggaccaagatcatacccgaccgaggaggcgttagtcgtggtcttggcagtagcaggggaaggtgaaggcggaagattcgtggccgaatggtctaaaatggtagtatcagcctgatggaattcggatcgagctccatcgggtgaggtcgctccattgaccagaacgttaggctaggtttaagtatcgccagacgatagatcgaataagaaaactaactgccagggaggtcactatcatacgtgaagatgaatgaacgtaccgaaccgtcgatcaagacagattgatctccctcgtcaactgtggtgttagcaacatctccggtgctatcgacatacgcgcatcggatcttctgttcatgaatcttggacttggcttctttctcaatgtacgcccactgttgacaaagatcgacatgacggtaagagaagagttctacgagttttcgagagcgactcggtgatcggaacgtaaaaaagagcaacgttgatgaggaggcttacaatttcgggcaaggataggatctccttctcctgggggatagcagccgactgcacgagaaatttatctcggcatttaacaccctgtgggggctcaaccttcatgggctgaagaaggactgaaaaaagtttaggaggtaatggagaagacgaagagagagaaggaagagaacatcagtaagatgatgtttgtacgaaaacacagagccaaggtatctttccggcaggtagaatactgggcaaacgaaataacgacgatgaacaagcttaccagacacctcaatcctttctccaggctcgattcgtccagaattaggtcggacgcagtactaatcaaacggattgacaaagagatccaaggttagacgaaagaatcccaggaacactctcccatccccctttatttcttcattgtgcgttctttgtcagacgaccaaggaactggattatgctgttccttcttcatcgaatacatccagccttccaagttagctggttgccttcgtgacttcctcaagacgagatcacggcccatgggcgagacatggaccgacgaagaggagtgccagggaaacaaaagaatggagagcttctgaagattctgatgacgaaatgaacggacctgtttaggggcggtagtcttgactttgaaggcaacaggctcggcattgttgttgacaactagcaatgtcctcttcaccagctgggtaaggggtcctgattcatgcagatatataaaggaaggtccagaagaatggagaaaaatacaagggagcagggatggacaaggtagaagaacacgttagcgaccaccgagcagaggagatgggaagggacgtcatcgagcgacagggtggcaaggctttgagaaaaaaaggaccggacgaacgctcaaagacaagctgctgagaaggctggagatctacgctcatagttcgtaagaaagggaggagaagggagaaagagagatggtaaaggagatagctgaagaacggagagaagcaggaaagagtggataggatggaagacgatggagcgaagggacgtcgtaaggagagaagacgaggggttggtgaaaaaagaaaagcaatacagggagtgtcagacggactagagaatttgttgtagtctctgattagaagaagggactagtcagttattaggaaacggacgtaatgaaaaatgtggagaccattaggaaagataacacaaaagaggatgagctcatcacagctgcttacctaatgagattactaatctcaatcctcatctacatctcgctctcgatgataatgaatccttttgtcttgtcttgtcctgtcccatccatcctctgcgtcacttggtctcctctgtttcttcctgttgtcctttaagcctacgcagatgtgaagagaaggaggagcgctacagaaggaacctagatatgaccctctttagctcaacagagctcaatgcgtttgattccttcctcaccgatctcgtggccaccgatcagtccgttttgcatccatccccttcgttgtcaggtaccactccttgttcaaccactaccgccaccactgccgccgtcagcaacgacagttccgatgcgcctccagaccaatatatgttctcctcaccaaatacgtcgatctgggccgaccgacaatatccttggacttatcgggctagatctcacctcgcggatcggccgagcttgatggagaaatcaaaggtctgtcttaccaaaagatcactttatctgccagagacttgattcaagtcccaacttctcactcgtcttaaaatccctgtcttgctcacttgtcataatggtgatgattttcgcctcttgtctgtctcgtttgccttccttgtaccaagtctccctcaatcccatacgatacctttcgatcgtacacttcctcggactttgactgcgcgccgcatctgcctgaatacgctcacattatggatgttacccggtggacgatagatgcaggaacggatcagctttcggcaaggttagaaaccaaggagacggaaagattagaggctaacttggtcagtctgtttaccggttatggttgcgagctcggaagaacgttgcaagcttattttccattccgcccatctctgataccaccaacttaactcaatcaatagaccaacctttcgactcctgctgcctatctagttccgtcctctccgccagtcccaccgcctcctccggtcgaaccgtatatcgactctgccttatcttcatcatcccaaccgacatctgcgcatatacccgcctatgcattccccctcgtaggtcggcaggattccccctcgcgcgattcacctcgccaccaacaactctcagggattccgattgggcacttgaacgacactcattcttcaaaaccgatacccgcccaacctaaccttgagccttctcacgtgtcatcctactcctcctcatcctcgtccttatcctcatcttcttcttcaggcccatcatccaatcgtcagacaccttgtctggggataacaaacaaacttgaagacatggtcgggcgccggcagagtccggcctacccaggacttctgacggccactcagaagagggcaaaccatatacactccgagaagaagcgaagggagacgatcaagaaacgaacggaagcgctctgcgggatcgtgcctggtttaagagcgttatgtttcatcaaagaagaacaggaagaagaagcggctggagcagcagcggcagcgatggtgcaggaaagtctcagagacgatgataatcaaacgacgggcaagaaaagaaagaagaaccaaaagatggttggacggagaggtaggcggtcggaggaagacagagaacggctgagtttcaagatcggaggcccaaagagtgaaaagataattctcatcaagagtaggtctctttacctatagtttttggtgtggagagtgtttgatccgggtctaactttttttcttccagcgatcgaacatctaaggacactccaagccaatcgacgagggctactcacccggttaaatcacctacgccaacaaggtctctcccgtacgtctctttgtattgtgtcttcacccctatcgatatactgtcgcatgctcatatactctggagactctctcacatctattttgtattgtcatcaggtggtctgccgacggatgtactaggaacagatcgttcatcagaatgggactttccttggaagatggccgagcgggaagatagagaggacgtattagaagaagcggcctaacggggtggaggatttgggctcagaaacgagaaaggaaatgtggtctgggcggtcaagatgacgtatatatgtgattcattcttcatttaatctttctctccttttcctcgtagagttctttgtttcatttaggttatatcctgctctatacaaatatatttctctcgctgtcgttctctcgtttgcctcgttttcccaatctgtctattcttcgtcgtaccatatgcatatgtatcgttgttactaaagacaaaggtcgagggaaagaagagaggatatagaaggagaataaagagtgaagaaagaaggaaagaaatctgaggacttgggaggcgaagacaaccttgccaggtcctcgtatcaccgaaacgccaggcactccaaggcgagaaaaggattgtacacgaggcaccattctggttttcagtttgtgattccgtttcatttaaaacacagtttgtattctattctcaactaatgagcaccaaggggtatccgttacatctacagtacgaagtctgagtttcatttcacatcttcccccctccaggtttcttattcaacagggtttgagcgactcgccggttttctatcgaacattcctgtcgttaccacgatacaatcaagtttacgatgaataaaattgacatcaagaaccacacttcagcacagatccaaagagccagaaggaggcaagaaggcgcaaatgaacggacctttgaacgattgattgaacttcacatcttgcgctttctcggatgcttgaatttgagtgataagttggttgaccgacggatctttgaattgaaacaggatgaatcagttttatttcccgataaagaaagcgagagagaaaagaagggacagggccaaacctgatttatcgagggtttccaagaggtttcttgctttgacgatgcttcctgatgatttgagcgcgctcgctttccggaacgaagcctttgcattgtctggatttttcttcagtgcctgttcgtggtgatattcagtggaaaaaaaaggaacagcacccagatgagccgatgtcaggagaggcggcaagacgtcgagagaaagaagaaatcaacagacatcatcagcacaggcgatcgctcgaatccagttctctcttttcaggtgaacggcagccatatttgagtatacgactgagagctcaaggttggcctaatttggacacaattctcagtacagcacatcagactaagactcaaaatgatcagcgtagagccacagtggaggacagacctgatgaacaagctgcttgatctcttgctcgtcaactccagagtttccgttctgagcctgagcctgggtgataaccgaccggtccagcccattcagattcaggacggcctgaaatgagatgtagaacaagttaaatctaggtttgatcgatcatggcgatatctgcaatatagaaagggagggaaaacggacaaggtgataagatttgagagctattgataggagcgcagagatcgggcttgtcaggtttcttttctttacttttgtagccgagacggatcatgtccatgagcaaggaagaatacttacctatcgggaagtctttctgttgtgcagagccaagatgaagagagttccgggaattatattctatgagtcttttgtcgtccacgtatatgagagagaacaggagaacagatcatggagactgacgttttggaaagcctcattgccttgaagcttatactctatcccggtctgtgtcttttctctggagaatgtcgacaaaaaaaataagattgtgatgagtttatggatgtccaaaatgataggaaagaagtgagagagaaagagagagaaagaaagacggtcgcacagaacctccttctttgtggtcatgatagttcgaatgcaagtatgtgtcagtgtattgagttgacgaacaggaggtaatgtatagatgggaaggaccggaaacagagaggcaagcgtgatgcacgtgatgtcgaccgggatgagcgagctgtgccaagtcaagtttcggcccgggatgagccgaacatcaacgtcatcgtccaaggaggaaacgaacgagagagctagcaggagggacgcacattcggacctgaattcgtccacccaggctcaggcacacatccaggcacaggtaaagacacagacacgggcacgagctcaggcacgcgtacctccagatcttgagaaagattcgatcgacgttcttcctgcaacattcagatgatccccttcttatcattgccaccgctagcgctcttggctcatctgcccttacctctccttcggcattcgcgctcttacaggaatcacagcgaactttgtttcgttccctccatatacttctagtctcgcagtcactctaaatacatacacatactcacccgtgctgatcacatacatgacgacaggggataacacgaatgtacgtagatctctcggagcaggaaatactatttaaaagaaaagatggaaagacagacagagaaaaccccatcgtccatttctcatctcattcgtcacctcgtacaataacgtctccgtttatgatgcctgctaacccactgttgctacatccaaatggttcccctgcggattctcatccgtcatctcgctctcggacgcctctccctcagctgtaagtctaaaaatctctgtaacatacagagggaacgttgttcggtagtgaaactcacaaagagcccaaactcccacgttttcgtccgtcttttctctgcggctctctctgcgatctatatgtgacacagaaacttaaagactcgaaggtctccaaagtcgttctccgacgttttcattggtattcatttggaagtaaaccgatcaaaagatactggcaaagatgaaatcgtttggaacatctccgtctctgatggcttcggtatcactgggtaaaatatcgtcgtcattttattcctgtattcttctgaatctcactagttttggttctcgtcttcgacctctactcatgtttatcctggcctacgatccttaatggaatctaccttcgtatcgacacaattttttatcaataatctctagctcggaaaacggaaaaagagaggaccttgatctttctcctggtaggaacggagtcgagatcgccgtcaaaagtttggtcagccgactgcgagcgtttgagaaaagccaaggctacaaggtgagactctccttcaatatcgccacctatcatcatctcggctgacatttgctctcgttcggtttcccatgacgtttcacgttgtctggccgtcctgaagattcaattcgttgccttggccgctcctctgcccgcctgttttgccgaacaagagcctctcttcttgccatcgatttggcaaaaactcgacgtatgtttcctgcttgaaaaacaccctttggtttttgttgtaccgctcttcaggtccatcagtgcatatgttctcttaccactctcctgtctctacataggccatcccattcttgatccctatgccttctgccatgaccggacagacgacgaataataacaccgccccaaactcaccgctctcgcccactttgtctttctttcctcccagacataatgctcgcaagaaaggcgagaagaagcatatcgacttgtccttcctcccggcctactcaaagcaacgccgggccagaggggagaactttgcccagcgcgccgtggcagaggccatcaagacactttcaccttctgtccgaagcgctacctcggccacgaacgcggatgagatggataacgaggtcgaagtcgatcgagacggcgagattcagctcgctggaatcaacgattatgcggcaaccacgtcggaagaggtatgtcagctagatacatattctcttggttccgcgctcaacagactgtttatcaaattcaatttctatatccatagctctggataactttcaatgctgtcagtgtttctctttgtctcgtttatcaagcgcatgtctttatcttacaaacccaactcgccatcacatcaaatttggtggacaaaacagctttccaatcaccttcgagggcacaacatcaagatcgccttcttttctgccactcctcagggtgcgtcttgacctgcatagtattcctagacctcctcttgagcgtacgtgccgaatgaactcttcatatgattctctcttaggcggaggcgtcgctctcatgcgacatgctctgatccgattgtggagactggttggcctctccgtccattggtatactcctgaaggttcggtttgttcttctttattggacatcgcgatttatcagcctttctcgcgctgatctctatacttgcaaacttttaggtcatcctgccgtatttgatatcactaagcgaaagtttcacaacatccttcagggtgtcaacaagccgggtacaaagcttaaggaagaggataagacgctgtttgagatgtggacggatagtacgtaatattcatattttcatttaaatactgtcaaggatcccgcattggctcaatcttatactgttttgatcaatagacaacgtggacaccttctggtcagagggtgcaatcgatgataaatccatcatcgtcatcgacgaccctcagtgtacgtctctagcagcatgtcttgattctttaatggaaactctcagaaaccgactagactgcctgattcttctctctaatcctatccagtggtagccctcatcccaaccatcaagcagcgaaaccctaatgccaagataatctatcgatcccatatccagattgacaccagcttggtgaatgatccgagcaagggcgaaggcgcgcacgcggacgtctggaactatttgttccaattcatcgagcaggcagacgtattccttgctgttagtgaatttttcttttatcgtcgttctttcaatttacaatcagctatctgatttgaagaaactttggacaatagcaccccgtgaaagcttttgtgcctcagaatgtgctggatagcaagatgccagtgttgtacatggcaccctcgaccgatcctttggacggactgaacaagagtattggtgaagccgacatggtctactaccagcactacttcggccgactctccgagcagcaatgtggcgtcagcatcgactgggtcagaccatacgttgttcaagttgcccggttcgatccttctaaaggtaaactatcggtgtctctagtctcatcctgcgcatgtctgcttggattttcattcctatgcgtatatttgatatcatctaggaatccctgaccttctcgagggttaccggctattcagacggaaacttaacaaggcagctctatcaccagccgagcaggacactccgatgctcatcatttgtggacatggtagcgtcgacgatccagacggtgagattatctttgaagagattcacgagacactttcttctaaggagtatcagttcatcaaggacgacgtctctgtcgtaagagtccgtgagttctgagtttcttcagcattgactctttgaagacttgttacattactgacggatcggcgaatgcaaacattcactccctaatagctccttgtgatcgaacgttgggagcgatcttacaaggtgcatggtgcgcaacccaggtttgtatcttctcaacctttcttcttccttgtaccggtcattcttaccattaaactcatccataaccctgaatattttaccgttagctttctactaaggagggatttgaggtcaaagtcaccgaggcgatccacaagcgtgtgccaatcatcgcttccaaagctggaggtattcctcttcaggttaaagatggcgtgaacggatggcttgttgatccaggagattccgaagctgtgtatgtaattccacgtgtgtctctattcgttctaggtttctgatctatcgatcttgatgtggtttttgccaaatgtgatatcatgaaatagctcggaacgactgcttgagctataccgagcaaagagatgtccattgacaagcattgccttgctcgaacaagatggagagaccccaaattcgatggctgataaaaccgtgtcggactatttagccaggcagccaaaaatcagcccgaccggtatcaaggatatcggaacaagcgaagacttctggagcgttggtaatgcctccaaggtccgtcttccagtttagatttcctttcatctttttttggcttccttctttcttcccgacccttcttaggagaaataacgacggctctaacaagtcacttttgaaacaaactccagtggatgctcttgtggtcccgactagccgggctcgaagttgagaacgaagccgacaggaacgttctgggaaggatgcttcctgagaacggcgccgctcgatctgatatctggaaggatatggaaggtagggatgtgtgggagatgatctctggaaagaaggatgatacgttgatcatcggttgaatacaaatgacttgtgtgaagtcacgtttgttgtgtatgtgtgtctttgtgtcttgtcttatcttttcttgtccccctcctctttcccttctgcttgttgtacaaacatctctttttttattcttgtctattgtaatttatcatcgcgtgcttgtagctgctagatctgtgcaagcagatagatcttttcagtgtatctgtttgtgttagtttctatcaatgtgattgtctgcagaaccgcttatactgagggacgagaacacttggatggaagttgatagccttctcggttattaaccattgccgaacagcaaacgacccgaaggaccttcgctctcatccgttctctttttctgttccattctttcccatccatccatctccacactgttcgacagctgcattcaagccttgaagcacgatgtgtccttccacacggacaccctcccttcggttcctgtataaccatgccgctcacttgtttctccatcgaaacccaacggtttcactctccctcctggatcagctgtttgatcgtttgccagctccgtctcaaccgtggttcgttggccctcttcttagggaacgagagaaagatatcgagggacttcgaaggaaatcgctagttctttggattagctgtttagtctgccagtttggagatctatacagagaacaatcaacggaaacgagcgagagcataggaaagagcacgagcaagccgatagatgagagagcgagagatacggaggggttggcattatttggacagataaggaaacgctgtctggacatctatcagcctagtccatcatcttcagcatcaatatcactatcaagaccatcaccgacaaagaacggtcatgcctccctagtgagctcgtcgagccatcaaaacggacctcaactaaactcgatgatgacgataaacacgactatagacacaccgttcgctcttccaccatcaatcatccatccccttctcctgagcgcccaaacactttaccttgacccatcagttctcttacaaacactcatcgaaccgtttcttcagactatcccgctcgcgctgacaaacaccctggcggcgctctccagatcgagagcgtcggcagaaggaatgcgtgcgagaagtctaggtgaagaaggttgggtaggcgacgtattggagggatatcaggatgtcatgtccgcttgggcgaggtgtttgggaggtgagagaggaaaggcagtcgttagggaggacagaatcctcggaaaagaattcaaagaggttggttcacgacttctcgttgggttgtcatcgttcgcatcgatgtgcccgctttctcttatcaaatcgcttgcgctgaatctcactcgttcttttcttctttgctcctcatctctgatcagcaaatcattgaatctttgaaccctccttcccctctccctagccctgttctgtctagattgccctccttcgaccgtacttcatccatcgacagagcatcctcacctacaccgagtgactcgtcagcttcatccataacgagcgttcaaacgacgacaccaacgtcgtatagacttcaacgtcaacatactactaaccgagataaggaatctggcaatgaagctggcaagggaaagggaaagggcagagcgaaagcagggacggtcaaaagccgttggaacggtttggactctggggtcgaaggtctaagcggggatgaatcttacgaagaagaacaaaatcttgagaaggttcacctttcaaccgcacagaaaattccattctcctctacatcttcatcggcaacaaaccctatcacggataagctcgcacatgaagaaagccgacaagatgaaggtcgaacatcttacacgtcaacctctttcggttccaaacttgttcttcttcagaagtttcttcagcctcggtcttcctcttctcctttgccagagacactacctgcctcaccgatgagacactcgctctcgaaacaatcgtcaaccgacctaatgaatccgaatagttaccttttgatctttcttcgagctatcaaatcttccttcaaagcaggtctttttctctggatcatctggcacatcatctatcgagttcgagccggttggttcagaccatcaagtgttccttcgatgacctctgcaggcggaggtgtagtcagcggggttggaagagcggaggaaatcaggcggaggttgaggagaggaatcttagctaggttctgatcagacggagttgggttccatcatccacgtttatatgatctttcttgtgttgactatgctttctttccggggttctcctttcttgtacattattttgttcatactcgggtttatattacaggtttagtgaaagcgttgcgatgttgtgtttccgttttcttctctcttcctcgaaaccgggaaagacgtgtccttagtcagcctcggcatgatggaaacaagttcatcgatcgtccatccggctcccgatagaatcgaaagagaagggaacacacaaaatcataaaaacaaaaagataacgggcggaagatattccggccaagcagaaacagatacaaacaagacgatgggttgaaaagggttgaaacaaattttgatatcagaagaaaaaaaaacatagacgaagacaaggtatttcgtgcgccaagaagcgcacaaagaaaagaaaaaagagatagcgggagtaaacgaggaaaaggtctgactcagaaagagcatccagcgttcaagccgacgccccatcggcacgaagaggtttcgaaattaatcgttcgatctgcttcgagacctcatcgttcgtacttctgattgtcactcgacaaagcttagcttccttgttaggctccaacctcaacagacaaccgactttaccagctgtggacatatgtaatactccagcagcgaccgagttgactgggtttggatcaatctgttcgagcacaccgagcttgttcccggtaatcaccttgttgttccttgccacgtccggctgtcccgaagcgtcgagcttgatcgggaagatagcctggcactccctcggaggtcctccgatcaacttccacctctcaaagaagtcagcctgtccgagtttgacaggctcgataaacttagtgaccgcgaccggcaacctaagcaccaaagtttgaagacttcccgccagatagccaacccggatggtcggtggttgagtgaataactctttgcattcaaccgagatctgctgctggacctgggtgagtggctcgatcgtcttggtcggattttgggcgagcgttgcaactagcttgccaggttctctagattcaatagcgatcgagaacgagccgagtgggactgagagtttgttcccaaagtagagctgaacccggccgaggtgaccgtgatactcagacttcagacctatctgaatctgagcgtcctcatagagcacaccctcagctgaatacgataaccgatcaaaccatttgtcgatgttggcaccatgggtaagcggagcggatgactgaggctgactgaagaaagatgaggtagtcaaaggtgaggtaggacctaggttggatggagtcgacggagcaaggagaggagcttcctgagcagagttcgatgtaagatctaacccagccaaagaatccatgatgttttcaggaatgtaggatgaggaaccaagacccatcacaggttccggtggtgacattggagtagagttcgagcgcatcattccgttagagtatgaagaagaaagtcctgaagaagtagtagtaggaccgggggcagccgcagaagaaacgggagtcgctgtagtcacagccgtaggcacctgtccatctccggttcccttcctgaagttcttgaacctcgctgcctctcgttctttgttctctccctttccaccaattacccacgttcgcttgtcgcctgtatcttttcccttcttgtgcaatcggctgatcagtgcgctctctctcgaagggaacggaggcatttcctcaaagactgcctgtagtagttcatcatcgtcacctttggtgaccaaagcgaggtattcacatgcccgctgctgaagctctgcgtcgagaacgtgtcggtatcgatccaggatgacgaccagctggtccttgatctctggaaacaagtttgcccacttgacatatgtcgacagaagcagcgctctcgtttgagccgagcagaagttgatttttgagtgaagcgcctggaactgttcaatcgggctgcttccctcgtcgtttgcgataaggtggccaaattctcctagaatgtacgcagcgggtttgacgagcttttcgtgtacactcggggcttgtaagtagtggaaggctactcgagaagcgtatggctaagataacgatttgaagaaaagaaatggacacgtttggacaaggggtttagacaaagacgatctaatgatagtagatggatattagcaacgaacctgaaggtcttcagtgttggtcacaatttgaacgactcgataccaaacctcatcggctacatggtctccagccaagctaatcaatttgagaactgacaaatcatcacaaaaaagagactaaacgttaatcccacacgtatatacttcgccaaatcgaactagcttactcttgacgatgagtgtaagaaaagaaaggaaaaggtgatgaacttacttgtatcaacataccactcgtactctgtagcaaacttctccgtcagaatagcaattttcagcaccagttcttctctgagcccataatccgcgatctgaagatatttcagtaattcttccacgataacgctcgcatttgacgtatcacacattgagtagaggagatccagagctcgtctgcgcacactaatatctctgtctctcaaactgaggataatcgttccttgatgcttcttgatcggttcgagagagtctgaacacgcggctagatgagccatcgcgtctagaccaaggtaccggacgttggtctctttggagagaatgaatctgctaagaaggacagcagctgtgctgacaacggtcgactcgggattcaaatggatcgcaagattgatggcctcaaacaagatcgcattctgggtgttgttatgctgaacgttttttggtacttccttcgagttttccatgatggccttgaggatggcatcgatcgcatttagtgtgcttggttcctctgttgaatgtcgggttaagataggcatgagaatcaactaagcggcatacttttgtattgatgagaatcacaagattacaaacctgtaggagggtaatgttgtaggagtcgaaggagcttaatttgaagccatggtatcgggactcgataatagtagtaatcagacggatggttgccatcaaagacaagctagtatgccgaagagagtggaagctagttagagcgcgaggcaaaatccacgaaacagtttccgaacatcaggatacgacatacggagtagagtcggccgaccgctcgattatagcatgattcaaactgatcaagattatcttgagccatcgtagtcaccaaacttgtcaccgccaaagctactccctgaatgtatcaagtacaacgtgacaagacaacggtttgtttggtatgagttgcttatgtctatgcatacatcatgacaatacaagaagtagctacacgtacaagattatcgtcatccataatggaaacaattcgttcggcccagtctcctgtagggatcacgtccgggtgttttctgtacagcctcagaagcgtgagcgcggctttcttctttacgaaaggaatcgaaactctggttttgtgtgtttttgtgtggagtaacagaagaaaccgcgtgggtgagacaataggcgacgacctataaacgaaggatagcggaaatgataggaaaccactcacggtgaaatgagcagtcgatggacatcaggtgacaatgcctcggccatttccttgcctccgatgttggtaatagcgtgtagagcaaggcaattgttgatctcgttttgatcatccagatcctttcggatcgagttgatgacaagtcgaactaattccgaattctcgtgcatcaacagcgtcagagctagatagccctgatgaagggttgggttaaacaggtcgacgaacgagacaccaaaccgtcagccattcggaaacggtatagaacgagcacgagtgagccctccgtcggagagaaggggagatagaggagcgcgtacgatttgtttctcgctgtatttaagactggatatcaagttgacggcttccatatgaccgacgtcaaccttgtagccgaggatataagtgaagaccactttggaaagatatttttttcgctggtatccatcgagattcccctctgtttaatgtgatgaaacggttgaaaagaagatcatagcctcgtcagccttgttgatgaagggacgaaagaaacacagtgtgttcccatctcctctcactcttaataaaaggcttgttgacggaaaggagttacctttgaacttttgacggatgtgagccatctctctgttgattctcttctcttcgagttctctgactcgacatgctcgaatatcagagatatactacgttgcacacagagaagaagccgatggaaagaaaggcagaaggacatgaaacggtaagaacgcagacacgcacgatccggatacaagccggtcctctgtacgatccttcatctagcctataaacatgtccaagagacgatggcgacgatgaaagacgacaccaaacacacgaatggatacggacctgctgaagacctctcatattggatgccatgtcggaagagagagctgatgaaaggacaagcccggttcgatggtagatgggatcagatctagatggaggacagaggaaggacagatgagagatcaaagagacgatcacgtaagaaaaagtaatagggattttttcgagaagtactagaaatttttgtaatactcactataaagagttatctctatcacctcctaaacatgaacaaccacatcctcctcgaacatttgatcgtgccgaaggatgccagatgtccgttcttgcttccttcttctgaaatcactgaccgactgaccaaggatgtttgctgatggatgtttgatctcggctgaccgttgggcggtggacagtcaccttcatctagcttctcagacggtcttgtccgctaatcagacattcagctccgaggtaagtaggtgggcgagataacccaccatcctttccgatatcgcctctgcaagcgcaagagatgaagaaaagagcaagagagtttgatcaccagcaattgttgattgattgaagatcatatttcatactcaagcgatcgttcgatcaagtaagtagaaacatttctttctagttgaacggtcggtctcctatgatatctgtcgtaattgaccattcaatcgcttcccaactgatccactagctcatatcatgtccagatcctcgtcagattctgctaccactctggttgtatctagtactccagacacggtccctggctcttccgtttcctcaacatcctcaacacctcgtatgcccagacgttcccaaacacctccaccgtctcctccgtctccttctttcccctcgttcgtctcttccgctcggtcgatacatcattcagatgcctatccatttatgctcgatcgtgaagcagtcgagcggagacgacttcgaaaagtgaaaaaattggaggaaaagttggcctgggaggaatcatgtcggaaagaacgagaggcccgaaatcggagagaggtcgaggaatgggagcgtaaacagcaggagatcaaggcagcagcagccgttactgctgttgctactactattactactatctccatcgaagctcctcctatcactcctactcctgatccccctgatgttcctgctgatgaggccatacttactcctgtggtagctatcgaatctcctggtcctgaacctactcctatacaagtccaaactgctccatccatccctccgtcaccgctgattctaccaaagagcggctcatctgaacccgttgtgaacgtcaatagaaggatcgagatcgagatcctcgatagtgatagcgatagtgatgacgagattcagataatcgagtcctgccccaagccggtcgtttcttcccgtgcgagcttacccaacacccgacttctccctattgtcggcccgtctatctcctcctcctcctcctcctcctccaccaccatcttctcatccagtcacccacccgcccttagcaaaacctctgttccgatcagtcgccggtcgaataaagcattgttcatacctccggtcaagaagatcatcaagacaccaacggtgaaaccgaagctcccatctttgccgaaaagcatgcgcgctcatctgaatggtgatccggcagaagaaagaaagaaactcgaagaccagttcgagtgggagaagactgtaatgaatagaagaagaaagaatagggctggagaacggaatcgatacgcagaagagaacgagagagtaaaagggaaagggagaagttaggaagaatcaactgattcaggtttcttctcttgggatagagacgatcaagtacaggccgtctccgtgtctcttctctcccctcccccctttttcttcctcttacaaaaagaatctcaaagcaataaagagacggaacaccagcgggtcagatgtcagagtccttcctatcaacaaggatgagactactaaacccggtcagacttgaagaaacgatcctcttcccttcgaaggccggagagatcagaacgccggaccacgcaacccactcgctgacaaggatgatgtctttcccggcctaaagttctcctcacttagcatccgttcatctcgggggagacggccgaacttggctgattacttgggcagggtgtgccaatataaatatctacatgactgcgtgaatcagaggcgacaacatcaatacaagtcgaggtcgatcagatacagatcgtcagaccaaagaagaaagcagaaggagacaaggaaaagcaaagtggtttgtcagggatcgagataacggaaggataaagaagcctctccttcagttacgatagagatctatgacacaacaagaaaccggtgatgtaaaacgtagaagaagtgaatgaaagctgaagacagaacagagttgaccttcttttcttctagcgagatagagagaagagatgagcacgagagagcagaaatgggaatctttgatcgtcgtacataagatgaaacagaacgactagtatcaacatcttcctcctcttcgttcttctttactctttttcatttgtttgattggcattcttgaataacgttcttgatgagtgagtcactcgtacagatggagggggttagaaagcatggatgatgcgggtggtgaagaaacaaaatcaaaaggaaggggaaaaaacagaagggacaagacaggcacaacgagaggagaaggaaagtgggtatatgatgaggatcgtagtagtaataggaggagaggagaatgcagacaggataaagaaagtgtatgtgttgaagggtgggacgcgtctcgacacttcatgatggaagcgtttgagactatatccaggtatataacaaatggcaagacagagggaaagaaagtagaaagacggagtcgaccttgatcacagacagatcaagctcaaccgggtatgcccagaagtagcagagaggaaagaagaagaaacggtgggagagaacaggaagggaaacgaaggctcatcacgagatttggttcaaagaccattccctcgcgaaaatcgaagccttgaggtacttcttgtgggcgtactttttggagacgtactgcccgtcaaagtctgctgctgccatgttctcaaccagatagtttgcgccttgttctagctgagcttcggtgaagttggagtaatacacaaaggcttcgttccacttcttgttcaacatcttgttggcgaggtacatgcctatggcggcaatcatggaaggcttcgccctcaagaaccggtagtcgagcaaagtaacttcgatgaggaacttggagagcgttctggtctgaatgtcgtaatcgtcagccttgctgattcttcggacccaactatacggcgagcagtacgaggagatgttgaagttgagggtctgcaggatgattcgttctcctttgaggatctcttcccgagagtagccgttctcagtcatgtacacaaactcgtccacactgggagcgaggatttcctcgtacttggcagcaatgaacatggcggtcactcccacaagctgaagcttcaccaaagagacgactcggacagataggaatcggtcgatgatgttgactgcaatccataatgtctctggaagcatgtggtaccgtaggtggacttggagaagccagtcgatcaaggttgttcgcatcgacctgggtaaacatgagatgtgatgagcgacgggtgggtctattgatgggagagcgaacatgacaatgctctttcacttaccattcaatctcggtctggaactccatgtatcgggggttgggcatcgtcttgagctggagttatgaaaagcagatgagaggagaatcatgaggaagacagaagaaggactacgcgtcagatcaagccgacagataaagacgttgaattacgaaaacaaagggggcgctgacctcaagttcctccatgtatgcaaagatgtcgtcggcgtactcagccaccatggtggtatcaaagacgtcgacttcatctgagaattcttgtcgaagctgctcgatctctaacctagcctgctcatcctttgcctcgtccgcccgaacccaatcgtcctcatcaaccacatcctgctcttcatctgtatactcgttggcctcactgtcgctctcactcttgatcaccgcagcctgggcgagctcgttgaagttcttagcagccgcacttcgtcgatcagcgacgacatcaacctcgttgtcgtccaaagcttcttcgaatgacccgctggcctcgacatcttcgatcgggactgagtcgactttgatgattggttttgagagggcgacagatgcgggagcagcattggatgatggacgagtggcgagggaagatcggctagagttggtagactcggcgataccggtcgaagagttggtctttgggagagcaggtcgagcagagcgagagacgattcctgacgaagcggattggctggcgaccatcgatcgggtggtccgttgagtcgtcggcttggaaccctccttctctttgcttgatttatggccagagacatcctatgggtgagaaggttgagagatatgttaataaaagacggatcttgctgatgctcgtgattggtttaagccggtatgatcgcccagtagatggtaggtgatgttgtgatagatgacgagcgagcaagaggtgagatttgctaaataaatagaaagagaagacaaaccttttctttattgctcacgtctccgaaagcagatcgcttgacgccggccaccggcttgactcctccagccaagacggatgaaggtttagctcgagcggtagcgcccggtgccaatgccgcagaagttgctgatggcttcctgctgtgagcggctgtcgaggtagggacggttgcgttttcatcctttactcggacggcagcagttcgtcgggttgttggggcctatagagagagagagagaggagtagaaagaacggaaggaaggaaggaaggaaagaaagagataagaggaattgtcagattcttgaggaaaaacaagaaaaacacagtgtgttgtcgagccttcagatggacggatggattaaactggaaggaaacgtttggactgactcgttgcatactggaggaaaagaaaaagaacaatggtatggtaagtgatgagtagactacggaggaggattgtatgtgtacgaagatctaaaagacgagcttgagagagaaagagtgggaacaaagttcgttgttgatgggtcttgtaacggaaaggaggcgggaaaagattataaggacagacaaaggaaaatctgaaaagagtgactgaggagacaaaagagaacagagaaaagacaggaataaaattaacagcgatgaacgagcaacgataggaaaaacgttcccggcacaacaacgaagaaggtaggaggtaactgtgtgagaagaggaagagacgacacgagagaacgaacgaaacgaaggaatcgtcgtggatgaaggatggggaaagacgagggaaagggaaacaacgatgggttttctaggctgggtggatcttggttacggatgtggttacgatcgcttgccttgtctttttcttttggttacagaatccaaaagtcaaaacaaaaacaggcgcgtccgggggttggatggttatgtttgtatacgtcatcgtagccatgttgtcagtcgtgtaacctcctgcgcgtaatcatctacaaaccctaacggtcgggaggactcgtttggtttcgtggccgtcgcgtggcttgacacgtcgttgtgccatctcgggaggacaggccgtaaagacacgcgactttggatcagactttacattattagacatctaggttcttcagggctatacaaagttatttggtatgggactagaatataaggaaggaaggaaggaaggaaggaaggaaggaaggaaggatagaaaatagagcaaccaaaatcttgttacatatacatcgctcagagaggcccagaagtagcagccgcctctcctttggcaacagcattctgttccaattccgcacgcgcaccatcctcatcttcgtagcccccagagagactgactccgatctctttgatcgcgaaccaggcgggtatcgtcgagagcccccacacagcaatgtcgataccgagcggaatggtgtggggtaaagtctttcgagcagtaatgccgtatccaacggccgaaccagccgattcaagcgatcgtaggatagaagacaagcgaccgatatcggactgatctttagacgagatagcagcgatgtaaaagtacaacacgttttgtgacacactgagcaaaagattgatgccacccagagggggaaagggaaaagaaaaagaaaaagaaaaatcagtgttcggctcaatgcttgggactacacacatacacacagagaacagacacacacctcgtgttgagagcatagagaagatagagacagtacgctttggcaaatccggcgtttccaaagtcaagagaaggagccttggctctcttactgaactggacctggatggccactccccagacccaggagacgagcatcatgattgcgacgacgaggaaagaaacccgcgcccgagtggcaagagtgaatctctgtcaacagaagacgggagcagagagtcagaaaatgagaaacatctcgactctgcgctcgagacaaagagagagcgaaacatactcgagaatcaaggaagataccaaacataaagttgacagagatgccgaggatggcgctgaggagggacgcgagggctcttttgtggagaatatcacagattggttggcacaacacataacggaaaccaggggatgatacacagcagaacagacttaccttgctcgcacagtaaaatagagagataagaacgtggtttgatagggacccatgagagacgagtagaatgcaaagccagacctaaatgatgtgcctgtagtaagtatacgtcgtgaagaacactgagaccaatccgaaactgatatcatcctacttacagcaaaagaacctcttttcggaggaaagttcttcctaccgtcttcatctctttcacgaaaccatccttgcttgttccaacgacgacagccgtaccgtcttccctctggaccttgtggggctcggacagaagcaatgccacgaacggcgagagacactcgagcgcgatgaacaccaagtacgtgttggaggacactgagccggcgactttagtcttgatgttgagggcggtgttgatgattcctccgagaagctgacctccagactttaaggccaaccagacagccaaatagatccctcgctttcgagcctcggggtagccaagaatgatcgttccctctatggaccagaagataccagcagagataccgcaggtcgtagctccaaacagaaccaaccaaacgacaccatggactttgttgaggtagagaccggcggcatctagagaccagttcgatgtaagagcttgtgaggtgagtacatgtatcactgtagaggcagcgaaaggttagctcggacgtacagggagcgaaaccggagcacccaaaggccagactccacttgagaccgatcttgttcgataatgtggctggttgatcgatagaatggttcgacagatcaacccatgaatcatccagtctctaaattcagaaattacgacaacttacatcccatagcgcagaagaaaaccatgaggccgaacaccaaagcattggctgcgtttaccaagtaaggtgattgcgctcctccagcaccggtcgcagacatggcattccaagtcccaggcgacagaaacgaacaaatgccgacgacagctgcctatagtgatcgtcagacaattcagcctaggacaatataaagcatgaaggcacacccatcgaaactcacttgaaagattgttcctctgaaccaccaggtcttgatgggcgcggaccccgcgctctcggcaatagatacttcgctagaatcaggatcagaaccgggaaactttttctcatcgaccagctcatccgacagtcgggtggaggaagtactggacatggctcagaaaggataaaacactgagaaagctatcaaatgagagggatgaaacatcagggaaggttaaatactttataaactatcgtgcgaggaaagtctatcaccgagtccttgagatgctgaaacggtatagatgtcgaatatcacgccatttaaaaatatttgaatcttgatccggatcgccccgcagagttaatatctggtgttgtcagatgtaggcggatgagggtgcccatccacacatggacgcatcgcacgtttgaaagggacgtcattcaaattcaagaccaagatggcaacatcgtctgttgttcgataagcaaacaccacaaggtggtagtcacaacattcatatccttcagagattgaactggcgcagattggcaaaactcggagagagtcaacaacacctcggacatgtccaaatctccgtccggttgactacagccagccatgttacgtaacgtgcagaatcgaccgacggcgaaaagaggatcatctcttgttcattcacatctcagtctagatagtctaatcttccattctccctagccaacatgtctctccgaacactccctttgaaattcggactaggtcgggtatcccgttccacgtgtcttcattctcgctcgatagcatctctttcagccgcttctttaccagatatcccagagccgatcgacctcccttttgaactagccgaaccaaagaacagaacgtccgacgataccttggtgatcgcacatggtctgttgttagtatacctcataataggctcgtagtcatcttagcgcctatctcgcctcatatacttactagacatttggtttcaatacttagcggctcaaagcagaactggaggtcgctcacaagagctttcgctcaagaactagggatgcccgtatatgctattgtctgtaggcatcctctcttctcttttcccctttagacatccgtatcctcaggaatagtttgttgaatgagcgagacaacctttgtgacgttcattcaggatttgaggaatcatgggacagctcctcatgcccatcctcatacatatatggcgtatgtgcccgtttctagcgttcataacagtcgaaagagaaaggcagctctgacgatattttctataccggccgacattcttgtcgtctcagtatggcttctgatgtgtataactttttcgagcagcagtctttcagagacaaaaacgtgcacctcatgggacactcaatgcaagtttacgatccgtttcattcgttctcggtctcttgtgcgcgtacaactaacctgctacatacgctcttttcctttctcttctcttttcaaggggtggaaaggtcgtaatgactacagcccttcatccccgactaaatcgacatctgaagtctctcatatcggtagacatggctcctgcgattggaaagatcagtccagagtaagaatctggttcttcagtctcttcttctatcatgtttccatcctccagagaagttgtgcttatcaaccggtcttgaactttgttgtattcatctcgtgatcttgaacagattctcaaaatatgtcaatgggatgatccaaatcgaatctgaagacaccaagtcgaagagcgaagccgacaaaatcctgagcgagtacgaagaggtacgtgctatctctatcgaagttacctataaccatgctttcgattagagttcgaggtcaattcttacgcaaagatgatttacgttgtcatcttgtcggcgcgtaactatgcaggccttacccgttcgacagtttcttctcaccaactctattctgaaggacaacaaggtgacattcagagtccccctcgagctcatcaaggaagcaattcctgccatcggtgacttccctttccaggtacgtctttcccgtcaatcttttcatgccagacaccgttctctcaatggttgatgcccatcctgttatgtcgcccttctgctctccttcgcgtctcacagcctggagagatcacctggaacggaccgacgatgcttgttaaagggacccggtcaaagtacatcaaccgacacaacatacctgtagccgaacagtttttcccaaatatggtgttgaaagaattggataccgcgcactgggtgcacgccgaaaagtaagcgttcatacccattctttgttcgatggtatctgatctccttgtctttgctgacgtccatcttttgactgggttaaacgtcaactgtagaccgagagagtttctccgactcatttccacattcgtcaactcggtctaagagctatgtatgaccggagagaatttgatcactgtgtatcgtcaccagtagttacgccaaatcatcgcgtatagaggtttgcgtatcttctgacttgcagccagatgtaggggttaaatgatccgttacataaatgtgaattggggtttctcgtccaaacgccaacgcgtattcttatcattcaactcaatacataatgacagatgaacagaaaaggagaacagatgactacaaatctaataggaagaaaaaaataaagaattcgcatttctataccaaccagaccaaactcgcgccatcatctccagcggtaacgatcgcggatttaccctctccaccacttccgacggcaagtgcgttgatgacggcctgatgacctttgtggtgtgcgataagtgatccatttcggacatcccatgttttaagagtggcgtcggccgaggcagtggtaagcaagtggttcataggtgcagggtggagtcgaatggaggtgatagcctgttcgtgaattgatgagcccccgaaaagataacaaaatctcatttagctatggcggtgtacaccgatactggggtcaagtacgacgacgatttagagactgacctcagggtgctccaacgtactcctcaaccttccagtagtaacatcccaaacgaaagctttcccatcagttcccgcgctaacaacaacaccgtttcctgcgatatccaaaaacaccaaactctccacactctcttcttccttgtgaccttggaatcctctgacaacctctgatttgatcaggttgaccactcggattccaccagctccaccacctacgacagcaagattcgatgaaggatggatggcaagagaagttatcccatcagccaggttgaatcgaccgtccgtagggttgaatgtctgtgaaggggaaggtgatcgagggtcccagacaataaggaaagaatcagccgaggtggtaagtaaacgtttacctgtatatacagagttgcatcaagatgcgtggggtaaggtaagaaaataagataaaagtagttcaagcgcggttgttagtcgttgaaaacatgtgtccgtttgagatatgttggtcaggaaaagaaacgaaccatcgggcgtgaaagaaatggcggtgatggcatcggtatgtccggcaaagacttgcatggtgttccccgaaggaactatcgatttattcaggtatcaatcaatttagtcatacgcctcacgttgtgatcatatctgtggagagaaatcggaatagctcacgctgccacatccaaacagtcgtatcgttcgatccaacagcaagcactggtcctttaggatgccaggtcaaacactaatcatccaaatcccgtttgagtgaagagacaataagcaaatatattcaagtgacctgttaatgtgaaagaccaaggtcgctatgttttgagttcacttacggtaacctcatctgggccttctaaactggtcaagaattcccaattgttccagtcctcggttccgacccgcttccatactcttacccgaccgtccattcctcctgtcgccacgaactgtccgtccgagcctgaaaatacccaaaataaaatcccgagaatttgatcagctaattgggatggagcgcgatgccgccaagtttcgaaccacctggagacatgaacttactgaacgctacagccacgacagagtcagtgtgcccactcagttcaacgagcttttgtccattggcagtatcaaagatgtagcccatatcgtcctctcctccagaaacggccagagagggattagggtgtgccgggtggagagcgatgtcgaacacggatgaatcttctttatgcacgactggagagttcattccgtccatcacgacgagtgacagcaaagaaagcatacgagaaacaaggcgtctacagtcagccgtgaagtctctaagtgacaaaggacaagcaactatgaaactcgaagacttaccagcggcaactagactgttgtcctctcctgcgtccttctgagcggatgacccctcggctccttcgtcgaaatcaccatccggatcaaacaccatagtagttccatccgcgctgattctgaaatcttcttgaccgtagccctcacccatttcgagctgagttccttcaaattgatcatcaccctcgttctcatcctcgtcgctcatcggctcctcacctccatcatcgctctcctcatgaatgatctcctcagcatcttcgtcgttaatgtactcgtcctctctttcctcctgagcagacatgtttgaagggatattcggttgttgtggaagttggggtggagtttacagtgttggctgactgatcggaacgaagtcgctgataatataagtagaaaaaaatggagggtcagttgtcatggaaaccaacggggctcaacgggtaaattctgaatcgttcatccaggtgtcttatattcgaaccatcatcacctcatcttattcacttctatctttctcctttacagtatgcttcgtatagcagtcccacggagggcgctgtctgcatctgggaatactatcagaccgttctcaatatcatgtaatcttgcccgtggctcccggaccaccactggaggtaaaatcatgcagtcgatgcgaggtgttcgaaacaaagactgtgagttatgtataccctcttcttctatatgtttatctcggtacgccatggaaaatgtgtatgaggaatgcgaaggattgagaacggtctctctggttatcatcgttgctgtagttgcgagtgtaggaatggtcgtcggagtggcgaagaaatgacgttgtgcaacgaaacatatccgatttgatatcacgactccatttgctcagctctggtcgtggcgtagatgcacctgtttgaataagagctgaatctttcggttttccccttgtggccattaccgtagtgaagagtttaccagccaaaaaacgactggctccaaacttcgacaacagacgagacattcatcccgatcttcttcgaccggctcggtctcgacttggcaattcgacccgtcggcttcctcctactgtcaaggccaaccctctaattgtgggaagtaccggttcggttataacagccccccgaacgttcaaggcagtatcaaatgcaaagaaaggtcttgtcgcaagcaagtcaacccccaagcaagacttcgtctttcaagctcagccattacaacgaagtccacccaacgcgagcaagttcaaaagccatccaacgttaactggtcttcccatacacttcacaagtcctccggtcagaccgaacctggtcgcgtctgttgctcaatatttgaagggaatacttccagagtcggctgattcctcacttgtcgcaacgcctgtccaacgtctttccctgcagcactttttccctcaggctctcgacattgaagcttctgcaaatttcaaattgaagaagaaccctttagcgaaaccttcggaattcatccctcgaggtatgcgaccaggagcaaaaacactccttgcagcagaaactggctctggaaaaaccttggcctatgtattgcccataattcaagccttgaaggatgaagaagactcgggaaagatgatcgatgaggacgacgaggaagcgtctgcgacaaggcttcgaccccgagcgctcatcatcgcccccacccatgaactcgccagacaaattgactccgtgatctctgctctcactcatagagatcggctccagacaacatgcctctcttctggttccggctcgggtccggacagtggtgtattccgctatcctgaaggagccgacattgttgttggaacaatcaaccgaatcaaggagctgatgggactaccttcgaagaaagatcaacagcttgatgagcgagattcgaaacttgagaacgcggtactcaagaaactcatcgacgcggaggttgagaaggcgaaaaagtttaaagacgatgattggaagaacacctttaggggagcaaagtcgaaagacgtctggatgcctgataagagaaagacttggttagagaatattcaggatcgagagaatgagaagcgggccgcggagggtaagccagagtggacgctgccggtcaaaattccaaaaaggcacgagaagcgtgaacacctgagcctcgaaagagtcaaatggctggtacttgacgaagccgatgtttccttgggtaagcttgcctctgttctctgttttattcagcataatgacgtatgtatgtcagcgttcgcttacatcctgttccaacacctatattgtagccgagcctttcctcgaagatgtcaacaaagtaatcaaccctcttctgacgtcccctactccccctaatttcatcatggccaccgcaaccgtacccgaaacactctctaaaattctccaaaaagaacacccaacatgcacccgattgattacaccaaacctccatcgacttccccacaccctcgccctctctactgttaactggaccggatctaactggcgatcagacgttctgatggaaattcgacgagcattcgtcgaagatgcccgagaaggcaaagagaactctcaaacaatcgtgttcattaacaaagatggaagggcaaaagatttcggaagttatttgaccgagaaaggatttccaaatgtagtcatccaatctgcgtcaggaaaccgaacgaggggaacgaacaaacacattgccccgtttttggtcaacccgagagatcaacttgttgatcgagtgcgggtttcatcatccgttcctgtaaaagcttcttcagttggacttcagccttgggaggaaccgaaagccgagcctagaattcttataactacgggtgtcctgtcaagaggtttagattttgcgcctacggttgggacgattatcatgtgtgatgaaccaaagaacgctgttgacttcatccatcgggctgggcgggcaggtcgagcaggtaatgacggaagggtcatcatcttctctaagactactcagccagtcaagagagctggaggaggagcaggtcgaggaggagcgatgtacaagacagtacgttctttcgattttcttcctggtctttgatttcttatcaagaacctggtctcgttgatggattactcactgttcaccgttcttgtttcttcggcttgttacacatagatccaaatggccagagctcgtttcgaaggtcgaggcaaaggagctcggaagggtggaggagccaaacgtgctcgtcaggctcaaagatagatagccaactaaacaatatatgatgtatcttcatcaaccccagtaaagaagatatcttgcacgcatctgttcggatgtatttctcttaaggagtaagaatggttacgaggagatcatgcttgtctgattgataccgtcgtgaagggtgttctggcttgatagtgttcagtaccttcgtctaaccatgtatccgcacaatttgaacttatattcatctatactacttcttctagaacttgaagtggaacttctgtccaccttgaccttcaaatggatttcctccaccaccctgttgatggaagaaatgctcaaagggagaacctccatgatgggcgaaaggtgaccctcgaccgtgtccactaggttgagatgtgtcgttcggatcgtctccgttatcaaatcgggccttcaattctattcgtgtgaggaaaaaagtgaattgtatcagtcaaggttatacaggcaactgtaattgaacaagaaagaggtaggagataaccgagacaaagaaattaacctggattactaagaacttcgtaggcctcgttcacagcagccatcttggcctcactacctcctttatcaggatgagccgtcttggcggcctttcggtacgccttcttgattgtccgcgcgtcggcatccctagaaacatccaagacctaattttgttcacatttgagaaggaggaatgagcgagcaaaagttaatcagatatggtcattcttatacaccgacagacaggaaattgtatgaaacgtaccttgtagtagtccctaaaggttattgagaagtgaagatacaggacaaaaggataacgatgaagttgagacatcggtcaatgccaaaatgaattattgagcttctgatttcaattgtgaatcggtcttctgaacatactttgcgcgagagattttgagcaatctttgtgctttctgaagtcgattggcgacctgagaattgggcaacgcaaagaacatcatgacgacaaatcaggactgactgatctctgtccatcggacgtgagaatatcgtgaaaacatcaaaactcacatcctggttggaccttcctccaatctcaaatgccctctcgagaacccgaacggcctgttcccattcttcgtctttcagtaatccctcggccttacccacaaggccatctacgctttcctcatccatcagcagcacttcctcacatgcatccttcgccttcttaacttcacccagctggacatgtgccttgcacgccgcttcccaaagcgctagccttggtgaggagatctttttcaaatcaaccgacggcgggaaaatgccttggaaggatgattcctgatacttggccaagagctcgtcaaatgtggtgagaagagacggtttgttggccgtacctcgaaggatattcaaggctgctcgccaggaggagcccgagataaagttggtagattgagtcacttgttttgaaagcgctttaagctctttgaatgcttttttgcaaggcttggagtccggatcatagtgtaggcattgtttaagctggggtagtgttggagaggcttacatggtgatgagagaaagagtgagcagggtatcaacctcgggaatgatcgataggtggagaaatgaaacctactgttgatcaagaagtacgaaagagatgaaactttgatagctaagtctgctgagcttggatctaatgtggctagtcgactagctcagtccaaaggaacccggttagagatcttgtgtatcgcgatgctgctttatctgagatcaagaatgctta

SEQ ID NO: 1810 - DNA, 17246 bp, Xanthophyllomyces dendrorhous
ccccaaagtagcaccccgccctcatttctctcgcttcgtgcaacagagggctgacctcgataacagatgatgtagtggaaatacaagcctcatagtgctttttagaaaaggatttccgagctgagatgagtgacttttcagcgctctttacagaatccaacttttgatccgaaccagtgagtttttcccaaaaacgtgtaacaatattaattcatttcgtgagctatgaggtgttaaataacggtagcgcgccaactctgatgaaagcaaccttgtgagaaagagactcacgagttccgaagcagctgaatctgacggattggaagccaaaaacgctttcagtgatttcgtagcagccgagtactgaccctccttggcctgtactttagccttctcgagataagcctgtacagtagacccagccaaacaacgttagcaccgtaggagtagtaaacagaaaggcatgaggatattggagaatcacaacgctgattaagcttatggcttgtgcggatgctaatcaatctgataaaactcaccttgaagaattttgggtttaacttgagtatagcgtcaaagtcttccacagcggctgagttccttcccaaagagagataagcagtcgctcgtttgtacagtgtcacatagctcggatcgagatctgttgctccatgaacaagccgaccatggtgatcatatataacgacaacaagatgacctttaatcagactgaatgcacagaagttatacaaaccatatagaaatattgaactgggcgcaccaaaagcttctccaaacagtctgacagcatctaaatagcttcctttgagtagagctgcgttgccatccctcaaaaatggagcagcctcttctatggacgccgcagaaagcgagctggaagccagaaggagcagaagaagggttggtataaacgagatggaaaagatggctctcatctggttgatggggttgaatactgacaacagagatccatcaatgtcgacagcaagaaaccataggaggaaggcgccacgtcaacaaacgctgctggtcacgtggttagcacaggtggtccgaatctgcccataccgcattgaggcgcggcccagattaatataacatagtgtacgtcattttgtgttggctagctgaacctgtactcttcatagcatcagtcccacttgttctcctataactccactctcaccaatcgacttcgacagagtacctcatagatctacacacacaggcagatatgacaagcttaatagccaaatcggttgggatgaaagccgccgagaacctcttccgaaagcatgtgggcggtatcgctccgagggatccactttacgaagaaataactgacgagcgaggtcgagttaaacgggttaaggttggtctcttaatggaattcgaatggaattatgaaaagaatgaggaagctgaatctatatttatacggctggaaaagagggaggctcctcccggtctatcaaaaagagatgcgaaggtgggtttcgttcaggtacatgacaagtaatttcctcgaaatgctcacttacggaattatcttgctcgtccgacagattctgcgaaaagtcaagaaaagggcccactatctggataaaggtatcaatttgtgtggcttccgagtaggatacactttcttcattggtttagtcccggtaagcacatctaattcgatcgaaggctcgccacaagagacaaagcttaccgtgtatgtattttacccgttgcacaggttgttggagacattgcggatgctactctcaattatgttcttgtggttaggaaatgtaagcttgggaggtaaacaggtcctctttaccgtctacatcactgatcgtagtgtcctcggtccatcttataacgataaggtaaacaagcagagcttccaccatggttggtgagcaagatgttgtttaacaatgctgtatctgccggagtagggtaagtgccttgatcggagcacaaagattggtcttggatcgctcacgtttttcttgatctgctccttctcaagattcgtgccccttgccggagatatagtggccgcagcgtggaaagccaactctagaaatgctctattgctggaagagttcttgacgtatgtcctatacatctcgactattccttgattttacttgtcatcttctcttaacaatcgaccatgtacctcttaaaacagtctccgaggtcaagaattattgagatcaaccgcttcgcatcaggcggcggcggtcacccctcctcctctggctccccgaccacagaccacgcaagccggtggcgcccatcatcaaagtgttttgagtccggagcaagtaaagaaagatatggcgcctgggtcaggcctcaaacatggggagcatgttaatactggtgctagaaatgagtcttcgaaaagcaaatggggttggggccggaagaagaccacgccagctgttcaatctgctggagctcaggtttgagcatggtatttcttgactctcgttttcttttcttttcttctctttctttttctatacatcccccttcatggactgtggcttttccgcatgcctagatacacgtttaatgttaatttctaactcagaaggatgtactacttttatctcatgaccgatacatatcggtctctctttggtcattcatcatacataatatcatatgtgttcgacttccatcgctaccacttatcaatatagtatccaatccgcaagaaggttatacgaaaatccatgatcatctctagaggcataaatcggattctagacattctgctggataaacctttgaggctatattgtttggcgtctagcattaattcataagttaaaagctgtgcaacactctaacctcgcttctcaatattccaccttatccccgttgcttagatccataacaccatggctcctaatactcgaatcgtgaagcgtggagctcagtcagtttcatagagctcagatatcctacgtatgcgaccgttataagctcaatgaaatcatttttatctttgtttcgacctgaaagagagcctgaagatgctgctgagctcaaacttggggacgagttcaacgatgctggttgtctacttgtctccgaggtgcaagtgttgttaaatcaacgagatcaatctcttgagagcggaaactcaatgtaagatcatttggcttcttcttcccattcactaatatgagtcttcttcggatttgatcatccgctctgaatctgaattatacttctctttgcttttcacctgactgggattcatgtggacgatgaaccatgaagggtttataccaagacgctcgctcacgtttcgcagttctctagaccgctggaagaggtgacaacaatcaggaggtttgttgtcatttgaaaccaaatgctgtttgacgcgtaaatccaacgactttaactaacgatgtatggatggctttgacgtttacacgtgggtcgtatggtgcacttcgctttccggataaacagcatcctcatgcgagaaggagacttgtttaaaccatttgagattgctcagattggcaatcttttgcctaaaggagctgaagaagccaagagtctgattccgtcgtacgtttgtctctccttccgacctgtgtagtttgagctaccatgtctcatgattccgagctctggctggacactgctgaaactgttatttgtttgtcgcctttttcttaccatcaaatatcgaagattaagcaaggtagatgatgacaagcttcaggggctcttggatgagctcatggtaatgaagcggggctcagacgatctttagaaaattgcctcttctttctatcgtacagaagatgtaccaacaaaataaatgctttatataaaaatgcgttgtacagtggaacgagggtgatcaatacggcacagagtcggtgctcatactttccttccaccctgtaacttaatacacgatggatccgacatattgaaagagcacggtaccgatgatggcaataactatcaggtcaaacaagattggtttacacatcagtcactgctctcaagtcgagagttgagactagtcatagtttaaagtgttcacgtactcattccggttgttttctccaagacagtgtggaagtacagagcggttttacctgacggaaagatagcaaagatggcaagatcagagagggcggagcattagacaaaagactatggaatccagatctgactcactaagaataaatgtccaaagtgcgatgacgcccattccaaagcctgttgctagcttttcaccaagctccattccctgagcttttccgtcaataatcctcttgaacccaggccagacaaggtccaggatcaacatcgaactcatggtaagaaggaagacatgtccagagatatcgtgaccgccagaccagtgaggtcggagctgttgaaagtgttccttgatcgactcaagccttaaagagttgatgacggcttctccgctgactggagcccctccgtgagcgatcgccgaagctgacgcgtcggcggcagctgctccagaagtagtggtggctgaggtcaaatagaacactagatcgtcccaggtgaatctatgggatgagcctccgtgacagaatccgccgggtatcttgacaagcgcgcctttgccgatcccgaccgctttatcgaaggctgaacagtctatggcgcctgtttgacaagccgagtaggggatcaccactccacactctcctcctgaccagatcatcgttctttcgaacagagaaggccctatagcccacaaggtgaggatgatccagaagagagtggcagttatgtatttgacaacagaggatcgtttggtgtgggttcgggtgcttgaggtgagagcaggagggggagacagggtgaggtgaacaatgtataccagagtcgtccacagccaggcttgcttagcaaatctagaaaatgcaatccagatgattggaattcgatcgtgtgttctgtgagcttttatgatcgaaccaaaagaaagcggagataaactacgcacactcggttgaagatgttgctctttttagcgaaataactattcactacaggcgtctcacttctaggtaaagttgttcccccctgttcaccaaggagctgagacgcgctagctgtcggagaggtagctgtagagtagacagccgagtagactgttccggatactacaacgaacaagatcaaagccaaagcaatcctctggggttgactgagaaaagagagcggataggggacaacactattcgctgatgacggcgatgaagacgagctgtcttgcacggacgagctacttaggatgaatccatgaccatatgttattagaattatgccagattactagccatctatacaaaaagaggacggcgaacgtacaccttttcatcctctgatgagcgagtgcttgcagctttggttcttgagcgaacgcccgaagatggcggttgtgacgtcatgatggggatgttggatccagggaaacaatctcttgaaaagtattaaaacgaatactgcagacggatcgatcgtggtgtacagagctgatctagttcagaacaaatggcgcagggatgttgtaggtgtatttgcggtggttggatagtacagggtaagaaaggtattgaccgtcagaaaaaagaaagagccccaagcccgatgggggtgtgacgcctttttcacggtctagggttagcatatttatctttctcaagtggccgtgtaggcttgactccaactatcacccgcacgcaatcacaatcccacaagctctttttatctctgttgaacgacatcagaaaccgatacaaccactgaatagatcaacccagctatctctatcaaatactacactatgaaactcctctctctttctatctacactttctccagcccggctcaggcaacgctagtctctcaggcctcggatctctccgaatattcgttcctcactaggggatccgtccaggagggtcttaattttctttcatccactgtcgccagtaggaccaccgatggccagaggcagagcgttcaagaaggtcagaacatggcaaacgtctaccgaaaggggaacattgctggtgagctcttccgtttttacacgcctcaatgtcctttctttggctccacttggcatttggcaggcttgtgtgtagtaaagctctgaatgtagtcgcggcaggtcgttaacgccttgctcacattgtttgttcatagccgttctgatatccgacaccgcctatcctgttcgagtgtctttctctctccttaacaagattttggacgagtacacatccgatcactggactaaagccgtcggggatagcaagctggcggaatatgttaggaaataccaggatcccaagcaggccgttagttttctcttcccagccctccccttttttccaagaccacgaggttaaatggtttctgactcgtctatgttgtctcatacaacaggatactatcatgaaagttcagcaagagttagacgagaccaagattgttctggtgagcttagccgctgctttttctgctgtgccactcttcgatcacaactaaacgcgtcgttatgtgttctatacagcacaaaaccattgagtccgtcttagaacgaggagagaagctagacaacttggttgagcgatctaatgcactcagtgcccagtccaagatgttttacaagacggcaaagaaggttcgtagctcagacgcccatttcgaaaactcccacacgatcatatattaatctgatgctggttatggttaaactgctctgtctggtgaatgcacagcaaaactcttgctgtatcgtcatgtatgtcttcttctgtatcctggctcctcttgtcattctgctatagcgatgactgatgatggattctctcttcaaataggtaatcgtcttgcatccaccagatgatgaatcgcaaaacgtctttcgttactttctgtctgtagatcactccagtttccaattgtacgtgacttgcgttgtgcttcctttatatatatcatactcctctatgtgcatcaattcttcaaactgttcctcatcttatcggtagcatcctttatcgcacttctctctttctccctttattttcttcgtatcgcgttttcctctctatcaggcttacttcttccctaacactatcaatctcattaatgaactagcctgactaaatagaagagaagattaggcaggtgaagtactgaaatgcttgacagaggcaactgacctgattagctgtcatcgaacgcactgacctctcggtcgagactgatgctatacctgtcagatcttaatctgtcgtagactttacccttcaaatagttgacacctactcatccgtcaaatctctctctccctctccttttctttcttttcaagcagtccttcatcgctacgcaatcttactcgctttcaacacactattccaagatggttaaagtaagtttttgttatggtcattgttcttacgtcttgtgctgatggcattcacctcgctcatcaactcttacaaagacaagcatatgggaacggaagggaaagtatgtgacagggccgactaaatactcacccatcaatatacactgacctgacgtcttgagtattcatgcgttagatatggctttctatggtacggagctcatgtgttgttgtctacatgtactagataggcatctgagaacttggctcatagcttcctttcttgttatgagaacacaggctagcagcgactgttggatcgactgtatgctgcctgatcgtatcgctggagtctaggcttttctcgtgtgctgattgatcttctaattgcttgaacagaatcgtagtcttcctaagatacagcttgtcaaaatcaatgtgtctgaagtatgcagggaaatcgtgtcgggtgaagcccaaggtccagattccgccttaaagaagattaacgacaaggattctgcaggcaacatgcttgagatcgagatcgatcgagttgggggaaacagaaagagagctagtctggatggcaaacatatggggagagagaagagaagtcgagtgatcaaggaatctggcagagtggttactatgggattgaggctgagcgcaaatctgttgcttggggtagccaggtatgtctatccagatcagcggtggatgaaaagttggctgacttgaatgtatgcatgcttttacacgcattgtgaaaacatagagtatatgatcttcaggtacaagctacaaatgtaagttttctagattgcatatcgctgttttgagcctattgaaaacacggctcggctcatagcaagtttgggctgttacagaacgatgcgtctcagatgtatctggatctacgctctactttgtacgatggtctcaaaagcccctcgaaatcgacaaagaagggaaaagacggcgctgttaactttgactcaactgaagaaaagtacgtggcctactccttattcattcaaatggtcgacacgaatgtcaactgatgatcccggatacatgcgctgtcagacctcacaacctcgaaactcccaatgaagatgcactgggagttggattggagttcggtctggcccatgtattggaagaagatgtcggtgcctcaaattttgttacagagtctttgtgttcatccattgatttttgatgattaatacaacttttgactccctaaggattggggcacttggagaaacgacgagaaccatctacccttctctggaattgtatcgacctctggcaacagattcagagctgatcatattgacgatggagatagtgacggtatgttgtcggaagtatcaactcaaatactcgttctgatcctgatagctttgaatggtcctttaacagaggaaattcctcgagcacgaggggctagaactccggatcgtgaatcatcgttcagactgtaaatccttcaaagcttaagagtaaggatgtataattgtatctgacccgacgaaggggagatctcccaatatatatcagttttagaggagcaagctcagatttaatcaaccaagggcctggcagtacttctcagggaggttactctgaatcggtgaggaaagttttgggcttacaaatttccacatgcaactctttagttgactctgttttatcgactatttcgatagaactttgatccgggtatggatttggaacttggcttggatgatttactcgaagatgatggagaagatttcgattttgagggtactcgatggggtttgtctggacagaagagtagctcccccggtttggatggacttgaaaacagtagtcttcaggagtttatgggagagggcttgtaagttgtgtttttgcatccagttcggatctatcgcatgggtcgtacgaattaagactgatatcgcagatcatgtcattggcagggactacggctatatgacggaccgatacgatcagggaaatcagggcatggatgatatgccaatcgacttccttgacattccgggagctcctgtagttcccggtctgcctccaattcttggctacaagagatctgggactgatcggttgaatagcgatacacaggaggtaggttccatgcgctatcatagatctgtatcttgtatcaggattctgcgcaaagctgacatctatgatgagaaaacttcatcatgttggtaaacagcagcccaaatcgatcttgaagcgtgcggggcagaagtctagcaagaagaagagagttaaactagtcgttatggacaagaagttgaaccacaccgacgccggttagttgttttgtctacatatcccgccaagatagtcaactcatcacattttcctatggcggctgagtagaaatccaagaatgggtaagttgtttttgtttctcctcttgtatggacgaagaaatgctggcgttacacctcatgcctaggctgatgtcgacatgtcgtactatcttagaggaggtcgtatgtgaataagcagatcgagcagaggtaagaaaaatcaaagcttagcaaaaacacgagtccttgtactcaactcggccatgttcacattcaggtcactgaacaaacagcaagaagaggaccgtctggcacaaaatcgtgttcatgagcttctcaatggaatgcccaagattttgggatgtacgtctaacgcgcatcatgttatgtcatttgactagcaactaatttcagtttgtttcatggtctagtacaagacggaggcttgattgaattagttcttggtcagcagaacagaaggagacttttttctgatgcatacgaaccttgtgagtcctcagacttatcctcgcccaccggtttccatcagcttatagacgaatgttcttatcgtttttctggtgtgagagcagcaccaaagagacctcgaacacaacatgcagataaaaccgaacgccttgaagattgttcggaggttggaagcgagcatcaatcacgcgttgagatgcggccgtatcaagtgcccgagtttgctgatgaggaaggcatgggtatccaaggatacgattactatcctgaagacagaaacgatcagggtgaagattatatgagcttgaaagcttgtacgtctttcccgctcagaatcaatctgaataacgatgtcagatgttcttacgaattgtcgttcactatttaaccacgtatagatgaagaagtgagtggggttaactacattttactgtcgcagtcgacttacgtgtgattacgacacgtctaccagatcgatagaacaattttttcttcagaaggtgacgtcggaactgacctaagattgagagtaaggacgagttctgagctgcctgtaagtattcagaactatcatgatacctttaacctcgctcatactccttcttcttccgaaagtgggatacatcatccagacaaggtagaggttcatcgatggaaggtgttgaatgttagtacctcatagctttccctgttgtattcctcccttctattttagagggctaaacaaagatttctcatctctacagttgaggctcctggagggatgccttcctcctccgcgggttatctgagtagtatcgcagactccaaagtcgagtaagtactctttagtcgagctctatcttatgcgcatgctcatatttaatctttctgtatagtgtctttgtcagtcgacctcatagacggatgtcctctattatgtcagctccttgggtcaacggattgaacgatgataatactcagaatcagagtcaaggccagagtcaaggccagagtcagaatacaaagaggcaagacactcaaaagtctctctctgttctcgttatgtgtggagatactgtttaataaataaaaacttactttatgatgtttaatcaaacttgatttcttagcttttttgcgtgagttcttgtatgctggttttgtattttcaaagcttaccgactattcgtttctgttgattttgtatgaccagctacgtccaggatctgttggatgagcttcctttgcgttctcattctgtatcgcaaaagccttctggtctctctatccctctctcaacggttgttcctatcaagtcttgtaccagagctgtggctgcgaagggattctatcaagtgcttggttagtagagctacactacttctatctccataggatctgagtgttgtttgccgatgttaactgaaatatcatctgaaaaacgaacgagatcagtactgggtactaaggatgtcgttcatatctctcaaccaaaagactttggagatatttttatcggtttgaagtgagacactgtatagatcctcggtgtatatagctttgttttatatgagttatgcaacatataacatttgtcttctaggtgttttcttttgctctttctggacgctctattctctttgtcgtagattagtccttatacggatcgacattgataacatattgagatgcggtcgtcggctgttcgataccctatcctaaccggttattatccgagccaatacgttttgctctttttagtctgtatacgtcattcatggcgtgtataattgtatcaaatatccgtggcaaatggatcgaagtccgttttggtcttgatccacgatatacctctcagtccaacaaatatctctcctgtaccatgtcttctcttccttcaacacaacaagtttggttccagaccaagcgtggatctaacacgaatgccatcgagctcaacactcaggcaccgatccctgctctcgagccagaatttgtgcttgtcaaagtccactctgtggcattgaatcccgtagggtacaagatgatgccagcgctaccttcgtttgcaagaaaatatccttgtacgtctcacgtgggatgtgtcatgtcaaaatcgataggtcggatgagcgataagagtgtgtgctggctgacttcatttcgtttttgcggggcttctgatactcaatagccattttggagttcgatcttgccggaacagtggtcgacccgaacggatccaccttcaatgttggagacaaggttttcggtagtgagtgacatctttcgcgggtcagtcaagacggcagatgaatgtctgatctgcttgtttggtcgtttaagtctgcccggccgatgacaacatcaaggatggaaagggtgctcttggccaatacgtcctcgtcaaggttaatacatgcattgatgatcgtcacccatatgtctcgtagaaatatgggctaatggcccttctttctcctttgtacaggctactaacttgactgcgaagcccgacaacatctcttttgaggaggcggcaggaatcagtttggttggattgacagcctatcaaggttcgtctgcgagctccttagtttgccattcgacaagccgactgatagatgtcgattcggatttacaggtgtgatcgatcagtgtaaggttacctccggccagcgaattttcattagtggaggaaactctgcggttggacgcatggctattcaagttgccaagatcatcggggcgtacgtagtcgcctcctgttctggtaagagtgcggccaaggtgaaagcacttggagcggatgaggtacgttccttctctctagatcgcgtatagttgagctagtcttccgtgaggattaatcggacactatctttcgttttcatacatttcacggccgcttggtagatcatagactacaagacggtcgacgtggtttctcatctttccagtcaatatgcgtcgcagccgtttgatgcgatttatgatgctgtcggctctcctatcaaccttttctcgagctgcactcctttcttgaaacctgagggagtctttctgtcgatcggagtgatgatgcccaagggtgtttctcaatatctcagcactggagcgtccatcctcaacagtgccatccggcccgtttggttaggtggggtgaatcgaaaatggattatctatctgaccaagagtaataaggaaaatcttgatgcactatccaaatgggctagcgagggtttgttcttcaactctacacaatggcggtcttctttcattgagcaaactctatctaactgttctccaagccatcatcttttatggggatgacccaaccgattctcaggcaagctccatagcgatgtggactcaatccattcgtttgataaggccggtgttcttgccgcatacgaccggattaaatccaacgaggcgtcgggcaaggtcgttatcaatgttcctcaataggtgttttacgttgggtgtaaatgcatatatatatatgcatgtatgcgtactatgtgcctttccgtattgtgtgcctgtgcgtgcctccgaccttgtagtctaatgatgagatgccgaataaagccatgtttaatttgaaccaaatccacgtgtctggatgcgcagcaaggtagacacataaccatccccaccaatttcatccacgtaaccccatcgatcggtgtttcccggagaatgccctagggcagttcccatggttacaaccatctggttacatcccccttcccccggggagagaagccttccccagcggaatgaatattcccccatcccatttgatgggatctctagcaaatagctttcaatccgtttcgtcctctcgaccttctttctttctcgttctctccttcttcctttcttataaaccttactcccatcacccatctctctctcgctctactctcctcctgtttttctccctttttctttttagttcaaatcctccgcacaatctctttgcttgaccgaccactacatctctgtcggctcttcgttgtttcttttcctcgtttggcatttgatttccttcacctccttccgatcttctccttcttcttggtcatcgtctgtcttaatcaaccgtcatgagtgccatcgtgagtcttgttctatcgcgagcttgttgtattttgtgtcgagcttgaggagaaatatcttgtcggaggatgtgatggctgatcgctcaaatgtactttctgggctgcctgttattttttccctcatttttttcccgttactcttttggtaattcggccatcttccatcacttcatctgcaactttctattaggccaactacttttcgtcgcaacagaccgagcccactcgacctcttaccattcagcttggtcccactcgagtatcaatccctgtggagaccaaggctactgatgcttgggtggctgctgaggtgatgagggaggaatttcttttggcacaggagggcaaggtatgtgttctttccctcctaccgacttgtgttatcacgaaaaatcttgtctgagtgcacacgctaacctgtttgtatcgttgtatgtgatgcgcgccttaactaaaactgaaaatgcaacaggatcttcctgaggccagtccaacccacgatgaggatggcaacgccctgcctgtctctaaccagcccaagatcgcccttctcgcctcgttcatgaccttctacacctccaaactctcctccagctcaagttcgacaaccagcgcctctgagacctcggcatacgatgtcctgctcgcttccttcgctcacttcaccgaggccttcctcacccttcccaatgtcgacgtccattcgcttgttcaggcttacgaccctgactcgcggaaggagatcttgagcgcctacttctcgacactagctgccttagaggctaaattcggaaagagtggaaaggtccccaagcagcccaagagctggctgttcgaggctgccgagaagggagaggctgaggtgtatgcgttattcggaggacagggtaccaacgaggttagtcactttttcttaacgccatctccctgtgatggacatcttcaatgctcacatcgcccacttctcggtttgtaacccaaggtttacttcgatgagctccaatccctcttcgatatctaccgaccctacgtggctcctttcctatcggccgccactagcaaagttcttcttcctctcgctgctcaagccaccgaggctggctcctcgtactacacctccggccttgacgtctacggctggcttactggcgccactccccgaccggccgtgccctaccttgcgtccattccactttcccttcccctcatcggtctcactcagctcgtgcagtacctcgtcgtttgcaacgtcgcggacaagacccctggagagttccgagcccttattaagggtgccaccggtcactcgcaaggagtcgtctctgctgtgtgtgtcgcctcctcggattcacttcaggacttctccgaacgagctcttgctgccgttcggttgctcttcttcattggaaagcgaggtcaggaggccttcccgcttctctctatcgagccggctattgtagacgatgctgtggagaacggagagggtgctcccactcctatgttggccatcactggactgaccttgaagtctctcgagggacacatcaagaagaccaacgctcacctcccctccgactctcagctctttgtgtctctccacaacggacctcggaactttgtcgtcaccggtcccgcccgagctctctacggtttggccaccgggcttaggaaggtcaaggctcctgctggacttgatcagagcaaaactcccttctcaaaaaggaaggcagtgttctccactcggttcttggtcgttggtgttccctaccacagctcgtatcttgaaggggctaccaagaaggtcatcgagcaggacttggctggaaaggacttgtttgctccttctgacctcaagatccccgtctaccacaccgagagtggtatgtctatattctccactcacttcgtttcatggcatattgactgatgtttcgctccctgcgactgatctgacaggctccgacttgcgagctctctcgacctccttgacttcctctctgtgtgatcagatcttcacttgccctatccactggaccaaggctaccgcattccctgactcggctactcatgccattgactttggacccggtggtgcttccggtattggaccgttgacaggaaggaacttggagggtaagggtgtcaaagttgtcgtccccggcgagaagggaaagatcggagccgagatttactcgagaattcctggtaagaaggaggccaagtggtctgagaaatggggacccaagttggtcaagactcggtaagttggaatctcgtccttgttttcttcatctgcctcttccttccagatccatcgtctgattggaattttcactgctgctatacagggacggaaagattcacatcgatactccgttctcccgaatgctcggaaagcctccgatcatggttgctggtatgactccttctaccgttggagccggattcgtttccgctattctcaacgccggttaccacgtcgagcttgccggaggagcccactacaatgctaaggctcttcgagccaaggtggctgacatccagtctcgaatcaccccgggaactggtatctcccttaacgcactctacatcaatcagagacagttcagcttccagtaccccctctggcaagagatgcgaaaggagggacttcccatcgagggtttctgtgtggccgctggtgtgccgtcttctgaaaaggctgtcgagatcatcaccgctctcaaggctgccggaatcaagcacatctcgttcaagcccggaagtgtggagggtatccgacaggtcgtcaacatcgccgctgccaaccccgatttccctattatcctt

SEQ ID NO: 1811 - DNA, 22752 bp, Xanthophyllomyces dendrorhous
cctattatccttcagtggaccggaggtcgagctggaggtcaccactcgtgtgaagatgtccaccagcctatcttggccacctacggttcgattcgacagcaccccaacatctctttggttgccggttccggtttcggaggttccgaggatacctggccctagtgcgtttgtcatgttggatcttgtctttatgcttcttggacgtatgctgactccatcttttgtcctctatcaactttcatcttcttatagcctgaccggagactggtctgttgaacagttccaggctcagcccatgcctttcgatggagtcctcttcgcttctcgagtgatggtcgctctcgagtctcacacctctccttccgtaaagcagctcatggttgatgctcccggagttgatgattctcagtgggagggaacctacgagaaggagaccggaggaatccttactgttcgatccgagctcggagaacccatccacaagatcgctacccgaggagtcaagctctggaaggagttcgatgacactgtcttcaacatgcccaaggagaagagagccgcttggttggagagcaagaaggactacgtgatctcccgactcaacaaagacttcaacaagccctggttcggagagaaggccgacggaactgtcgtttccaacatcggagagatgacatacgaggaggtcgcccgacgaatgattcgactcatgtacgttgccaagcagtcccgatggatcgacatctccctccgaaacctcaccggagactggctccgacgagtcgaagagagattcgctggtgtcaacggaggagtcaagcactctatcctccagtcttttaactctctcaacgacccccttcctttcatcgacaccttcttcaacacctaccccgccgccaaagagcagctcatggccgccgaggacaaggccttctttttgaacatctcccagcgacctggacagaagcctgttcccttcattcctgttttggacgcttccttcgaagtttggttcaagaaggactctctctgggcttctgaggatattgacgccgtcttcgatgccgatcctcagagggtctgtatcttgatgggtcccgttgcgaccaagtactgtactcgagccgacgagccgatcaaggagatgctcggtggaatcgagtccgacctcgccaagaggcttcttgatcgatactactctggagatgagtccaaggttcctaccgtcgattacattggtgccaagcccgctctcgttgcccccaccctcgacggtgtcaagatctcgactgagggtaacaagaccgtctaccagttcggcaaggcttcttccctccctgccaccaacgactggcttgaagctcttgctggtcccaaggtcggatggttgcgagctgtccttgcctctgtcaactacgtccagggttccaactatatctcgaacccggctaagcgattgtttgctccccgacctaaccagcgagtcgaggtcatctcaaccggaactgagatcacctcagtcgtcatctatggaagtgcccgatccttcggtcctcacccggccgatttcaaggctctcgatcttaccttcgatccctcctcctcccgtatcaaactcaccatgttcgaggagcgacgaggatcgtcccttcctttggtcttccagttccagtaccgacccgacatgggtttcgctcccatccacgagatcatggacggtcgaaacaagaacatcaaggacttctactggaaggtctggttcggagacaacgagagcctccctgatctcggattgcaggagaccttcaccggacctcccaccgagatcaaggttgaggacgtcgaaaggttctgctcgatcgtcgagaaccacggacaggctttcaaggcttcccagggaaccgaagcccaggctcctatggatttcgctatcgtcactggttggcaggttagtctttagattaaacttaaaatctggacacgtagacagtgtttacaactgaccgcgtctattctatcgtataacaggctatcatgaaggctatcttccccgctgctatcgatggagatcttcttaagctcgttcacttgtcgaatggattccgattgcttcctggagttgcccccttgaaggtcggcgagatctgcacttccgaggcccgagtcacttccgtcgtcaacagtgatagcggaaagactgtcaaggtccaaggttacgttatccgagatggcgagaaggttattgaggtcgaatctgctttcctctaccgaggccgattcaccgacttccagaacaccttcgagtctgtcaaggaggtcgactactctgttcccgtccttacccagaccgacgtcggagtgctccagtccaaggagtggttccactgggatgatgatgctaccccgcttgcccctggtacgactttgatctttaagacgactaccgacctcaagtacaaggacaagacctccttctcctctgttgtcgtgagcggagcggcctacgtcaggaaccagattaaaaacctcatcaaggttgccaccgtcgatctcagcctgggagaagctcaaggaaaccctgttctcgagtacctcaagcgacgaggagctcctttgggtttggacattcctcttgagtcctcctactctcttgccaccgccggttctctcaaccagttcatcaccccgtcgaccaacgagccctactcgaaggtttctggagactacaaccctatccacatcaacccttacttcgccgactttgcctctcttcctggaaccatcacccacggtatgtggtctagcgctgctaccaggaagtttgtcgagacggttgctgccgataaccaccccgagcgagtcattgcgtaagtttattttcgtttcgctatatctggttctcgtttatgactggaagactgatttgtttcatttccttcgacaatgtagttacaaagtcacctttgtgggcatggtcctccctggagacgagcttaccgtcaagttgtcccacgtcggacagaacaacggtaacaaggtcgtcaaggttgagaccttcaaccagcgggacgagaaggtcattgacggaaccaccgaggtccagcagcctcctaccacctacgttttcaccggacagggttcgcaggagcctggtatgggtatggagttgtacaactcctcgcctgctgctaaggccgtttgggacgccgccgaccagcacttgttgaaaacctacggtttctcaatcatcgacattgtcaagaacaaccccaaagagcttaccgtctactttggaggtctccgaggacaggctatccgggctcgatacatgtcgatggagagtgaggacgagcagggcaacaaggttcctctcttccccgaggttggacctttgtcgcccaactacaccttcacctcgccgacaggtttgctcaacgctacccagttcacccagatcgctcttgtcaccgtcgccaaagccgcgttcgtggacttgagcagcaagggtttggttcagccgcgagctcctttcggaggtcactcgttgggagagtacgccgctcttgcttcggtggctgacgttttgcccatctcttcattgatcgacgttgtcttctaccgaggtcttacgatgaaccgagctgtagtcagggacgaggccggtcgatccaactacagaatgatggctatcaaccccagccgactgccctggtagatgccgacagccgaagattgtcttcatctctttccttgtatctagatctttcctcttatctttctcttcgtctaccgttttcccatatttctcctcgtgcagcattgcttggaggcaaagctacacatagataattctctttcctctttccttctttttcttcttctttcctttgttatttttcacgaacttgcaactctcattgggcctctctttccttttcttttttccctcctattctctttattttcattaatttccctctgtttgtcttgcaaaaagcgtaacaatggcatctttgtcgctgatcaagctttttcttaccttttcttatgtctcacaagttctgacgtgttgaattatatatggttcaagaactgttctctcctctttctggataaaaacaaggacagagcttgaatgagaaaagatacaagacatgagattgacatttttcgtaaaagatagtgagagaagtgtattaaggaaatcgggacgaaagtacaacgaacggaacactatatgactttttgtttcttcgatcttttgcaaacgatgaagaacggtctagatgtacactacttgatacgaggcacagagtggaagtgaggttttgcgtaaaataaatatgaagaagtgagaagaaagaaaagagctacaggaggggcgtgaaagaaacgatgattgggaaggcccttccccttctggttaagcagcttgaatgttgacagtcgactctacctccttgctcttcttctcatccacactactaaactcttcagttccctccgatcctcttcgatcgggactgacgatcttgatctctccttccctgttaatgtaagacatggtagatggcgagagaacagggtcgtcgtctgcgtagatcgctttggggatatgagattccggatcgggaaaaagtttcgagaggctggtgtagatcacaacggaggctagcgtgccaaagagccaagtgaggtcatacaagtgtgtcaagccagtaccgatggcgatttctggactgatggtgttgatcaaaccagggatggttggcgcgtaggtgatagccatcgtcaccagagctcgccagttgaaacccttagtgtagtagtatcttccgtgtttaccagcgtacaaactgggaacatcaacctttccttgtcggacctggttgagtagatcaaggcacacaagacccgatcagtttaactgtaggcgccaagccatgattctgtaggaaatgatataaaatagctcacaaggtagtaatctgcgatcaacataccgaccataggcgccaagaagacggtgtatccacccatgaaagccaaaaatctgagcgacaaacaccatacaagatcagtttgatatcacagacttgaggacaatagaagcgaagacgataggcttacttggctccagattccatgatgttccaaggagtgattgcccatccaccaatgaaggagatggcgatacttccccgtcgaatgttgaaatacgtcgggaagagggaggtcaagtctgccgctccagagatggagttagcggagatgttggtacccatcgaggcaaaagcgaaggcaaagccacagaagaatcgagcagcacgtccttttgcgtcatcgtcaaaaagatctagaatggtcaacggattccagatgatgtcttgattgtagatcacggaagctcccgaagagacagtcattccaatgaatgcggccatggtaaaaacgacagggatgataacgagttgaacgtattgcgctttcttgttggtagcataacgggtgaaatcaggactgtcaagtgggatcgaaggaaagaatgaaaacggccaaaattattttactgttcttgagctgatgacacctcacgaagactgaaagggatatgtacatgttgacagaaagagcagtgtagtttccgagaacggaattcatggagctcatgaaagcccagcccttggcacttccggagagcgtggccttctgcgtaaagacgggtccaactcctgcctgtgataaactccagatgaacaatccgacgaacgcgatagggactgtaggtcgcaaatgaatagggtcgaagttgttcatcagcgtgtcttccttcttccctttgagagataacagattctaaagacgtacccatgatcgactttgcgaggaagaaatacttgatcttactgggatggataaggatgaagggaaattgtagaacccagaagataaagtagcaaagcaagccgccggaagtgatgtttgcagagtcgggaagactgtttttgtaatcccggaaggatggcgaactacagtacatgatggttgatctgtcagagttgcgacatacagcggaaggttgtatcgatttttgcggtggcgaactcacagagcaacgatcatagcgtttacagattgcgatccactgtacgactgaactccaaacctgatagagggagaacgagacgttcataataaggaccgaaagctgagagagtaggatgcgatagaagaatcaactcaccaaacacatgccaagatcaatcgagacaacacagcaaacttggaaaggtggtgcccaaacgacgaccgagcctgaatcgggaacggcgttcgaagagtagctccggtctagaagcaaagatgagcggcgcataagttagaccctgagacctcgagaaaacagactacgaagcgaggacgaacggatccttggagggtgatgggtatagagatgatcacgtgaccaagaaagatacaaggaagtgtcgttttgaaatcaagtccgagagacatgatggacgacgccatctcccaggtgggaatgttaagcgcatcagcgaaccagaaagcgatgtaggagccagtagtccatgttcggtcctgagaaatatccaaagaaaatatgccagtagttagatggaagaagtcaacatggcaagaagaggatgagtgacgaacctttggcaatgtcggagctaaatctcgatttgagactttgatagagccgtaggtgaactcttcctctttgactctaagcctgttgatgtcaaacttcatcttgagtgtgtgtattgaggaagaacgagtggaaaagatttgagttgaaaatgaccatcttatgatggtatgtgtttatatgaagccgagtactagaattcataggcagatagatagataagctgattgtccaacagtccagaaagaaaagatgtaaaaagatttcctcctcggctccgagtgggaaaagatttcgaagaggaggctgaaggacggccaaactctgaccttggctgttattatctggcctgataaggaaatcacattggaaagagtactgagtgtatcgcggtaaccttcatatcaaacccaggcgttttagactggttgctctcaatcggattccgtgctaaccggtgaggtcggccccgatactatcggtcagtttttctttttcaatctatatatacaaaccgaaagattactttggaataaactcttcaaatcagaaagaaaagagagataaaaacaagttaacgaaggaacacgactacagatatagttgatagttcaggtaaagcagcaagcacgcgaacagaggagcagaggtcaatgtaattcacttgtggcaaccataggattttcagataacatcactatccaggcgcagatggatcctcggcttcatttgcactccactcgtagtctctacttcgccgctcgtcctttcattgattcgaccagcagatatggagcagaggagacaaaattctcattcacattcccatgacggacagacagtccccatcttcaatctctgtatctgccagtgtatccgtcccgttcaatctctctccatcgaattcgatggataaccttccgatgagatgttttgtcaaaccaagctttataccgtagtgcttcaacaacgacgacaccttcgagctcgctttagccatgaccctaacgtcccctcctgtacggcctcgaaggacgatctggatgccttctgctcggacatcgtcctcagtggccttgccgttgtcatcgtcatgaactgatgatatagacatagagtgttccttggacagtccgtagatttctcgagatgtgcttgaccttttagactcgattgacaaatgagagcttgggttcaagccggcgttgagccgcggcgaatggaactgccgagtctcgaacaaatcacggccgtcgtcgtcctcatcgtgatcaccaccgtggccctcggctcgcacaagagacgcttcttgggcttcttgggctatacgctcgatgtttcttctacgttcctcctcaatctctttttctttgacggtgtagatgtcttttcgatagccgactgtacatgtaagaatgagaaaagccggtttgacaaatgattagggttagttatctgtcgttttttctgcccattgagacattttgcacatacccatctcggcagaatgaaagattcctaaagtatcaggagtagtgctcgggtagacccgtttgccctcgtacgtgattaccaaaggttccttgtatcctttgcgcttcgctccttcatccgtcacgtcaaacagcgaatgaaactagagagtaggcacatagtcttcactttagtgtcaaatgttctcttgaacacaggcaagatagagagacacacgccaacttacacgatgaacggcgaataccaacggtttctcaaacgcctggatcgctctttcagacacactccctgccggatgatgggcaacgactttcaatctaatcgtcacatcatccggcgcgcctatagtcagcggattcctaaccaccaccggtggcgctggcgtcgctgacaatcttgatagatcagacccggtccatgctggctcagaaataggcaaagccggagaccgtttcggaggggtgagtacaaactgaatctcttcgtcagaatcttcgcagagatcgactctgttggaatgcttgtcattccgattgggttgtgaaagagatgaaggcgcttcgaggaactcaagatcggaatcagaatcagcaacaagaggatggcgagttgctttcaacaatggatttggattatcatctgctagcgcgtttcttgatcatccaggagtcgagagggaggagaaaggtcaggctgctgtgaaagaacaacgcatgcacagagagagattgactcaccgaatcacattctctactcgatggtagatcatggcgtccatctctggcggaggagtcaatgatattgaccttgctcgtcgaccttgcttctcgcttttcagcagatcatcttcgttccctccttcttcgtcgtccgatagccgtcccttctctttcttatttctacgttgggcgcgagacgtcgatccatcgtcgctatcttccgacgacctgatgcaaaatcagaagatagacactactatatcagcaatagagaagataatactgagatatattcgaagatacataaagaaataaatacatacaagccgatgacatcctcttgagaaaccgtccagtcaaactttcgtttcggttttcttctcttcttatttgactcagtatcgctttcgatatcgtcatcctcagagtcacccttatcgtcgtcatcattacccgcatcatctcgggaattgtaaggttgagcactaggtgagcgaaagggaaaatcaccggtctctcttgggtgagctgtgatacttcatgatcaagaattagttttaccgcctttgtgatgaacgacttcgccaccgagagtatagggttcatactcagagacaagaaagacacaacttacctctttccctttctttccctttcagtagaccacctggttttgtccaacctctaggtctcctctcgaatcgcttcagctcttgttcctctttccttctttggtcttcgaacgtccctctttctttctccgatacgaacatttcccgattggaactttcatcctcttcgccgctagataagatcacttctgtatgaaagttgatgccatcagatgaaggagaaacaacggcccaagagagctcttcgctccctttcgccgagaacctttcaatatcgaaacgcgtcgttgtcgatccacccgggtgtgccatagatgacgaaacatgatcgacctcgatggatatctgagggagtgaaggaggaggaggtgaacgagaagttgagtcaccagctgaagtaggggttggtgtgattgacttcgttgatccgatcggtttgggtacggctactcgcatccgaggtttcggacgagggcgagttggggccgggggagatgacatcgtgcttagataagagttgttctacttattctcaacgtatgaggtaacaagaaaggctctgacgttattctgtgcgtttttggtcgaggtgctgcaacagttaatgactgaatagcaagaaggaaagaggttgttgggattgatttggaagtatgttgtaatattcgaatcgttgtcggctcaaaataatctaacaaccgcgtttgtacgtgtcatcagaaaagaaatgcaacatgtataagatcaatccaatcgtccatcaacacacctcctcactctcactcccttagcgagaacacctttgaagtgatcaataatatccctatccatctttgcccacttttccagtttcttcaaaggcttcaaatccagatcaatcactttgacctgccctgcactcggcggaccattgacagaaatccgaaagattaacgagcaatctttgaatgtcatcgatagaacgaacgcaatgaggtgttctctatcagaccagtctatagatcgagcccctcctctgtatcgctgaacaaagtgagttagctcaggtaacgtcaaaggttcgaaggatgatgatggtcgtgctttgaacgatgggagattgaggagcgtcgggattgataatggatcgagttcttcttgaagactggccaatctgtcaaaaatcggtgtcgatgtaaggaagggaagcatgcaagcttcgaatctttctaacagggccgattgagaggatggatagagtacatgttccaggctgctagtctacgcgagaacaagagacaaatggcatgggttcaacactttgtagatgggaaagacagcaggtaatcgacactcacatcgttaggtaagatcatcgtcccttccgcaaatatcctcatctgattgccccttccttctgtcaattcccagcccttccatagttcgttaatggctcgacgcactcggtaatcctgtttggaaaataaatccaacgggcaatacgctaactcaacgtcgttcgggaaagaattctggtctttcaattgacgatgcatgcatgttcgcccatacacaaccttgatctcgcgctcgtcttgtggaagattttctggcgatggaagaaatccccatttaggctgttttacaaatgaaacatttgcttagcattccttgacactcgactcatggccctaaagaagaagtctaaactgacctttatctcaaccacaagaacgtcttcgccgtcatctccagttcgagtcaagtcttccatcagtagagcctccgtactatgaacgttcaatcctccttcgagcaatctgaaagccggtctgattttgaggctttgctcattcagttctgaaagaaaattatgatcaagctctataggtctttgaacagggagaaactctgatccaagcagtacaaggatgacttgatctcgaaacagactagagaaagcctcaatgttgagctgctcatcttgtgaagacacatgctgagctcgattggttttaggtaagcgtagaacgctgtgaacaaagagcggatttgatcctttgtatcggtagactatattggctccacctaatcatatgttatcatgttaagatagttagctcaggtacgagtgaaacgacatgtacaaactcagaatctttaataccttcagccagatagatccaatcggacggagatgtctcattaacgcgaagcatatctttcttgctgactgtcactctggaccatgtgcgaggaatatataaaagacgaaggaaaggaagctgagtgagattggcatattcatagattggttccttgaaagatgatagatagatatgtaagaaacagagaccggatcgtttgtatcactccgacaaggccggtacaaactcaagcgacctggaagaaagaaaaagggtgggaggaaactcctgcttccgataaattggatagctctagagtaatccgtcccagaagttgtgagagagcaggcaggtgtcacccaaagcctatctcctctcttccccccaagggaaccgtagatgataacaaggagcggagccagcctctactttcagcatgggacagaatcgacgagcgagaccctcgagagtccagttgataggtctcggaacagagtgccagaagagaccaacagatctgcaaggaagcaaattctagagagaggagagagagacgcatgagagatgggaacctcatcccccctctctagatttcttgaatgtagtcctagcctttttcgcctctcaaagagtagttttcatctttatttcgagcctatacagtcggatctttcgagagtgctctactcacgtaacaggggtatggggtcgctattatacggaaaggtgaggctgaggccgtcctgatctttcggttacaaaggggagaagaaaagagagcgaaagagagaagagagaggacaagtcgtatgagtagagaagaggagatgatgatgtcgtttccctgtcttgaagatcagaacgttatctgaccagggagacgcaagaggatgaatgtttgtgaacgagatggatgtatgcagatagaaagaaatacattggggtgagatctttatttccttttatggcagtagcatcatcatcgggggttattggtaattgagttttcaatagaacattttgtaatgcaaggactacagcgttttgtcgatatttggtagttttcgcgcagtaaaccaaccggcctggttcagcccggttggcgtccggttcaaaaatgctgagcggtgtctctggcgaaaaaaaggaatgcacccgaccgctcagaaacctctgacactccttaggcttccttcctagctacagcttttttattcaaacaaagctagtcttaacaggtattcaatatgggtcagtcatcggtttacatgttgcttgtctttgttgagaaggtagggtttatgggtggctggggaaaagaaattgaacgtcttaccggcccttttttctctatcagctcccaagagaaacaaagcccagaaggtcgccctgagcgacttccttgctgatgacagtgagtattccgagtatcaaactcttggagaacgccggcaagaagtgtgctgatgatctgtctgacttatagagcatggttcgtgggccgatgagatggaggctcttcctactgcccgtaagtcctgtcgttcgcttcttcggtttctggcctctttctttttttgtcacttcgcgttcgtgcttctgcctctgtcgtggatgttacactgaggctagtcgtcttttcatgttcagccgcttcgcgacccgagggagagcgactcgacactggtgatttcatgtccaggcctgaccgagcaccgcgaggagagtttggtaagttctaactcatgagagccggtggccgcgacgaccgtgtggcgagtttgagattatgcgtgcgttccttggatcgtcagacgggcctcgactgactctctggtcttggttctttagctggagaatcccggggattcgctcgagaagagatccctcttcctaccagcgctcccttcactgcgtatgtcggaaacctctccttcgaggttggagaggctgacgtagagactctcttctctggtctctcggtatgtccatgttctgtgcacagttcctttttgactagatcacgaagacttaatggactttgtttatcgtttttaacattcgtgtctcagatcacctccatcaagatcatcagcgatttcgagggcaagcccaagggattcggatatgtcgagtttggaactttggatgacctcaagcaggccatggctcgaactggagaggttagtcaacccatcttgatatagataattagaacatgatccaactaaagttattgtggcttgccacgatcaccttcttagtccgtcggcggtcgaactgttcgaatctctgtcgctgagcctcgtgagtttcttttctgttctgttccggcaaattggctggaaatagactcattcttgactaactatcatgatacgaaaaatcttatgaattctagccaagaatggagttcggtcttcccagtttggtggtgccgctgatgagaagtcttcctggcgacgagaaggacctcttcctgctttggagaacactcgacgacctaacaacaatcgattcgattctggacctgcagccgatgacgatcgagattggtcctctgcccggggatccaagtttgttccttcctcggacactggatccaggtttggtggtcccgaccgcagggagggcgtgaaccctggagctgctgaggctgctagccagtggaggaccggaaagcctttggctggttctgctcctggtggatttggtggccgagatgctcctcctcaccagcgaacccccagggctgacgttcctcccagcgctgctgatgctgaggaccaggtttgtcaggtttcttcatttagtctcgaagaaaaataaaatacagaatgttctcaattgacttgggattgtggtctttctggttaactaagtggactcgaggaaagaacttcgtggcttcccctcttgctcatgctcctgagcgacagttctcatctggacctcgagcgggtgtttccccagttgttgagacctctgactggaggtcgagcacgcgaaagcctgctttcgatcgatctcgtgagtgggctttgattaggagctccgttctgaattttacagatcaatctttgttgactgaatcgaacatcttctttggtttcgttttttcagccaactcgtccaacaatgcttcgcccgtgccactggctcgaaaaccaatgactcttctcccccgatccggctcaactgtttcttcggccggaccttcttcccccgacggatctgtgccttcttcccctaaagcgtcatccaaggcttcaccctttggagcggctcgggcaatcgatgtgagcgcgcgtgagaaagagattcaggaaaagcgactcaaggctgaggctgagaggaaggctgccaaggagcaggagagagcggctgtgaaggatctggagaaggagaaggagaaggtgaaccccaaggtggttctcgccaagcctatcgaggttaaggaggagccttcaaactggagggagcgacctgccaagggggccgtgcctctttcccagcaggcccagaagtctgtccggggagagcgaggagcgtccgccggtggtgccgtaaagaaggatgaaaagaagaaggaggaaaagaagagggagagcgggaaggcgttgaacttcaacgcgttgcaggtcgaggatggtgaggacgacgagacggacgaggttgaggccgttactgagggagtcgagaagactcagatctaaaagacacgtggtgagttcattctttgtctgtatattcctaccatggcatccgcgccccgcttacatgactccgatcgtatctcgtttatgttttcccttgatttgtctttctcgttacccctgcaatgcctgctttctccgatttttttccatgtttacgtcggcttttcgtttgttcttaagagtttttgagtgtcgagtgtggtttttcgttcaatctttctctttttaaaaatgttgctttgctgtgtttctttatgctagactctgttctcaccgactgattcaccgcaccactaaggttgtcgttgaatatgaccgatcactgtccaaaagactgtcgaacaaagtcgtcttgtaacaatcaactatgaagcatctgaagcaaaaagatatgacgtagagaaacagcgataagaatcttggatatgacagggttcatcatgtgtagatgactgagatttgtttctctgcgttgtctcctgatcaccttattcctttcgtggttgctgaatctgtctcggtctcctcgtgtataatagctacgcgaaacactatgaacggatgaaagatcagcggcgagggtgaaacgaagtgttacgtcagcctgatctaatgacgatcatttttaagatttgcaacgtgtttccactgcccgagcttatttacccctcgctctacctcttccttctttcgacttcgtctatcaccgccgcttctcacttctttacgtcttactcatagtcaaacgtaaaacgtgctgagctgaaccataagcagagttgactggaccagtagagctgtttggacggatggccattcgacgaatatccgcaatcgcctctctggtgtctttaattgatcagcgttcttcctcctgctcatcttacacatctctgttgacaaggctctagctagttctctttcttgccgaccgcgcgtgaaaaaaggctgggcatgtggcatcttagttaacaatgctgaccttctctgtatcctgagagatactcactcacacgcagtgctcacaatttcttctttttcttttcttttttctatttttttcccattcttgtttattatctccgatgagagacatgctcttgacttggattaaccgtaatatatattttgaaagaactgatcgacgaatggaacaaccttttgaaactcttgaatgcctagctgtttatttccttttttgcttgtttgaatctcacgtgtggtttcccaaacgaaaaagagatatcagggaaagaacaaggttggaatgtataagaatgaacagatcctttcgactctcgtacatctcgagtcaatgtcgtagatcatccttcccctcttcttgacattgttgttctccttattctctccgccctagtgcaatctgtattcattgtagatatggcagacactacagttatagcttcgaaacccaaaaggggtcttttctctagaatgaggagcaaccatcatcaaccaggtaagagaaaacttcgccgcaagctttggaaacagatttcgagagggcgcggctgatagaaacggagttgatcatgaccatgctttcggcctcgtctcgtacttcagccgagaaacaatctgatgctgtccttcccacacttacctcgcctaagaaagagcatagtgaggccatcaagcctactggcgaaaacgattcccagagctggccagtcgaaaacgcgcctgttgagagtgagaacaaacatatcgagaagagatcgttctttggtcgatgtaagcttccgtcctgcgcttcttattgatgtctttaaatctcggtctgatattgacagatgtctattaattcacagcctcctctcatcaaaagaaggagagtcttagcacaccggcgatcatcatgcgatttgctcattcgagcaccccaaccgacggttcgctccggatcagagtgtttatggatcatccaactgccgaaccgctctacgtgaacattattcctggtgttgacagtcttcataccctgaaacgcaagatcctcactgaggacaacactcgattcttggcgactagacaaaatcgaaaatctcctatcgaggtaaagtgggatattccagagtttctcgaggaagaaccgacggaagatcattatgacttcgacaatagattggatgtctacaagatttcttgttcgtggatccatatcagcaagatgaaacgaacgtatgaccacacaaaggtctttcattccattctgtcatcctacccatccaacttgatagttgctcaatccgatcaagacgcaaaagtgccactcgacttggggtccatctttcctccagatacacctgagatggtcgaagctcgagcaaaagggctaaccgaattggctattcggattaagccacaaaagagctggccgatcctggtcgcgtttagcgatgtaccgacccatccattcgtggtggagtaccagcgaggtatgcgtgtcagggatctcaaggtcatcatcggagaggctaggaccaatctgataatcatcatgggtgacgcttcgaccactacactcgatggctcagaattcttcctcttcaaagtacatatctgatttgttgtgtccttgcgccatctttttggtcttatactgactctacgttccctcgcctatctttttagtgtgcccaaccgggtaaaggaacctcaccccggacgttccccaatcaaatcgatagataccgaggtcttaccccggccacactgtttgatgatgaagaagtcgaatttgcatcacataggttcatgaggagcttccgacccaaacgaggaaacaatccattggaaaaagttgagctcgtggcgttcatggtggatgacatggaggaggacctgttgaacacgttgagtggtacgtttcgttttttgtcgcctcccagctttactgccgatctcttcttatgtgctgttatgtgttgctgacttcagaaaacgtgtccatcatatatatatatataaacagtaaattcaaaagcacctccccgttcaatattatcatcccctgccgaacagtacgccgggttacattctattcaaactcccgatggatcaaagttcggctccagtcgatcccgactctcatactcggaggcgtcccaatcctatcttactcagccaattcgtcgatcctcagccgctgtattgcctgtctcaaggacagacagcatggctgtgcacagagaatcttgtcagccctctttgcaaacttcggcgacctcttcgcctaaaactgccccactgtctatcgtatcaacaaacatggcaaagaagcaaaacaaagggccacgagtgattgaatctgaggagtttctagagacggaatctcctcttgctatttcagacccggccgaactatctgattcagacatgtcgggctcgaatctggacatacttaaaacccctccgattgcacttacagctgctaacgatcatggcttgcgcgccgaatccggttcggacgagaaggacaaggctgatgaagaggacgaaagaaccatggtgaatggctatgctctcatcgagggcgctttgttttcactctctctcaaaccaatcgataggaagggtgaaaagttggtgaaaaacaatcacaaagggatgttcagtcaagaagaaccgttgtttagcgtaactcccgttcatgttgggtagatctttacctgagaggatgggtatctgtatacttttttttatattctattcttgtttattctgtttgttgacatacatataacactcatatagattttcttcatttctccttgttgctttcgaggacttatcaatgtatatatgttggccgtatcaggatggttgatacgagagagaatgctatcagactagctgatggcttaacgtgcaatgcatggatgcattataaagttgttttctcttaatctagtcgtcaccatgttatcactctcatctttctcgcttaagtaccctactctttcgttcatctcgtctgcctgcctgcttgtctgcacaccacaagaacgaagtatagcttctggtatcatcaacatacataaagtagaagacaggttgtcgaagggactcaggcaggtgtcctttaaaagaagacttgtcgactctcaatcatgacccattcatccggaccgaacagaccactgcccgttccaccggtccgaccgacaccttcgccatcctcttccctcacttcatctccttcttcaatacgtcgaccgctcaacgataactactctcctacttattcccctcgaaatccgagtcgttcaagtctttcacctacgcttcctcagattaagagatcagctgagtctgttaatgcaaggtttcatgcgtttgcttctgcaagtgggtcggaccctcctccagcttttcaacatgtgtcccttcatcagcatcagtacgcaccagcctcatcaactccgatagaaggctatgattcctatgttcaacaccagccggtacatcctcaatcgcctccgtttgcaccagcatcgcctcgatcgatacgcgatcaagactctgaattatctcctttcgctagaccatcgacagctggatatccaactcatcccagctcagcttctaatttctacacaaatcaccacaaggttcgcccaacatatgaaccaggctcagctgagcaggcgacgcagcaatccttgtacacaaaacagtgcgaacaagaagaaagggataaggaagaagctttgatcgcctcgttaaatgggatggaacttgaagaggaccgggacagattgctcgaagcagaggaggagaggatttttaagcgagctcaagaggaaagtgtgaaaatggagctaagcaggcagagaaacagcacaggatgggaaacctgggaaattgggattgggaatggaacatatgagggtctgcatacaaatggacaattcgatcagtcggattactatcatcaggtttgtttctgccattctcttcgtccatcatttagactcgtttcgtttctagacgtttggaaaaacaactgagacttattcgtggttatgttcttcgctttatctttttcatttgtttagcctccacctcctgggagcgatcagaaagaagaccctggtatgatctcgaccgggctatcatcctctgatcaacatttcaatgctctctcctcatcgtctaaattcttcgaggatgaattcaaagcgcatgcagagatcatacaaaagctgaaagactggcagtccggtttgctcccagccggtctggagtggtacgagcttatcccgaacgaaacgagaacggcgctctcagaaaaagaagtggaaagacagggtctgatctgggagatattcaggagtgagcaggaatacgtaaagaatttggagggtgggttaaatgtgagcagaattcgggcgcttcataatttgtatcaaatcaataagcccacggcggtctctcgattgttgtgcatactgaatatctgttttgtttttcctcattggatagggatacttcactccgattgctacagttggaccaagactgatgcgtgaggtcttttatacatcccttctcttactcttcctctcctaaggaaaacctcaaacactaaattctgttgtaccacgcttgtttatactcagccccagaaaaagtgcccactttcatagcggatatctttcataatattaactcaatctttcctaagcgtcggtcgttttcccacagattatttcatcggctttggcttttctattgtcgctaaactttgccgtttatacatctatctgcttgtctacagattcaaagatggtaagtctcgactctgagctctagaatatgtgcatcatactgatgttcaatggttcatactgtttgtaggtatatcatttgcaggaaaggcagctagaaagtcatcctgtggtgagttaatctcttgatttttgcgtatgtatggcttttgctggttataaccgatgtggtgatcatcctgggtatgatataggttcaatcgatatcggatattttgatcatcaacttgtttgatcttctgggtgattacgagaagtatctaaaacagtgagtcgaatgatgtcaaagacgtcttgtacaaattaagatgatgatattgagcttcttgccttgatatcagttatccctatgccgaagcccgcctgagacgggaaattactaaaaaccacgcattcaaaaagcttgtggatgtgagttctaaatttatatggcgattttttctttgtgttcctcgattcatgtcttacaaattcattgttcattataggattgcggtcgaagcgaattagttgtaggtcctcttctccttttaatggacatatctcttccttgataaaaaaactcacttgatgttctctgacaaacagaggaagcaagacttagcgtcttttctagtcagccctctgagtcgactgtcaaaactcgccttggcgcttcaacggctactcaaaatcactccgaacgaccatgaggataaggagcagatccctgtcatccttgagttgattgatggaatgctcagagctgttcgtgagttgttctgaggtattctctttgcttcgatggttgtcaactgtgcatagccctgatatcgttttcttccgtttatgaactcgaatttggtctccaaacgctgctcttagagcccggtgtggatgctgcgaccgccaaagtccaagcatggcatatcgcacagaggcttcgatttcgtaaaggagagcgaaacgatctcaatctagacttaccttccaatcagcgggctcttctctactccggaaaggtctaccgaagacaacgcaatgaacgagacttccatggatggaccgatctgttcttgattttgtttgataactacctgttaatcacgaaggaagagaccaagtcagggggccatccaaataatgaagaagacacgacgtacgctgtggtttccagagtacgtttcatcagatgtgatgctcgatggtgtacttcgtacagtagtttgaactgattggtaccgcttgtcttatagcccttgccgttagaatacttgcgacttgtcggttcggaaaatgacccaggcgagcatcggcgtgacatgattgttcgtacagactacttgttcgttagctggaggtcgatatgaataaactgaggaaatcgttgttactcactctcttatttattcatcttgatgtttttgaaaggtcgattatcaacgtaaaaaaccaatcaagttgtcaaccatcctagagcctcttgttcaacctgacgtaagctgcttctcgatctaatattgacgatttacattttataaaaactaatttgtacgcgttgaatgacttcatagcgaacggtctatcc

SEQ ID NO: 1812 - DNA, 4957 bp, Xanthophyllomyces dendrorhous
atcgagcacaagggtaatggacaagcttatagtctatacgttgacaccgtggcgtcgcgcaaagagtgggtctcgaggcttaagcatcaaattactgttcgcaaggtcacttcggaaaacaatgctgtatgtcctttcactgtctcgtcgagtccgatatagaaggcttatatgaatcgttgcgcgtattctgtcttccggttggacagctatactctatgcatactctcacctactctcctcgtcgacaatcgcttatcttgacacgtccactttcgatctcgagagccactgaatcaactcaattaactgaaccagagacaccctatcttagaactgcatcgtccttctcagcagtaacactatctccctcatctcaccgctcttctatcccctctgtaccttcggtggcgactcctaagctcggtttgaatatcacttgcgctggatcatttggtgagctctcggatagttgttatgtcttcatgttcgagataatattgatgctacatcctctgcagtcgcgtttggaaagcgatcattcgcagtagcagattcaaacggtatcagtataggataccgggatgacgctatgtgtaagtcctcagtctctctcaaactccgaagcgatcatgtggttgctcatacccttcagattttcatcatactccataagcccatcgatgtatcatcgagtcctcttcgatcatcgacttgtttgtcctccaagatcttaaccgtatattggttgtagccaccggaactctctactcttacgatctaggcaaaatattggtcgatgccaatccagataactggaagattacaagaaaagagtctggcgaggttctgagtgcttggggagagaatgttaactcggtttgtaaaatagggtacagagaggagattttgcaaagttagtttttttttaccaacatttcatcttatgttcaaggtataaagacgctgaaacctgccacgacctatagttgtatacagttgctacaacaaacttgtaggacgttagtactttcttctctggcttttactgatatatcatgctcactgagaatcgctccttttcactatctagaaacaaccttgaaagctttagagctagtcgacaacaaaccttctcgtagtcaatctctcgccagtgctttccaccgccagccgaaatcgaatgataaatctaaaccagcgacgtttagaacggtggctgaggctgtcgtgtcgggtcctatcaataacattggattcttcgagaaatatctaagtcttccgacggacaaaaacggagtgatcatcttggacctgatgaagtaagttgaaaagcagagtacaatatcgaagtttgaagccctgatgtcttcttggctttgcgttctatagcccaaccaggaccatcagctttccaaacatatccgagtcatcgagttctaaccccacaatctctggcttgaagcatcgggtgacatcatactctgctcgtgagatttactcttctaaaggctcttaatcaacgttgtcaaattctattttaacccctttttttgttttgttttttccaaagttctcatgcatcggatcagtgagaacgctttcttgattgtctacgaaacgggtggaacatggggtaagcaaattgctcatgagaccaaagacatcgaaccgatagtaacgtaatttctgggtactttccgtagtcgacaagcagggttctgtgttgaaagacggagtaagtgtgtatctactgtcatttgacaaccgtccatcaactcctcattaacgtctcttattatgtctaggcatatatcacctgggaagctcgagcagcttctgctgtcgtccaaggctcgaacatcgtgctcttctcaaaggatggcaatttcatcgaagtccgctcgatgaattctggtagacttttacaggtgattgagacccagaaagttaggctaatcagcgataatgggccagacagattggtaatgggttgttatgttgagaacggtcaagagaaaccgttcgaggtacgtataattcgcgtctgaactttttctctttgaggaacaatagattatttcgttcaatttactaaatttgtcgaggcgtgaacttggtactgtagttggccgagacagttgctctcccaccgttctcagagggaacgaattgaagggcttatgcacctctatcttttcttttccatttgcttctatctctatactcagctttttgtcttgcttcttctttttcttttctgttcaaggctatcttcctgtggattatttgataaacggtgtttttgcagatctacttgatcatattcttagtgcactataatctatcctttcatctacttgctcaaacacgctatataccaagctcctattgcgtcttctcacgtatctagtttgcgaatacaagagaacatgtcttctgtccgatctgaactcaaacagaattggttgtttccgattggtttcgccccttgtcattttctcgcctctcttctatccgataataggctctgagaattgaatagatatcgaagcggttgctcaagtatatcgagctcggaactgttttaatcgatccaacggccgctcattgttccacgtctcgaacccttcacttgtgatccctagggtaggaagacctgactgttggacgatgaacgaggctgaaatcgaaccataagcagccgctgctccaaaaagccaaaaagtcgttacaatcaggaacttggcatagaattatacggcgaaggagcagaggccaaccaaccttcgtaaacatctccttgttcaacctctagaccagccattagccctcccaaaaatgaatttcctgcacctgtgacctccttgacttcggatgccgaagcgtgccagtaagaaggtacccaacgaataccgtgtgttcgggtgccaacacaggcgcctagttttccacatcggaggaccaccgaggcttcggagggtaaggttggcatatcgaggaatgtttgggtgatgacattgtaatcggctgttgtttgaggtataggaagtgatagaagagctatcatgattgaaacgtatgaagagaggaaagtagggattaacgcgacgtatttagggaaagaactttcagtgatacaatcaacgaagacgaaccggcagcttcttcatggtttggacttaatactttcactcccgtcaatgcggtcttcagctcctccaacagatccggccgacagctcattggatgaggctcccacaccagttgcggtttccagtatccttcccgaggttccagggctttgagagctgatgacgtagccataacctgatcgggagaaccacatatgtgtaggtacttggggcgcaacgaggggtaggaaagcagatcgatgattgtcaaggatgatgggggatttaggtacttgaatctgaacgtcgtaggaaagcgatgaaggattgatgaggcggtcagctcgttagaccaaatcagatcagactaggtaagattgtgaatcaacggacgttctgtctccgttcttgtattgtatacacgctcgaacactgccagatgtcgttctccatttccagatatccttcccaagtcgatcaagatttttgaattcgagcggatgtcctgttgggtcggtatcgacgatgattcctagctgactgggttgcaaccagatgcgagcacccacgatagcataaaaacctcctcctcctatctgttaaaagcaataaatttaaagatgaatataagtcatttggccgcatagagtgtatgtgcgctgtaaggatggctatacacgattgtatgatgaagcagcggctgagccgtcctcgtttagaaatctgaagcagtccaccaagacagtactacatgaaaaaacaaccggaacagaggacacagaaccaaacgcaagtggacaagaagtctttgttagattccttgtagcatgatatgtcaacttaattgaagaaagtttgcctaacgaatgtttgtcaattcgtcagtgaacagtctatcgttagggcttaccctaggctagagataacgactattggctgcctgtctccggaggtgttctccatgtatatcagatacgattcaagatgatcgagagcgcactaattttcgtttctccggtcagcagtcagtatggctcagcttggccaaaagctaagtgagtgcttgtggttaatgttgatgttgatgttgttgctgttgaggtatgctgctattctgtggtacatagttatgattacaaaaaccagacgattttctctattcgactcttgattttcttctattactttcgatcatcagccagtaagcgagccatcatccttccctcgtcgccatcaccttccatcatttacttgatcattcaccagcacgcgaccaagcgactctcatgttttcaaactcaccatatcaatctcaacaaggctatccttcctccccttatggtcaacaagctcagccagaccctctcgccttttacagctcacaatcaatacctgccgggtcagactcgaccggatacatgggctacggctcgggtgtagcaggaaacatgggtggagggattgaggctatcagcgggagaatggactctggcccgatgggaatgcagagaatgtctggagaaggaagatggtgggaggcgtttggaacatgtgggtttgaaggagagcctcctctgatggaaggtgtgtcctgtttcttcttccttcctttaccctcaagggtttctactatgcattcatcgcatcctgactgaatctttcctgcttaccatggtccttctgacaactgtcaaacctaaatcgaacggtagaactcggaatcaatccgtcccatatcctcactaaatctttaactgtcctcaatcctctttcgaaaccagatgaacagatcatggatgatgctgatctggccggtcctttac

SEQ ID NO: 1813 - DNA, 16211 bp, Xanthophyllomyces dendrorhous
  misc_feature (14008)..(14017): n is a, c, g, or t
gctttggattcgctatggtccttctcttcgtaagttcactgccgtttccttccaaaattcttgcaccttcgggtcctgattgcttgaatttttcttaactaaacggaaatgaaccacacagtccggcaaacctcagttctcctacatctatgccatcgctctgatgggcacgatcgcgatctatacgcttctcaacatgatggctcaacgcggaattgacgcttatagaactgcgagcgtattgggatactgtttgcttcccatggttggcttagggacaattgggatgggtgtgggaatggagtaagtctcttgtttcttcatggaatgttaacactgatatcgtgttaatctctttctccctgatctctctttccttttctctcttagtcgaccgctgggttacgctctttctttcctatcagtcctttggtgcactcattcggcttcgtccatctttgtggccgtccttcgaatgtcagaccaaagattgttagttgcctatccgatcatgcttctctacggatgttttgctctcttcaggtatgtaaatctctgtctctctgttgtcttctcttcttgttttcttttgacaaaagaatggtctaactcttacttatgtgcgcttaaaacactcgttacatcctcagtgtgtttaccgttggagttccaggatccaaatagatataatgcgcttctgcgacccataatcttctcgtcaatcaatgtaatcctatagaattgacctgccaacacatcgagccgcttctacaagagggtttcgcttgattagacttcatattctattttattttttcatctccaggggaaactcagtcttcgtcctcatcgccactttcaattctaagcccaccctgctcatcgtcacttccttcaggcgtcccacgttcctcccgtcgttgttcctcccgctgctttttcttctgctcgagcttcttgagaacttgagtggcagagttgaagatcccgcctgtgggcgctccacaggcgaaacatttgggcgtcttggcgaatcgcttgatggcacatctgtttgtttgagaacaagattcaaaaaatagagaaagtcaggtgatcaaactcagctttcaaaggtctggaagaactaactgaagaagagaaagacgaaagaagggacgcacgctgaatcaaagaaatggttgcatttcgtcacgaccgggtcgacgaactcttttcggcagatcaaacaagcgaaaggaatatcttcttccgaatctgagtcatcgactgcttgaccagcttctcggagggatgcttcgtgctgtttgtcaagctgccagcctgatagatagtctcctcgctatttcaagagaataaaacaagatgaaaaagacacataagaagaaagattgagcaagttgttagttaatggacagagctgtgaatagaaaggagatatatatagaggaaaatcaaagctagatgtgtgatacgtacgtcatgcaagaatttacaggtatctccaaaaccacaccatcccgtctctacaggtttacatacacaaaacacaaattggaggacagcggccaaagtgagcacgaatgaacaagataaacccaattacaccatgattaaaacgccatacctttataatccttgcaaacatctggctgatagtctacaacagtgatcgttctgatattactggacgctttctgaggaccagctttcatcttgtttgatacgccactctctctttgttcgagatgtgacttgtaggcagccgcgccatgatacagtccatcatctggtatgccatcgttcaaggcatcctatgaagaaaggtttgaatacaagataaggcgttcgagtgtcaatcacggattccactcctcatgtgcaaccagaagtgaaaagcgaagccatacagaaggaaaggaacatacctcgaccagttttgctcttttcctcttttcctcctccttctttgcatcagcgtcccaatccaatgatcccgtcgcataattcctgttttccgctttcgatgtcccactagtcttccagttaacattgaccccatcatctaacccgtcattcatgtcctctctttcccagtcttcttctttgcgtgattttcgtttcgttccctggaccaaagggttgtatactgtcttcttggatggtatgcgaacagcagagccggaagatgacgaggtggagttgttggcggacgtgtttgctgatggggatggcgatcgctgacgagctgtcggacgaggcttagatttcttcttaaagatagctacaggagcggaatcaggctcagaaatagtgcttgagttgaccattatgtcttctaaaggagtaagagggtgatggtcggtggagtgacgaacggtttctcgaagtcattacgagagtggcatacgttcgttaagtagccgcgcgttcgagtaacttgggctgatgacaaatcaagtatctgggtaattagacggagattgatgatatagatccaagactcatggatcaaattccaagacaaacagagcgatacagtagatcgatagattcaaataggacaggaagcgaaaacaaaagatgaatgtatagaaagattgaaaggaaaacgaatagaaaaggtcgatcgacagaagaatcgtgcgtcccacattaaaccgtaccctcggattgcaccacagctgtaagtacaaggcggccgtccatagaggcaagatgagtacgagtaattttaaagaggacaggcttcagagtgtttataaaacgtacgttctcgctttgcaggagttttcccaagatggaggtgatctttgagacctctgttgccaagacggaacgaccaaggctcgagatagtcagccaacaagatcagacggcagcgaagcagtttcaagatactcgaaagcgatagagaagagaaactatatacgtactgcttcatccaggcagcggttcgataaggcttgaatccagcaattcctctctgtcggttccattgttgtctcttatcggccttcttgatggcctttgcttcttcctgtttgatcgatagataaaagtagagtgagcgtttagtatatttgacaaaacgacatgagcatatgcttgagggtgtgctaaccttgtcaatgtagccatcgtcattggcatgagcctttggaaccgatgggaacgcaaacgatttgagtgaaagctacctcgctcctatgggataagaaaagtcttcactcacgttcttctcagcaagctccgcttggccctccacgtgatcgtacgtctcgaaggcatgtctccgggcctgagaagcgcaatgagcctcgtgatcctgattaagcattcaggtcattgtttgatgttaagctctacttcatagaaggtatacaatgagtatctgttcaaacgacatacctcgtcgagtcctgaatctagcttgatcgttgtcgataacctacatcgtgacagatgggacgacaacaagaagaatgacgcgcgggttaaaatctttacatcatgatagagagtgtggagaagcatacgaaccatcctatgatctggtactcgtgcgtttcctttgtgaacgagttgatatactgcatccatttccgtaagtcattcatcaagtgtagctcgacgtcaatgaatgatcccattttaagatccaactgtataagtcaccaagatatagaaaagttacacacattctgacttagatgatccaagttcttggagatcaagatcggaatccggaccttccgagtttcgtcatctactagctcttgcaaccagagcattgccattgccttcgtctgagatccaagtaagcccacgaccgaggctccttgaagcttgaatgtcaagaccgattggaatcgactataacagggcaatcttaatagatcaatgtcaaattcggcccgagatccctcaatcttcgcttcttttttggacaatctctcagtagaatcagtagtagagatagtgagtttcttcatatcactggcgagactttcgtattgagggtcgaggtcgatcacaattggactagaaagttcaacagttccagtttccctataaatcaaatccgaaacggtggttcttatcaggtctatcaacaatatcaacggccgttagaaagactacataccatccaagaagattatggggcaagtctagctgaacaggtttgaataacaaactgacgctgacacctatgagaacatgaaaagataagtatacaacggtcagatccgtctttgttgtatcgatagtctgtatcagtgtagtcttacgtccgaatccaattccctcctcaagctatggtcaaaaatagttaccgaaaacgaatatcggttagttgagtatctgaagtcgaattcactaagctgagatgtatatgagaagatctgaaacttacagcaaacaggcggctgacctcgctagattcgttgaacaaatccttgagaggaaggttgacgatacccagaatcggatccttctctcggagcgcagagtttcgaacgacaatccgaaccacggtatcctgccagctacgttcatagaagcaacacgcaccattcaggatgcattcacatatgtacattagtgaaataaatggacttacttcctgatgaacttctcagttccagcctacatagtcacaaaccgagcccaagaattgatggaatgataaagccagtgaagaaatcagaactgtatttgaattatgcccggtgcacggaataagcttacctcaaagtatggtgtgttgctgtactgcttgacccgagttttgtaaaccatatcgtcgttgacgatgatctcacaaaacgcactcggtaaattatctgcttgctcagagacctcctattggatcactcgtttcattaagcatgtcaggcacagattcatattgtacttcttcaccaaaattgaatcatagaaacaatgatgacgagtttactaacatctgtatcttgtccagcaactccttcgcgttccttagcagtagttcctttaagattttgtctctccagctggttgatctgttcaaacaacatgaagtgtaaatagatagagtctagcaacttaaactcaagatacttagatgttggacgtacttgatggatgaccacactcaaaacaccactcttccatcggggatcaggactgagaaggacaaaacgaagcagaaagagtactctcaatacttaagcacaatgatttttctcaacaagggtatgatagatggaacgaacggtgttcgggtaggatcaggtaaagcgggagggccatctctggcagcggggttaggagctaaaccaaagacgaaccaacacagataatgagtataatctttcgacaggtagggataaaatgaaagccgctaaccaatgtcatcaaatcgcatctcttgctcaggaagagatttagtaggcacggctgagggatgatcttctgggatctcgagttccttgttaagaggagccttttcatagtagccaaccgaccagtgaagctagataaaaacaaaggtcgaccatccaattgagccacgatctgtttaataaatggcatttgagtggagaagagaccctcacctttccttgagatttaccaccatctacccaaaaaaggcccaaaacaaacaccgagagtacccaagaggaggcaccaggcgacggcaatgagttcagcacagtcagacaagtggcgtttgtatatatatgtacagacagagacgaaccttcgaagccttgaatatggtctgctcgtcgaagcatcacattgggtgtcttcatcaattctttgacgggaactttgactggagggaggtagaatctcgccgtgtcagacacagtcggtcccatattagtttattctctcaaagcattaggaagagaaggcttacttcgtccgataatatcatcattggtgtgctctgtgaacccaaaacagacaacacatgttagaaaatcttaatcgatgggtatgtagcccgtccctttacgtcttccatcaagggtacgacttgaaaatatagcagtagactaactgtctgaatcccaaagcataacactcaagctttcctctgtcttgacctcattggcggtaatcaagagcgcgcaggtctcctcaaaaactggatttagatcctcagatatgatcctagtcgaataaagtggttttccaaatttggagtaggcgagcacgatgtaaggatcagaagatcctagatccagtttagattttgaatagagaaatacgcgtgggatggacaattgggttagcacgttgacgtatatgaaaataaagaacaaaaatatgacaaaacaaaccatttttgtcctgagcactgagatcctctccatgatgaatgcaaatcaagaaaacgccgatcgcctgggtatctccaatggccgctcccgaaagcatttcctgaagattgagcgtcatcgactatacaagcaatcgtaaagagtacaatcgaggtttccaaggattcagtcatctcacgtgttctctgcgctatgatttgcagaatgaagggcgacaaaccttgggagccacaaactcagctgttccagcagcaatagccattttaacgaaacttgagaccataggaaggtccaaaacattaggtaacgccttggtcatagggatgaccgatacatccacatccggtacacccatctgtcgattaccaataacaggtagataaatacgagttgaatatataaaaacgcatatcgacacagaagtaggaatacgtacgaatgtgaaagtcacattccgaacgaaagggtagacagggatgaactgcagtcgcagtcggattgtaccgacgatgccttcgatctgcacccaaagaggaatcgggatatgaacccaatcaaagacctgtttgtttatttgaattcatggcaacaagattcagttgattaggtcttagaaaattgtctggagaaaacggatagatagacggacaccaaggaaaaattcgagtagcagatggatgttcttggaccgttcgtttgcctctttaccagattcagcgctatatgcgaaggcaacttccagattctgtcaaatgagaaataatgagcgatttttcgaaacagaacgttaattcgcaaagccagtagcagacaataagcagcttattaggaaacaatagaatacgcaccacatattctccggagtcatccagatcagcttcttcttgagtggcagctggaccgtttgcactggcttggaccttctccccgttcttttttctatcataccaaaatatggacttgtacagtaagcaacagaatctgaagtacgtcaaactgagacaatagatactcctacatacttcatctgatcttttttatcgggtaagctccgcatagagataattcggaacggattggatccctgaccgacttctgaaattctaacggcatccaccacagcgggaagtgattgctgcatgatgtcctccaccatatccacgattgacagaaacatctctatccaacccatcaggtgatcgtatcaataaaagaatccttatcgttcttctgctacacacatcctagccgagcgattggttatatactcaccaggattcaacaagccccagaacgtagctaacagcgaattgagccactccacactctccggcatcggtggactgtacttttccgctcttcgtcgatgaacatctaacctgactcgttccatctctcgctcaagtttcctagcggctccccaggaaaagaaacacgcgccaaagccgataagaccgatgacccaagatcgaaagaccagagcgatccagccggaggaaaaggcggtgaggatccaaaggagaaaagttccgatgatcgatgcataggtgagtcgatgcaagcttttgatcgttcgagtgacggcgggtgatggagcaggcgggaacggctgaagggataggtttgtcgtcttaggttttgagctatccgtatgggaacgagcagagtgacgccccttactaggatgaatcgaactatcttcagaggctctcgagtggtctgtataggatgaaagtaaggtaaatcagcatacatttcggtctaggtctattgatcacctcaggagatatgacgtactgttcaggtctgaatcttggatattgaccgcgtatccagtgaccgggtccctcacagttcgctcctgcttctgggttccatcgacctggttttcaagacaatttcaaagcataaaccaacattgttcctgcaaatcagcatggaaggccaggagatattgagagaagaggaagcgactaacgttttcagtcgatcgcccttggtagacgttcattctcctcctcatctcttctttctcgctctgagaatccaaagatccgttgtcatcacgtcgatctttcgcagctttcagttcatccgctgtcaaactgttgtcgtagttatcttgatgttctcgttctctgttggcaagactacgcgtgcaaggcgaggaagcggtgaaacgtgtaaaagatggagttagtactctgagagcaagtccatacaaagcagcgtaggaattaggctcgggatggaaaatttatctctcacgacacaattgaaaatactgaacaaaaacatttgtaacagtaaagaaggagtatagaaaagggcaaaagatgggacgaactatttctggatggtcggaatcttatgatgttcactccagttctgggcgtttgtctcgtgtgacccagcggtaggtgaagcagtcgaatccttagcatacttctttcccactggtgaggacgaggagacattcgcggacgccatcttgttggcgagaaggatggaagaaatgtcgagagtgatggcgagaaggagaggagggaggacgagcaagacagaggagggcaaaagtgaagagatctcttaagcgcagtcgatacagtgacgtcagtctcggctctattcgattccttgataaatagatggatggatagatagataaatccttcacaatctgatcattctcttcctacggttggtcttgaatgcatcattcttactattcttccaagacgtttagaaggtctgcactcgctgggaaagacacacagatgagatattgcccaacatatatcccgggaaagatagaacggacagaaatgaagactgagatatatacagcggtcgaagaggaagtagttgtctacacgaaaagcataaaatgagatgtctctatgaatgatgagactacaatgttcttgagaaagaaatgaataattattgagataggattcaggagacaaagaatgactggctcatatgttgtatgagctatactgtggtatacgacgataacaaacttgatgcacgtagaagagatgatgggaggcggtgagagaaaaaggttacactatatacactggcctatatgtaaagccttgcagatcctagaatctagttggagaaaaccaaaggagccccctcgaagatgagtctgcccaacgagacagcctgtctaggtacacaggcggaaccctcgctgttgatcacgaagcctcgagcgcattccttgatgacacacttggcgttctcgcactcgacgttgtaagcattagcgatggtcgtgcaatcctggccggtggcatctccagggaaaggcgagacgcatcctccgccttaagttcgattaataaagagaaatagcaacgtggtgagtaatcaggtgacaaaatattgaagaaatacacgatgctcacaagattcaaggttggccttggtgtcgatgcattcgaaaccagccgagccggataaagtcttgatagggcaggcggtcatagtgcctgggcaagcgttgcgagatcgagcgttcaaatttcgtcgtcgggctccaggagagatacatgtctgaccgttggcaacacagtgtcccgagcatctctggaagccagtggcgcaagctgaaatcgaacgaagaagcaaacaggtaatggttcagacgatgacagaacactaccaattcttgtgtcatgaatgaacaatgattgattaaatgatcaacttaccaaagccacaagctccagaacaatcattgggaattgagttggtagggtaggtgcaagtagcgggaaggaggttcaaggcagcaatcgcagcggcatcaacagcagcctcgagtggtccaactgtggggatatagtcaatggtcaagagcacagcaacaccgtcagtatgtagaaagattgattgatatgtcgagaacacatgtactgcaaggatcttaagaactcacgaagcgcggtagaaactccagttttaaccgatgcggtgttgagaagggcggtagaagaagctgtaagaccggtaggagtctgtcggaccgttgcatgaactagatatcagcgctcaaaatccgaagtaattttaagaagcagcgccaaactatacgtacagcacagacacagagggaacccaagttgaatgtagtcaagacaacgttgatgttattcaaggagatagtggcctgttgagaacgacgagatccaagggtatacgatgagtctacatgtcatccaaacacattctgtatatagagtgctgtagaaaacactcacacaaacaggggcagtgactgccattgccaagtgggaggtagcagcgaggacggcgaggatcttgaatgcgaacatattggaaagagtgtatgtcaaagagggtcgtgaagattctgagaagacgaggaggaagaacgggattgattgaagaggagatgaagaggagatgatagaaaaagagatgagggctgaaggaccttttcgctcccccttttataaccattcatctgtgctagagactacaggatccatggaactatttgtcgaccaaggcttaaaccataatagaaaactctctagtgggtctaagaacaggtcacggaaaccgtcgtgggcgcaaggcctacaagtgagatttgagaagtgaccaagtgcagatcgtctcaaacaggacggttgtgtgtctgagctcatgttgatacctagctttctcgggccaggtcgctacaaacatgaaggaggagggaagtgaaggcaggccgatcagagaaacaagtagggattgcgtctcgctggattcagcgccgctcatgttcgaaaagaaggacaggccaggaatgatatgtttatggctctgcggatgagcattgcgagctgtgaagacaagagttgttctcaaaagcctcaaaaagaaaaacaaggttagtcaatttggtctgtgtctcataggtgtcagtcaggctgaaggcgttgtgaattgcttagatgcaatttatcaaaagtcactgagcggcaccgacgttagcgactaaggatcagtaggcagatcggacagatgagagagaggaaaaatatgaacaccgtggaacatgaacagggggtcatcatcagttatcaacggctacaacaagcggctgaatcgttcagtgggcacgatggcaaacgagagagtttgaaccgcaaacactaagagaaaaagacctgtccaagccacagtcagaatgattccatgtttttctcattcaagcagtcggaagcgggaagtggtggattgagttggctgacgagatggaagcaacttcagcagccagaagatcaaatagagatcaagacaggagaataatcgcatgaatattaatcagatgatccaacctattcattctcaaatttgacgatgccatccgaattcagcgggacgctgagaaagatccacaaaacgtggcttggatgtctaatagaagtttccttttgcgtggcttgaatgttcgatagtatatccctttgatgtggtacctacaggagatctagatctcagaagatctcagaaggaagaatgcgatgaagcagaatgtcgatcatgacgagcagttaaacgtcggaggatgagctcgacagatgacaattaagcatattcacgtttctcggatgtgtgtcggatgaaatcagggtgacagcctaaggtttacgtccgtttactcaatcatgactaagcataaagcccgaataatctgcatttaaccttttcatcatctttattgatacttgatcttcaaacacatacattgaacctgcatcaacgctaattttgaacacatccgaactgacttccccatcctttccaaaacataacgcctgccatgacaactatttcagccgatctatctgcgctatctataaaagatcttggctctgtgccgttggaagaattattgacgacagcatcgacttaccttgtgggatctcctcagcaatccctaccgtaccttaatcaagctctcatcctatctccttcgtcagctcctattcatgcacaacgagcggtagcttatactttacttgagaactggccaagagcatatttcgatgcctgtcagggtctagacgatgatgcagaaggattgacagatgagctcagggcagagctcataggtttggcagggaaatgtgccgcagagagaatgatctgggatctggccgtcatcgcaagttttttttccaagttttttttttgcttccttcctttttgttgtctcggagcttgcttcatacgatgttgtcgtatatttgtatgcttgcgtattcatatgcctttgttcttggcttgaaaacagcatctagaagaggccattggactgactcggacatccgctttgcttgccctgcaagcaaaggcactgtcgaatcttcagaaaactagcgtgtctccagtcaggacaaggatgttgaaccaaagaaaaacaaagtttctggaagaagcgttcccaggaatagatgaggatgaagagtgggaaagctcagagggtgaaggccatgaagaggatgggggtgatgacgatatagatatggctatgtagatgtctttattcatactttaagcattcttctccgattggtacaggtgaaccatcctaactaaacattgatacagttaccaaatcccaaaacctcaatctgagatgcaagggaggtcgacctgggtgtttttatttgttagacgccagattgcgtgaaactataagtataaaaggacgaaaaaagtccgtctacaaggatgggtgcatcatcgaatggagtgtgtatctgaatgtccgacgagaaaccgctgggagacaaccacaaggaataaaagaccccctcgagagaccctacctgtgacatgtttccattatagcaggaagagccgagatgatatcccgccatcggccacttaagcaaatgagaccctcttcttctccttctgtccttcgcctgccttttccggcttgcccccgctagtcgatccagccgagccagagggtttggatgcctgtttcttcttctgctttcgttcccgctgtctttccttctctttttctatcagaagtttcttggtctcacgctagagaaagaaaacagatatcaaaatgcgaacctgattggtagagacaacgtttgacgtaggagctttcaaactaacgtaccagaggagccgaccgttcgagcttccgctgagcttttgtctttaccgagctttcagcgatttctttcactttcgtctattttgatgcggaggcaaacttacacgattagccacgaacgatcaatgataagataattgttagggttggagtgaataacgagacataccgtccgttgtaatttttcagctcgttcttcgtccttctttccagaaatctgttcgatgatgtctaatagcgaactctaaagacaatcggcgagggtgagattaagagttatccatcagctttaaagatccttgcgttctaccaaagatgcacaacaaaccttttcctcgacaaacaccttgcccttcttgccactcttctttctcttaggtgttgatgagccaggtaacggttttgaaggtgagctagtgggagaactgttgacaagcgttgtagattcagcctccattgttgcgaactagctatagtgtgtgtgtgtgtgtgtttnnnnnnnnnngtgtgtaagaagacgttctctgtatgtctccagaatctccaaaactaagaagggaatcaactggtggattcctcaagatttagaccttaattgaaaagctgtacaaaaatcataaattcaaaaattctgaccaaccgacccaaattctttcttgcctgcttcttccttagtcgacacccctcgtagctcctcaactgtccttctgtcgtttcttttctcttcttttcctcgttttcgttgatcatctcggcgtctagatttcattccgatcgattcatcgaacactttagcttcctagacgtaacataaatcttgaaacacgttcaatatggctgaggaacgagagatctcccggctttaccgagtcgacagaaccatccacgagctcgtttcggatcgcgtacgttccttcctcctaccggttttatcattctcccattgaagcttctgtcaggagttggatggcttacttgtcatctttaattttgcttcttcctcatcgtttaaacggatttgaattttatttattggattggcggatgcgtgtgtgtcgtgatttgggtatatggtcgaccgatggtgaacgaaaactaaattggactggactcttatagggatttcaagttgcagaagatgagacggatatgagttttgaggatttccgaaatcagtttgccgccaatggatctgtcgagtgagtctttcattctttgttctctcgtggcctatgccgtgttccgttcgcatgtcgcggtatttttgttcaagcgggaatgctcccctcccctttggcaaattgaaatctctatggagcgaaaagctgactgctgcttgtttatcctgtcttttgacttggtttgctgtgtggtaactgtgactgtttcttgatatcttcctttattttattttattggtacttggtctcgaaaagtcgaaaccagctcaacttctggacaaactcacgtaaagacccgacagactctatctttatcttttattctgatgaaaagaaagtaggagtcaagaccatgcgaaagtgagcagcattcttgactttctggccgaggagctcagagatttgaatgctcattcaagacgttatttgttttgtaaacagattcattggtatccttgatgagaagcagattcgacgaggtatcatcatctactctgaagcaatgtctcccccggcccgaaaggtttgtctcccgagctttactctctcttccaatccgtatttgccatttatacaaatcgactgactttcgacttgtactttctcgaccttggatctactcatctctaggttatcaactcgatgggacaggactacaagcttgaggagtacgccgaggcagatttgctcgtcaacatcactcaccaccagctcgtcccgcgacacgaggtccttcctgagtctgacaagaaagcattattggagcgatagtcagtcatttgttctctccttttccttcccattctcgatgatagactggaaggaaactaaagttccaactctttttcatgtctcgtgcgatatattcttattatagccgactgagagagactcagcttcctcgaattctgctttctgatccggtagctaggtactacggcctcactagaggacaagttgtcaagattacgagatcttctgaaacggctgttcgtctcttcttttgtttcttttctcgtgacctgtgtcctgtggcctttgagatagcttgaatcgctgattactggtatatctctctttcctcactttcttcataacagggtcgatatatcacattccgtatagctctataagctctgtcatatcgtcgtctttcttcctttcaatcctttcgtggtacatcgtaccgctctcgtccatcattccatctcgagggggtttctcttttccttctctctacgcggtagtttgtgtggtttctttcatcattcccttctctcttgtccttcttgcccttttcagcaatcactgaactaaaaataaaacaatacaagaaggttttctcagatatactctcgtcgtgacaagccaattgaaacaccttttcggtgcttccttttgttctcttcacttctaaccacacagcacggataacgagattgtaggaggtaaacagagcaaaaaagaaagaaaagatgaacaaacgtctgataagcttatttgtgactattttatgat

SEQ ID NO: 1814 - DNA, 4334 bp, Xanthophyllomyces dendrorhous
cctcctcccccacctccaaacataccacctccgggccctccaccaccatggtgtcctcctcttccgccacctccgaacataccacctcctccgcctcctccgccaaacattcctcctccaggaggtcccggagggggtccccactgagaacctccaccgccaaacatacctccagagttatggtggcttcccataaacttggaagctaaaccagcgatcaaaactccagctccagctccagctgcgagctattcacatgtaaagaaaggagaaagcttagccggcccgtattaaaaaaaaaagagaagaaagaaagaacagtgctttcgggagaaatataaacgataccttgccgaagcctcgatcctgcgttcccgtcacagtccgagcgctatcttgatagaagagctcctgaccgtcattctgtgcagtagatgtctgttgctgttgctgctgctggtaagtcggctgactagactggtagtaagagccggcgttcccgctctgattatagtttgattggccgcgaggatcctgccatgtaggagttggattggaagagttggtgtcgacgtagtagaacgcctgatgattactgtcccattctttgatccatccattaggaagaggctgttcgttgctcatgatgattgtgatgtactacaaacgaagaaagaagatgggattaaaagagagatatggtaaaggaaagcgatgaactctccagaacaagctagctttaagagaatcttgcgggagggttgccgatgtatgacaactgcggcggtcgcagatggagtgggaatgacgtaaggatcgagggcagttcactgcgcaggcacattgcactttatcgccacacacgtgagtggtcagcccaactgcacagcctctgttcagccaatacatcatccatctccttcacattcgccgggaaagaacaatcttttctacccgtcctatccgtcgtccttggactgttctgcattcgattcatacagactcaagctcacgctaacacattcgtcgttgtaatatactgtactgtgccgcctttctcttaagctcatatggataccgatcatcagatccgtcaactgcaacaggacctcgactacgagcggcgcgctcgccagatcgatcagaaactgtttgatcaggaaagaagccatcaccttcaggctgcgagatcagccagtgccttccctgcttcttctatcggctcaccgaccacatggggcagccagaagccgcttccggttgctatcttttgggactacggtcagccttcatatccgtgtcgatatgaatcttggtgtttagaaaaatgttgactgacgatctttatctcaacgatcggcgatggcgatgggtgatggtcgtctttcggctacagaaaactgctcaccacccctggcaacaaacccttcgctcctcgtcaaacacctccgaaagatttttcagccgttcggtccgatctctttcattaggtgttatcaaggtatgcgctcactgcttctatctttcgccaccactctaacccgattctcaaactgacaaccatggttgttttctatgtctcgttcttcttcttcttctttgttctcctgaaatgaactaacagacgtcggcgcccagccggtttttgctcagacccttcgatccgggctggaagcatgcgctgtggaagtcagagactgcggtcgatggggtagaaaagatgtcgcagatcgtaaattcctacattgcttctctttattctcacgatttactgagctaaagggccgtctcttcattcttctcttttctcattctgcagaccatatcatgaccgacatattcatgtacgcattagacaatcctgctccggctacaattgtcctcatgtgtgttcctcatgattcttcagctttcgtcttggctttccatcgatcccgcgctgatgtgtctgttgacccttaatgttcttagctctggcgataaagatttttcgtatatacttgcaaagtgagttcttgtagttaggactccatctgcttcatgtcgtgcgcacactgatctatttgtcggtggttctaccgctttttttctgctctaagtctttgcaaccggtttgtgcattcaccatgtctgctgcaacatatcttttctcactggtgccctttttatttattttttccgatctaaacagtcaatacaacgtgattttagtcgagaaccagatcggagctgctgaagagcttaaatcttctgcctcccaggtctacaagtggcgcgagcttcttcgtgacgcaggcgcctccaaaggggcttcccttcctcctactcttcctatctctagcataccagccccgatcgtgttcccgactccccgtcgaacaagatcgaactctgatccgaacgtgagcccaagcgctatccctactgctctccatgccaaaccagattatgaaagtcgacccgtcctcaacaagacatctagctcgtctactatgatcgcgcccgtaccggtgtctacaacgacacctactctaggaggtggcttcaagatcagtgcgtttggaccgctgttggatgtgttgaaaggatggagtgcggagaacccaccattgaggtctgcgatctcgccgttagttctcaagaaggatatcaatgcatttgcgagagccggagctggaagttggaaggattatgtcgacaaggcagagtcagctgggtaagtctagattctgacttgtgcatcgtgtggtctttgtgtgatgtcttaatcacacgacgtttgtgtcatctgttctatccacaaagactcgtcgtccttgcctccggccctaaacctgggatggaaactatcgccctgaccaaagtgttcgccaacaatggggcatcctcgagatcaaccgttcctccatcgtccccgatctctttcaatccgatcattcccaattctctatcaaagctctcccgggcaagctccctttcccaatctatcaccgcatctcacctcgaatcttttgcgcctgatcagcctaaagctccggattcgacaagcacatcgcccatcctatctgcccgtagacggcttttgaccaacacactcgctaaatctaccgatgactccatccgatcgacctaccaacccctgatcgatgtcctttctgtcttaccttcatcgcctcctccccatcgatatgtcgtcagtcaacttctcaaaactaccacgaaaggctcagagttggtctctcggtttggctggaaaccctacgtggagaaagcccaggatcatggattcgttcgtacaggaggatcggttgatgatcctcttggtcaatggatggaactcatgcccgctttcaagtcgacaggtgaacgggtcccatttgacaagaaaacgcccgtccctccgttcgcgattcatacggccgagacattccgaccgttgctgctctctttgggttcgctacctctaccttcgagctcggggaagacaccagccgcgttgatttcaagggtggccgggcagttgaagtcaaagcaaaaggaggcattccagttggttggagtggggaactttaaggattatctggacgtagccatcagactcggcgtaatcagatgtggcaagggagtggatgagagtggtgattgggtggcgctcaagaaggaatacagaggattggcagggtatggagttcccgcgcccagagtggtcatcaagaagccgaagacagcagaagagggagaccgagctgcagcagaagaccaagccgtggtggaagacggcagcaatggaggagagacaaagaacgaggaagaaaaggaagcgaaggaggatggggtggtcggttcagcacaggctacacccaccagagtggtcagccagaaggaagatgtaaaccgactgtttgcatctatccacgcctctccctctcctgccgtcagcttggcgacttctttatcgcgacagctagagagtggatcggatatgaccgagacggcgttggtaagctcatcgactataaatcttccaccggtgaaggagacgacggcgctgtttgatttcatcgcttcgcctgctttcccgaggagaaaggacgacgtttccattaaatcggagttgccgaatgaaaacacagtgcctgtgcagattaaatctgaagaaggatcttccccagctttggcggcctcttcctcttcttcctcctcctcctcttccgacgaagatgatgactcaactgcttcgagaccatctacccccactcgcggagtgttttccagaaacacactttcttctcctaatcttgcgcctaactctattcctgcgcccgcccctacgt

SEQ ID NO: 1815 - DNA, 7848 bp, Xanthophyllomyces dendrorhous
cctgtatctgtctctgcacccgatggaccgtcggacctgacacccaatctctcaggaggtttacctccggatagaaagaaattcacattcacgttcactccgttcggtaccgctcgatcgaatcctcattctccctcatctttgtcttcatcctcgtccccgccttcatcctcatcttcatcttcatcttcatctttggctgcatcctccttgacggcggcggtgaagagagggactgtcaaagcaggtaacgtccttactgacgaaaccgactcggccgagccttcgcacaccccatccccatccacgtctggaagaacgacggtcatacgaaccagagagggtcctagtgcaaatatccaaacatggtcggaggacccgacggtgtcgagaatggagataaggacgggaacaggaacagggaacgatacgatggacagaccgacaaagatcgagtttcagagaacaaagtcgtcgaccacgacggctgctgaattggcagccggtctttcactctctttagaggactcggtttatttcgtttagtcttttcgcttcttcttcttcttcttcttcttcttcttcttttctcggcggaggcggaggtggttatgacgcgatccgataggtcgggggaagatctcgggataggttcagtggatcggccgaattagtttctgcacgtttttttatatcatttatctgctctgcactcttcacacgcgtttgtacatccaactatatccacatccacgttcggcattcaattcatcggagagagagtaaaattgattttagagtttgcacagatacattttcatgatcatcgtcgtccttcataggcaatcggattgttaggtcacagttactgcacaaatcccaacgagctacagagttgagaaagaaaaagagaaagaagaaaaaagagaaggaacaggataacgaatagatacatagatgatgaccgaatgtctttgctatcttttttttctttctttttttcttttttctttttttctttctctttcaattgaactcctcatttaattcctccatctctctgtacatggaagtgttcaatagtatcgacttcctttccttctgcattccttgcctctattgaaaacgatattgccgccgttggtgatgcaggtagcgttcaagatggatatgaggagaaaagacaagatgggcgagctgcttatccagagcatgaatctagtatagcattcgcgtggttctcacaaccgcgacagtcttgtctaggtctttctctttttgatataaattaaatattaaacgacgacgtccggtagggcccctccaacgagcgatcggtccaggcgagcatcacagggaggcaccgtgaaacacagagacagagggtcgaagagagggagagggcgtgtgtgtatgtggtcgtggtcgtggtcgtggttcatgaatggtcgtttgagtacagggaaaggaagcgacagtaatgaataaataaatcctttgggtttgcctttcctttcaagttctttattctattttgatgatttgtttattggttcgtttgttgtttagaacatcgttctttgattcgagcttggattggtctggtagttttccgtatggccagcctccaccccaggtctgaatgcatccggtcgaagtttcttctttgggacgtcccaagactgtccgttcgattgagaggctagaaccgaaacgggagcgggaagtagaggtctatcggggtcagtctggtcggaatctgttcttgtccgtccggtcgtctggtcaaattcgtgatcaccttgtttcttccctcgcgctcgaagtttaccggaccgcttggcgagtagtctggcgtatcggaggccacactacagagagacaagaagagggaagagaattcaatctcccagccggagacgcctttcgactgactggaaaaaggagacaaatgaaggaaaaaaaaggagaaaaaaggacgaacagcattacacagatccttcaatccggtctctccttttctccactctgggctctctgtgagtccacagctcgcacacttatcgacccctcttggtggcctgccttcgttcctcaggtctttcgccgcttttggcgctcctgatgaagcgacggaccctccgccgaggccacctttgtgaggggcccgtttggagatcagcgaaatcgatggtggtgctagtagtgatgatgatgatgatgacgatggcgagtttgtcatatccgactttcgcttatgcctgggcttggtcttgtctttgcgctggtcctctggttgagtagttggtactggggtggaagtcgaagatccgtcgaagttcgcttggtgataaccgtctgatggtggaggtctgatcgggggcctggtctctttcgaaggagaatctatcggcgagggtagactagggttgggaaccatcaaagaagaagtagtggccgacggtacatcggtgatcgtcggtttaggattgaaagggaacaagggcggagcgatcgatggggcgacagtacccaatggaggcagcaaaggtgcctgcgacagagttgacagtgatgatgataacggctgtgtgcctctatgtccctgggtgacgacaccataaccgaatccacttcggtcgctcaacccattcggctcacctggataggcggcgatcgggaggataggatccgttggaaacccactgagtccgatagggagatgtgcgcgggaagacggtctgtctggctctggatctgttcggtacattggttcttgtcctaggctaggaccaggtgatcgctgaggggtaggcagtgatgagttcaggtatgcatcctgggcgaagggacgagaatgcggcgcagatagcggtttgaatataaagtttgtgggtgtgtggaattgctgttggatcgtctggaaacagcaaaagatcaatgtgccttttggaaggagcaggagcagaaacagagacggagacaaaaggagaaagctccagatattagaaaaggcagactgccgaaaagaccgaaagcaaacaaagaaaaagaaaatctaaccataaggaatgaagacactctcgatatgtctcaaacaaccctctgtggcaagagtatgctgcgctctgaaccgtttggtgcaagtcgtttttgcgtcgctcattggcgctgagtctaggtcaagagatatttcgtgtaatagtctttgaaagtcttcttcgaaataacttccatcgaggtgaacgatagaccggtcgctatcggggtgacgtggtggggggtgagaaaacaaaatgtcgtgatctggggaggcgaggaggatctgaaaaactcgagtaggggcttttgaaaataagaaggacaaatctttaggtctagaaccgaacgaagtgggctggtcaaaagcgaaaagacttacggaaggcggggacacccggagtgggattctggcataccggcaggctttccatcgcgttccacaagtgtttaaccatctgacaaagagtgaagagaaagaattgcaggattaaaaatgttttagcctctatgggaatcactacgaggtgaagagaagagattagacgtacggattctcttataaagctggttccacaccagtttgaccagtcactcttgatttctttgtctatgtcaagcgttgggtctttgtctgaagaagagggagatggaagaagaaaaatagggaaaggagaagggaaataggacgaaaaggaaggcgagaagaaagaagaagggaaatgtgagatcaccaaacggtaggcatcagatcatacggtcgagtcaggcaatacgaatcgacgtcttcttctcaaactaaccgacggaagcgtggaagaaggcgagtacgataccatcgccggcgacattgagtacaagatccagcgccagataattatcttctagaagaaagtaatgaccatccctgtgatccaagagaaggaggtgagacaagagtgatgtaagagacggaaaaaagtgagaacagaaacggagagggacgtacttgggctgttccgggttcgtacaacccaagagctgacgggccagagggacactcgcgaactttactctgtttgggaagggaagagggattgaactttggatgtcggtcgatcgccaggcgcagaatggaaagagagaaaagagaggaggagaattgggatgagccaaccttgtgacggtcccggagagattgccaatgctgacgacacctctgagatctttcatgccctgtttgacctcctcggctgatggatcggtttcagatttgaaagttggcgaatttagtctcaaagattgatgaaacgagaggaggaagagagagagagagagggagagagagagagaaaaaaaaggacacagggagaggaaggaaaagaggagaaagaaggaggtgtacaaatgataaacgcgaccgaagaagaccaggacgacgaaaggacttacgatgtaaatagtcaaagatactggtcccaatcatggacatgtgttctgtgcccatgtggaactgcagagtgggaccaaggtagagaaagtctaggttcagattgagaagcgccctgtttagtataagagaatcgtcacttctgagctcttaacttttcttgttatccgttttcaaaacgagaagagaaaccaatcgctcaccagtctttgaaacggacgtagatacaagcgagagtgtatatagacgcgcgcggagaggacaaagagtcatcagcttggagccagaggaaaaaaaaatatgagcatgaggagcacgaagagacgtacaacacctaatctggcccacttctggaacgttatacggttcatcatccctaagtactctacccatagcgctcatgtcgaccggcactgtagtctctggctttattatcggtgggtacgtattgcgggcctgggttgtagcatgagctgcagccgctggctgaaaggcctgtccctctggcttggacagagtagaaacagaatggtggtagaatggatggcctggagcaggatgtggctctgtttggaatgctgtttggcttggtgattgatataacgggtggagcggtggctgcaggtaaggttgtgagtaagaatgtgagaaagcttgaccgtgggactgtacaccgttcgaccttggcctcacgtgtgacggtgggtacggatggtagaggtgctgtgaaggatacggattaggaaacatgagagagagagtgtgtgtgtgtgtgttctctgttgaacgtgaacccaagaaggcacaacgaaagaaagaaaagagaagaaggttaaccccaagcagaaccggatgatagacggacgacgaaacgcgatgggagcgagtgagcgagcgaaaagattaatatgaacattctccgatcatattacaaaggattcgtattcgacattagaaaaataggtcagctcgccagcccgcgccactgggtcggtcgttctctgggcggttggcctggcgcagactggcgcacggatggacggacgagaaggcccggtcgatcggatcgagggccatcgatcgattaggcgcctggtcggggcaggcactacgcagcgtagggaatgaaaggggcaaaacccaatatatatatatatgcgtattcatgtgcgcaggcctcgaaggcctctcgtcctgtggggtggggtgcctgtcggctatattaggtgacgtgttcggcgcgcatgcataaaatccctgtttgaaatcatgtgctcattcagcgagctgttacccgtaagtttggctgtggtccgtgcctgtggtcacgtgaatgaagggtcttgtgtaatgatatgtcttacgtaattgccctgccctgcccgtcatctctgccctcgagtaccttgcccgggcggaaacccactcaatctctcactcgttcgtacgtggaacactcacacactcacattcaagatggatggctctacagatcaatcgtcttcagtcatcccagcaccggcaccaacatcgacaacaacgacagcagttttcagacctttagaacataccacacctccaggtgtgtcatccttctcctctttatccgtcttgatgctccccgtgttaacgtttctagcgcgcgctctctctctctctctcttctcatctaccatttattcctgatgatctgctcatcccagccgaccttcaagactcagactttgagctctcaccggcagaaatacaagcggcgttcagagaggtcaccgacaaagctgctcagaggattgtactccggaccggagcgatgagagccagagacgaggctctcggctcaaaggctaaacctgtctggtcaaaggtgcgttattttcttagccaatcttattctctagcctattcttgctcattcttgtcatggcacttctaaaaactcattggtctttgctcatctatcttgctcctcctggaaattagacaaagatcaggatcaagttttctgaccgaacgcagatcgaaaggatctttccttcagaatcggccatcggcgtcctctatgactttgttaggaacagcctaagtgatgaacatcgatcccaacgctttacactacgtacgtccttctcagtttgttttcacctatctccattcctctctcgtcgtcttctgtccatatatacctcggagtgttgagaccagtgaatactgggaacgcccacaatacttgaaaccatatgagcgcagttcaaccgccgaggacacctattccagaaacaccaccgccgccgccatcagcaaacgcgcccaaacgagtacggccttccgtcccaccggcgcctgtgaaagtgacattggcggaccatgcgttggccccctcctccgtcctgttggtgtctttcgagaacccagaactgaaccgttcgtctcttttcttctttccttctcgctcagtctttcctctcgatagtctcgcaccaaacatagtctgaggatctgaccgccaaatccacttcttgcctcgctcgttcctatctctgtcttgaaaacacacacacgcaaaaacaggatcagatagaccggcccctctactcccctcccttctctcgatcgcgacagatcttccgaaaccagcccctccgtccgaaccttctcctgtgcctgcgcccgggtctggatcggcagatagaacaggtttaaaaccggcaggaggggacaaggcgagagggtcgggaaagatcccaaaatggttcaaatcgggaagtaagtctcttttctttccatctggcaccttcaaaaagacaccagactgtagcaggatgagaacgtggatgagccagacaccaacctgatcccttgttttctttcctcgctctctcttcgttttcataagaaaaatgaaaacctaaacgagaatagatccccctttgtcaatgttcctccaccttgtctctcctcctcctccccttcttcttcttcttcttcctccttgcctctagagaagagctgatggtgatgagagaatgaaaggcttatgtctctctttcagaagaggattcatctgttgtgtgtcatgttgggtgaaccgaagaatagacttgcaagaaacaagggaaagagggagagagacagagagaggacggagaagaacgtgagaaggaaaaaagggagaatcgggatcgagatacgagagcaccgggagtttattacaagagaatagaattaaaatagaaggaagagggaaggaggcaaacaaggggggggggttaaaagagaaagaggagaatcaagaagaagaaatgcttgagcgaggagggggaaaaggaaagaggaaaaagattttgtttttgagtttaagaaaaaaataaaggggggaatgc

SEQ ID NO: 1816 - DNA, 7816 bp, Xanthophyllomyces dendrorhous
aagagaaagagagaaagaaaacaggcgagtaaaagaagagcccccccaaaaaaaaaggttgagaccaagctcaaagaaaagagaagaatgggaagaccgtgtgggaagagaaagaaaaggtgagaaagaaaagatgacagaagagctacaaggatctatccacttttctttctctagacttgttgcccgaatacctgtccaccggacctcatccctccgatgtttcctacgtttcctccaggtccagcgacaccggctcctcctcctgctccaccggcggcacctgctccggcctgctgctgctgttgttgctgctgatgttgctgttgctgctggacttgctgctgctgctggacttgctgctgctgctggacttgctgctgctgctggacttgctgctgctggacttgctgctggaccatctgctgatagggtggcgtcctgtcctccaagaactcataggccaggttgaaatccttttgttcgactctggaccaagtggcaggatcgaaaaagatataggtccctctctctgaaatgttggtcttttccgtggcctccgctcggggatccttcgtcagccagtaaccaatctctttgtgccaacgccaatgtcggttatatctagagaacagagcgagataccaaaatgcatgagccgtcgagacttgatgaactgagaaggagaaaacgaagctgaagagacagagaagaaatccgtgaacttacaactctgaagcagctagatcctgcaagacatctctcgggcaaccgtaaaagatgtagaacaacgtttcctccgcaaacaggttcatctttccttgtgccggtgacggtcgaacgttgtaacaggatggagtgtggtactcttcttccagatgaacccctcgagttaatgacggttccgcccaaggtgccaccaggctcgacgacaatgctctacaagatacgcgaaacattggaagaaaacgcgttcagtcacaaaacccttgtgaaaatatgaatcctcgaagaaagaaactccatgaaacagactcaactcgtgcccagccatgtttacaccgagtgacatgagatccgttccgaaagaaagcatccctttgtcttcgtccgcgttccgtatggcatgaaggaaagcagcaagtccccacttatccgccggactcgctaagatttgctcggccgggctggtctggctaggaaaggcgccgcctccggtttctggccgttgagatggatgcgggccttccgtcggtactgagtcgcgtatgaacgcacaacaaggaagagtcagtttcagcaagggagtcgaaggaaagaagagaaacgggacagacatccgtttggtaaactcattgagttgggcggtaactgttgtcgcagtgctccaggaggaggcgccaaagaggaaggtgtggtattcgatccttggatttgtaacggccaggcttgctgaggtcccgaggtagcaagcttcgtagcataattcgaattctgctagaacgagcaccaagaggcaagaccaaaccatatgtatagtagaagaaaaacagtcaaactttgcacatccttctattacacaatctgtgctaagtcagtatcggcagaagaaagcgtgaacgtaccctcgaatcttctgtgacgcctctagcaaacttccctcctccgccaacaacacccatgccagcgaccgacccgttccccagtccgttcatcatgacctgtccgtctcctcccaatgccgggaaatcatctgcgttcagtccgtttccgactgcaccggctccgccttgacttgactgctgttgttgctgttgttgttgttgttgctgatgctgttgttgctggtgacccggattcgatgctagagcagcatacgtactcggagcttggctgagcgaactcgaagatgtcggcacaccccccaacgcaggaaaatctaacggatctagaccagttgtcgatgtcggattcgtcgatgcattctcagaggggtgagaggagaacaaagattgatgggaaggagtggttgatggcgtgcctccagtttgtgaaagattggtggatggtaaggaggattgctgttgctgctgctgttgttgttgttgttgttgttgctgctgctgctgctgctgttgatgttgctgttggtgttgttgatgctgatgttgctgttgctgcgaagggtgttgctgcatcgcgttcaaaaggttttgttgttgttgagtaacacccgatccagcacttccagctgatccaaaaggaaagccagaccccgaccgagggttggttcccacgagcccacccccacttagggggtaaccagatccattcccgccaggagtggcagccgcaggcgtgcgaggaccttgctggtgagggagattatactgaggttgttgcatgtactgctgttgatacggaggtccagtgcgagggaaaccaggtaaggatggagggggagcaagtgccggcggtctgtttggaggagcgcctggatatcatcatattttttgacatggaaggaaacaaacgtgcggaacaagcaacggatataaaggtggcgagagtgttgaccgaatccatagcagagaggtgaacgggaagaagagaccagatcagaagatgaaaatcaccaggagagacagaaacagacgaccgatcggaagcgtctgtggcaaagacagacacgtacctggtcggttcataggaggaaaagaaagctctctggataggatgaggagggaagacggagcgaggcggatcgattgaacgaaagaaagcttgaggataaaaggtaggagcggtttctgtttgaccgaccgaggcagagcaagatacgaagggcgacaccaaagaaggcgaacggaaacgatagaagaaagaaacttggaactcgtcagatgggaaagaacgaaaaagaccgcaaacagaaagaagacagctctgtttatctctcctccttctgaacgcttcctcataataatttggggcagccgaaagaccagaggctcatttacagtctagcatacagctcactcacacgacgttcctattctttcgacaacggggcaataaggaaaccgagatgggatgggtcaagaggatgctgagaaggaggaaaagaaagaggtgagcgaacggggcaaaagaaggcagagttttggctagttacggtttcgtaaccatctgcgtgtcaagcctacaatatacgcgcttagtatacacagactatgcacagatcatacacgaatcatacactgatcatgtacatcatatacagatcatagtctgagtatgatcagactacagtacgacattaactactggtacatagagctacagtttactcaaggggtatcctaactgctcctcggtttccctaatacgctcgggcgtggtcttttgttcaggagcatagacttcataatccggagggcgcccgaaagcgagcatggctgcttctacgaggatcgatctgtagacaggtgaaagacggttcgaaaggtgtgcaccgtgaatgatcaagtgcgaactcaggagagagaaagcgagaacctacgcggtcagaccgatcacaggcttcacacctagatgctctctgttggtcaagaagctttgtttcacgaacaggtggttaaatggaaacacagaactgtcagtcacatccgtgagaagagggggaaacgcgttgtttggagcacccacccgtgcagtctcactttaccgcttccccaagcgacgtcggtcgagaagtgaaagtcatccatgggcgagagctcgagcgaaaatgatgaggcgctggtggtgatcggaagaggaaacggtctggtccacgaagctggcgcgtcgtatggagatcgagatagcagaaagtagtggagaggcatcgagaacagatgagctacctcatccgaattgatcactggctataaattgagatcctggtgagttgataagctgggtagagtccaaaataaataaaaacctcaaacaggagtccgatagaaacatacaatgatgctattgtctagaagaagaactaccacgctgtatgaccgagaaaattcacgctctcattggtcagcatgaatcttgatgagaaactcgatgtactagaaattcacaaacggggtgaccaaaagtttatctctgctcaagaagacggagaggttacacagatggagaaccttctcttgatccatcggcagaccaatctcctcgaaagcttcccgcctctgtagattggcgcgcgtccacgcatacacacgccaccctcagattcagctttgggtgaacaagtaaagaagtggggagatagataggtaccgaccgctgtgaattcctcatccgtgtcccctggatcagccttacctcctggtagcgcagtatcgttcggataatctcttagctcatcagatcgtctatttcatagtaggtcagactactttcagccctctgttgtggacccatgttgcaactattgacacagcatagactctcaaagccaaggctacgagacgtcttttgttaacgtctagtcatgattaaatgttgataccttacctgctgagcaccacgtatagatctcctttccttcctacaaacagacaaaccaaaacggatgcgtgctttctcggtggaaagttgaacgcgctcgcaggatatgttggcggaggttgagacgcgagtctctgaagaacaatctcggtttcagtcggataatattgctgtttgattcgatcgattacagacaggcatgagagattcgagttgaccatcagtggtgagcacgtgtgtgtagacagacagggatcagtgtctgtaagaagccttggacgacggtatgatgaacgggtctcataagaagtcgactgagatgttgatggcctgacctggccgcccgggttctgtccggttgccggtttaccgggtgtaaccagtgaccgttagggttgtggcagacaccgccttgttccagaaactttgacacccgtggcttacatgatgagacacgtgatactacgccacatgaaacatgactcagctcaccgctttagtgcatataagaacggccgtgttttcgttctcttatccacttcccccgccacccaaccatcatcttcctctctttcctctctttcctttcgttctcccttgtgtttgttcgtgggcttcgttccccgatgggcatctgccctttccgtgttcaccgttctatgatcaattttccgaatctttgcgttcattgtctcatgctttaggttggctttactcgtggcagaaactccctttactttacatcctcgcttgaggaggtaaggggaaatgatacaccctcggtgtgagtatcctaaagttggctcttgtgtcctgtggatggcttgatcgttccaaccgagcgaactcctccctggatcgaaagaacatgaatgttcgtagatggaatcgagatcttcatcgaaacttgttcccttgtggtgtggcggcgtttgcttgagtgtgaaacttatcgatcgtggcaggttgacaacagatgactgaataaaaagttgaagaaagactcaccgttataggatcgtttgatctggttatacatagcatcgagtctcattcttctctggctctggctttttaccagctacttttttgctctctccagcttggcttctttcacgttcgaaaactagagagtttctcttgttcactcatcaaccctctcatcatttgggcacgtagactttcaatgtggatgtttctcattctctcttccaacaactgttcttgagatcttgagcggaatatccctcaacttgaacgacaggacctcttgtttctcatcatgtttcctgtgggctcaaacctttctgttgttctttttgctgccttaggcttctaaagcactgccaaaagaccgaacaccatagggtttcaagcaatcttttgcttctgttttcaaaccagaggaacgatagcgcatatgcgaacgtaacgatacaggctgttaacgatcgtcagagacttatcaaaggagatgcctcgtgatttgaccaggatgaagaacgccgaaagtggaggtgcctgcggttggaccgaccccttgtttcgagaagaggagagagagaagaacagagtggtagtgaccgattgagtcggtctgcattcgagttctgtttggcgagatggacagaatggaatgacgacagtcggatgagttttcatcctgctctctactcttctggtcttgatttctttttgcttgtttcttttcatccttcttgcctctcttcttctgttgtaagaagacttcaagagaggtttttttttcttttccattctctccctgttgtgttcgcagaagtttggccttgccacttgatgtgaagaccacaaggtgacgttttcttgatcacgatagagatccttttcaaaaacgatggagagtcatagatattctgaaagggatactccttctttaaactacctgatcgacgtgagcctttcgtttgtactttgcctgtgctcgaagccatttcctgtggagcatacatcccgggacccagtgaacaaagaaagtgtgatgagatcgtgggccttctcaatctgtgaaagagagtaaaggaggaagaaatagagagaaagaaagaaagaaagaaagaaagaaagaaagaaagaaagaaagaaagaaagaacagacgaacctgtagcctgataagctgtagatcttttcaccatagtaatcagggattgggtgagcggcagcgttgacggactggatggtggggtcggctctgtgtttagcgatgtgatcgaagaacctggttccgtcaggccagtgataggcagagagcagatatgtcaagaaggaagcgaacaacacagaaggagttgggagcaagatggtccgatacaagagtcagtcagccggatgcaatctatccaagagaagaaagagtgtcgggtgaaactcactttcggtccatcctctcgatagcacttgcgtaccgcctgttgtatactctccagatgaacccgccaagaggcgtacccaggaggaagccaccaaaggcgctagcaaaggtggccgccatgtagacgtacactggctcgaacccggcgatggaggccgttgggtcaagctcggtgttcgcaaagtaggatactccaatcgtcatctgagtgcgtttcgacaggaacgatgggtgtccgaatcgataaaatagaagagcagagatgggaagatgatgacaacagagccacatatcggttagatcagatgctcagaagggaaggacacaaagtaacatggggaatggatcctagtgagatacggaccccggtaaaagtggtaggaagcgcacagagtgtctcgagccatttcttgcttcgacgtttctggaggtactgctcccagttgagcgtatccgaagcagctctggatgatgacgacaccgatggcgaggcagtagcagatgcggaggatgaagtaggaagggtggacgaagcggacaccggggtgatcacaggcttagttccagtgggaggaggcagagcggcaaaggatcgtccgagcggtcggctaagagcagaagcgagcgagagaggtgcccgggaagacagagtagctgaccgaagcagggttctgtttaaaaagacaggagcgggagacatgatgtgctttgaagaatggatacgaggatgataccggctgatggtgttggtggttagaggtgaagaagcgaacgtcattctttcccccgcctggtttcttttcttccagccaagccgctctcggtttcatacacacacacacaca

SEQ ID NO: 1817 - DNA, 23177 bp, Xanthophyllomyces dendrorhous
cacacacacacacacactcaactgaccatcagcaacactgtctctctcttgttatgtctgatgccaatgagttcgtttcctgtttaccatcatcgtatgtttcaagtcgaaatccagatttgaccgttctctgttgaatatctcggagagtagctcgtctgcgaacggacaccctgaacgctgtaggaactgctcaaacaatccgattgagtatcaagcacctggatgcaaacacccatcgctttgcaaatcatgtgctatgaagcaaggtatgatgttctgcatctgtattgtttatattggctgtggcatgtctttgccaaacctgaccgactggtttgctgggattgtctttcacaaacagccacgggaggaaaatgcaaggtgagcgatcatatatcatccatccgatcaagtctcatcctgtttcttcatcttccttgacattcgctgacctatcgaacgaacgtactctctgattgttgtcttgcctccttccaatcaaaggtgtgcggagaaaagttctttgaactgcagagagtatgagcgtccgagtgagtgaggtgcgcagaggccggatgttacatctttcaatgaacgattccatgcacatatatctttctacataagcgcgagtggatccagtgatatacaatgcaagcggagagtcacatccagcctgaggaacaacgacagtacgagaccaagccatctatggtgatgatgagaggcaatcagattgaacgagatcaaccccacaacggcgatccccgcgttcaactgaccatcaccttctatcaatcctctcagtctgccttgaccaccgttcatccgcacagatggtcaatcagttgtccagcaaagtgtgcgacatccatcagcctatatcgctcaagatgtatgttcccgtttgataaagcatgtgtgttgtatctggtctttgcgacagaagacctgacgagcaagctcgttcgacactcatccctgaacgctgtacacttacatacgctcctttcttcctcaacacccaattcgtctttgttaaacgcctggaaaactttcgttgggggacatgcacacgctcaagtgggtacctggaaggccagattccaaagagatcgttcaaacaagttctggataatcccgaactcaagtttgcaggcagtcaactcgagtgagttctccccgttctctatgttcaatccggatgctacgccattctgtcctgctcctggtggacgtagtattgatcggtggtctgtcttggttcgataacactcatgatacaccggaatgaaatggaaccttttcagtacactgtcggacttgtacatcaccgctcaactctactcggacgacaagccgttgtcaatcatctatcggacaaaacataaacctttcggaaagatctatctgttcgatttcgtttcatctgtttcgatctggatacatttcctctcattcttcttgctgattagatctcgggtgctctctcttcctgtttcgtctgtccatttatgaccggttgatctatgggacaaaccatagatggaacgagtgggtcaacctgccaaatcgactgtcatctgttccagccaacgcccagctcgcactcaccatctgggacattcaaggggccggccaggcagttcccttgggaggaacgaccataccgttgtttggacctccttcgtatgttccctatattgtttccgttgatccaatcttctcttagaatactgtgctgatctgcctcatatttgaccaaacggatgcacggccaagtgaggacgaagggagacagagacttctcaaacggggagagcaaaaatgctatgtacatagagaagttgaagcagatggaatgtccgacagtaagacgcctgccgaggtggaggcgaggaatgagaaaggcagattagaggacgttcgttcccttctcttcaacttccatcataacgcatcgacagtgctcgctaggtcttgtgactaacagtctgtttctgttcgaatgtgtagctggttgccaaatacgggatgaaagaccttcctcggccaaaaatctcgagcgtagaccaccacaacccacctcctatcccgccgccgccctgtccgccctcgggggtgcccccactgggcaactatctagattggattactaaaaagacatttgcagagattgaaagaatacatgctgtaagctcaaactgagaatacctatctctcttttccttcctcatggctggtttgggttccttctgggacctagctaatgtttcactcgactctggactctgatcgtatataggcggagacatcaagttcaccttatctctttctctacgtcgagttacctaaattcgaaagccctgtgatatttgcagaaatggtacgcgctcagatcaaccatccttctccgtttcttctcggcgtcttcttgctcgtcctgatgcttttcatcgtccgttgatgctccccctacattcaggagacaccctccatatcagcccttcacgatgctctatccaccctgcctcttccaccccacccatccggacaggccttgtcccaagcatcaacctctcaaacgcacacccaaccagtgaactcggtcctggatgacgctcaactctggaaagttctggatcctgatatggtaaaggagaacgtgttcgaggccaaacatcgaagattggtcagaagtcatcggagtggaccactagacagggagttgaagccaaatgcaaagattagggacgaattgaatgttcgtcctttcatcctttcgttctcttgccctttcgctttctctcaattcttgagccaaggtgaattgttgtgttgatgaccttgggggttctgtcttttcgattaaagtctatattgaactatccgccaaccagtctccttttaccagaagagaaggatctgatttggaaataccggttctacctctctcgatctaagaaagcactcaccaaatttctcaaatctgtcacttggacggacccatctgaagtcaaacaggcagtcgagacgctccttccactttggacggggatcgagatggaggacgcaattgagttgctcggaccgggatttttggatggaagagtcaggaggtatgccgttggtgaattagcaagagctggagatgaggtttgtctactgtttcgatttctttcctccctcctcttccttctgaggtttgttctgttgtcgtcaaacatgtctggacgagaactgaaagtttcttcttttcttctctctcgccattgaattaacgactgaatcgaccgaacacaatcaggaactccaattgtacctccttcaactggtacaagctctcaagtttgattcacacacaccttcagactctcgatccatgcgctcctttcactcttcacacaccgcctcaggtgcagtctcctctcctaatggaggaaccggtacgggtgggattggacagggcggaatcctctcgacggaggatagtggactagcagacttgttgatcgagagaagtgtaggtaatccggtcctagggaacagtttccattggtatttgatggtcgagtgtgaggacaagggcgtggttggtcggatgtacgctaggatcagttggaggtacatgacagagctcatgaaggtgagttgactacattcaatatccaatcgggtcccccagagctagcttcatggcaacagttggctgatcatttctcggaacgtttacttgatgtaatcgcctggccttgtatcagattccggacggacccaaacggagagacgttctccgaagacaaggcgaacttgttgctaccctatccgcccgtgccaaagaacttcgagcgtccaaagacaaaagagagaaaaagattgaacggcttcggaagtatatcgacgagcctaagaatcatctgtcgactatggcacctttgccgttgcccatcaacggccgcataattgtcaacggaatctctgctgagaaggccatgatctttaaatcgaatctgttgccgctcttactatggttccagtgtgcgcccgcggttccttcagccaacgcatcatcacctgaagatgaaccattggaaccagcaggagctaaacctacaccgatacccggatccaccgacccaacagttccaaaagctgaatccagggaggcgttcccttcatctcacccagcagtagatgctcggacagagtacggattgatttttaagaatggagatgacctccgtcaagatcagcttgtcgttcagttgttcactttgatggaccgtctgcttcgaaaagagaatcttgatcttcgtctgacggcgtacgatgtcttggctacgggaacggaggaaggtatgattcagttcatacccagcaaaacattggcggggatcatgagtgagtatggaagtctgttgggttatctgagggtcaatcatccaaacgagagaagtatagatacatatggagtggatccaaaggtactggatacatttgttcggagttgtggtgagtcttgaaagctggtttcctcttcacattacagagtatatcgtatcgctatatacttaatcattttccttctttcttgacatcgaagctggatactgtgtcatcacctatctgcttggtgtaggagatcggcatctagacaaccttatgctttcacctgatggttggtgcctttgctccctgtcatcgtgtcggtcatagatttccagactaaacacttttgctttttcaaccttgaatctcttgaacggcaggccacttctttcatggttagtccaccagattcttcattccactacatgattgacgtgcagctcacgatcctttctgatttaaaactctttgttcatcaacgtttatctcttaaagtcgactttggctatatcctaggtcgggatccgaaaccttatccaccacccgtcaaattaagtcgagaaatgatagaagcgatgggtggtccaacatcgccccattatctccggttcaaacacctctgccacacagcattttcgaatttgaggaagagtgcgaacttgattctaaacttggtggcgttaatggtcaattcgggggttcaggatattaaattggagcctgataaggcggtcgccaaggtacgtttttttccttccttattttcatataggcaatgcttgtattgacaacaaacgtcgatgattctcatctacgtttatatctgtatcggcgtatatctctcttcgtttgattagatccaagaaaacttcatgcttcacttgagtgaggaacaagcgatggagcaattcgaaggacttctcaaccaaacgagcttgttgacagctgtgtttgacgttatccacgattggtaggccactcttggattctgttctatgacggtcatcttatttctttattatccttcctggtttactgatctaactcctcttccttcatccttaaatgtatacagggcacaatactggagatcctgagtaggaaagaaagagaaatcgaacagaaacaaagtataataaaaaatacctgaattttcatacagaggttctagttcgaatcattcattcaattagctaaggaggcattcatcattcgttatactttcggctctttttcgatatctttcttctaaatttcttttatgacttcaaagccttcttgatcgtctgttttttgaacacgcaaaatgaaaaataattatgagaaccttgttcattcattgaagagtataaaccccagagagcttatcaatctccaactgagagaaagaatcgaaactcacagcttccatctcgtcaaaatcggacgtgtcaactcgagtgatttctcttgagagcgcggtctcgatcgcgttcatctcttcccacgatcgcttatcgtgcacgaacgcaatagccactccctttcgaccgaaccgtcccgttcgacctgaagatgtgaccgagaacggtttattcatgtggttcagtcagatgaggatcatgacaacgtgtaccaactcgagacttgaagcagatgaggaggaggaagatgaaggtcactcaccaactcgatgcagatacgtctctgaatccggctgaccacttccagtcaagggcatatcatagttgacaaccatgttgacttgctgaatgtcgattcctcgagcgatgacgttggtcgtgatcaacactttggtctttccatctctgaacccgtcgatcgtcgcgtctcgctccccagagtctttctggccgtgaagggaggcgacttggtgaccttcggcttgcattcgcttcgcgatgttatctgcagtgtctcggcgctagaattcaaagcgagtcagaccaaagcaaaaaaaagaaaacaatcgttcggatcaacgaagaaggaaagagctcttaggcagacgcaaataggtaagagacaaaccttgcagaagatgatactctgaccgattgtcaacaagttataaagttcgaccaagacgtcatactttgcttcctcgtccttacagtccatataaaactgcttgataccgtccaccgagagctcctcctgcttaagtttaatctcgttggccgatggcgcaaacttggcggcgaagtttcggacgatctcggggaaagtggctgagaagagaacgagttgagacgtcttgggtagcatgctaagccgtgttcaagtggttcagatcaggagggatgattaacacgactgatgcacgcataaacaagaacaaggaagaggaggacagtgctcccaacttactttctgaccctcatcgtctgctctcccaaactctgttgatccaacatgttgtccgcctcatctaaaatgagcgccttgacagccttggcgtcgagcttcttcttaacaatcatgtccatcaccgtaccgggcgtaccgacgatcacgtgagcatttgtcggagcggagtgtcggtcgaacgagtccttgactgcgaggaagactttgacaggagtgaattgacccatcgttcggacaacctcttcgatctgacgagcaagctctcgtgagggggcgagacagatcgcctagaattaccaggatattaaattatgacggcatggcgtcaggttcgaaatctagccgcttaaaaagcgtacagaagaaagaaagacactcatgcccgactacgtacctgggacttctcgacactgaaatctattcggctaagcatagtcaaggtgaatgcagcggtctttccggttccagattgagattgaccgatcatgtttctcggtctttcatataagaaaaccatgacagactcagcatgcgactacatctaccatactgtagccaagggagactggcgagacatacgggttttgaagcaacagaggcagcgccctctcctggatcttactaggtttctggaacttcatcgcgtaaattcctttaagaaggtttgggtgtctgcacacaaataaaccaagggtccaggagcattgatatcagcctaatccttatgactaccttaaaattgtctgcaactataaacacaaaaagaggaccaaatacaatgactgacaatccaagatcctcgaatgatttaacactaaacaacggcgagttcgggtccgcttgctggtcagccaatgtgacctacatccgttccccacaagaaaaagaaaagaaagatagacagaacagagcagtacaataagcttctgtaaactcgtacgtgtacggccaatgaatgaagagagataaacggacgtacggtgacttggtaagagttaggtatcaagttgtcctctgatcattccataaacataggttagcagttattggaccacccagatctctaaccccttatttactcctggtccagagtctctgtagagatctcacacgagaaagaacgtaccttccttgctatctccatctccagcctgaaccttcacctcagctccccccttggtatctccacctccattctcctgatcggtactcaatcctcctagtctcgaagccaacgagctcacattcctatccgacacagcaggcttggacgaatcagaggtagaagacacctccgctggcttgtcttcctgcacgggcgtagccttggaggcaggatcagaagcggcatcactcgatggaatagggttcgaagtagcaacagcaggcgcggctgttggtgcagccgaggtagccgacgcaggagcagaatgggcggcgctaccagcatccttgacgacggcgggcgattctgaaggagtctctgagggcgacatctgatctgtctcaaggtaagggtataaaggaatggggtgtatgcgtgtgtatgtgtgttcgtgttggtcgaacggggttgaggttgaggttgaagttgaagtggattcatcttggacggtccttatcctaacacttaggtagatattcatatacattcattatagacaaccaatctactggatacgtttgctttcattcttatgtaaaggtggatggatagaatttctctatgctgctcgagagaacggaaatcgaaaagaatgtgtgaatagtgatgatgatatgatacgactacattttcgaacgtggctttctcttctctggtataacagaaaactatccttccccgttaaagaaatccctatagactttagggggtttcactgttccaagaggtacttcacaagaagaacttacaaaaagaaggctaaaaataacgaagaaactaagacagaaaacgagaatggaaaaagaagggaggaagaagaaattatcgcagaagggggttctcatctatcttgaggggtgcaccagcccgcacttcccacatatcccgtacccaacaactcatatgccggcttttctcctcgttctctgtgggaaagatcggcagcgtccaagtgataagttatgatgatcagtcagctgagatagacagaactagaagagaatagaactgcttgcgtgcggagcaggaacttacatctggtcgatctccttagcaagatcgtaacaaacctctgcgctcacagcagaatcaaacttgtatgatgggtgtgaacggacgaaatgcctgtagtatgctgccggagtcatgagttggcctataagatttgatggtgaatgattagaatccatcgaggagacgacaggatgagcgatccagaccaagaagagatgcgctaagaatcttagagaaaatgagagaggagaagaacgaaccgctcgccctcttcttaaggatggtgatatacccgtcgagtctcgcccgagctttcggctcgatcttaagcgtgttcagatatgattccaccaagcccgataacccttcaaagtcatcacccttcatcccagagcgtaaagacaaagcaaggtcgacaacaattgaaaaaaagaaacggtcaaagccactcttggtatagatgagtttcaagaaggcaagaatgagaaacagacttttccattgaagatttcatctagtgtcatttcttcaaactcgttctcagccctgaaagatccgttgatcccaccacacaccggtggtttctcagaatggatggattttcggaagaagaacttttctgtgagaacagcatctcgcttttgggcgcgtcgcatattttcatcgacctaaagagggaaccgaacgaggtggtcgagtgacggagtccatagaacaaacgttgagtatcattcgtcaatattcgtccagtgaaacagacacgttatagatagtggaaacatataaagctcgagagaaggctaaccttggacatcgggatgtagaaattaagtccaaagtgtagaattgctctagaaagcaagatcaagaacaaagagtatgccgcgttttcgaaatccgttggctgaacttccatacttctgaactcgactcgccaaccgatgggcgagtttgatgggggaggcttaaatcgaagggtttgccagtttgtagattgtatactctgtatcggagcgaaaagtttagtcaccgatgagtgattgacttaaggcgaaagaagggaagaagaaggagaagacagacctcgaaatgatcggtcgaagtctcattgtcctgctctagggactctgagaagatcaccaacgggtctcgaatataaagatgggcgatatgtcgagctagttgtttctccactcctgactcgccccaaattcaagatagaaacgaaacgtaccagatgttatcgtcagttctactataacgtctggtgagatatgaaaaacgatcagcgaaggaacactcaccgttttcgatcagccttttcatcacggcctcatccaccggaacgtcgttgtcgttgtactctgatctgttggctggatcagaagagatgtacgaatccacgctaccgtacctagatttcaggatccgtttctctccgggttgtaagggctgttccacagacgatcagaaagagggtaaaccagaagcctatcaggccatcttgatatacagagggtttgatataacggagagaagatgaaatctacaaacagcctcgcctcgttcaccgggcgttcggtcgtcgaccgcaccagcaatcacgtcccacctagagtctacatcggcaaggaatcctcggtagatcggtgaagatgcacttagcgcaagctatctcccaagccaagtcaggtaacaaacaagcaaccatcagaacgacgtagaacgaccggttgtaaaagaagaagaaaactcttcggacgcaccatgatcggagcgacaggcgtgagcgcatcgtaaacctggcaagcctcggccagatcctttccttggagtgttacttgcagacagcagcagcccataccgaacgccatagcgtccatgtaaatatgatcttctttcgcagctcccgcgttggcctcgccatcgccggggtagagcgttcggtcgaagggaatcgtcggatctctgaatggctgggcggtctcggtgtctttgaagatcgggaggttgatggccactttcgaccctcggcgtcgacgaatgttggctgccagagttctacaagccgtgaacatgcacacagtcgattgcgatcagtagaaggaaagagggaagatagggagagaacctcagatgatcgaacaagaacttacgggaatcgaacatgctcgttaataagctcgtctccaacgaaaagagattgcattgcgctaccctgaacctttgagtgaggatcagaaaacggagtatccgtggtacccagcctgggccaggaagtgatggtcattgggatttcatgggaagatagatggtgacgggcgattctccgactggtcagtatgcgaaggaagcaacgattagtatcgaacgagggacgagctgatattcaagatattgatgaccgatacaaggcgggaccgctgtcttgaatcaattcaggagagcaaaagtgtgaaggacataccgaagtctcatgtttgactcaacagtcaacagactgggaatactatcatcgtagggagccccaggcgtagactctagcatgaaccgtccgaactcggggtgaaacgtcggagcggcgaaactggatccacgagagagatagagacaaagtgaaggacagaggcctcgatcagttgacagcttccagcgcacatcagataaggggtcgaccgaagacgatcaaaaaactcacttctcattctcgcagttcattccgtccacaacaccttccaacttgtcaagaatctccgtctgagaaagagagagcgttgcgttcttagactcgtcatcgaacgaaacgatcaagtactcaatctgtcaagcagaaaagtgatatcgtgacggacacgcatggaaagatatgtttggcaaggagagcaaggcataaaacatcaggccagagagagagtgaagtagacgaagagagaaaaaaaagagggaagaagcaagaaagaaaacgggaaagagaaagaaggaaatgattgatcagcactctttcctacgcgcgaatctctccagacttatcaactgagacttctacctcgaggcgataagcaacgaggcaaagaaacgaggactatagaaaacagtttgctaaagttgaagcattcatatcagaagttgaaccatacctcatcaccccagagaagaggatcgtcctttctatccttcagcctgttgtacaatgcgagaaactgggtgacgccatcgagcttgactttttggatgtgttgcttagagtcctcccaagcgagcggcgtaccaaccaccaagagacccatcagatagaacaggagctgtacgagagacagaaggcgaagagagcgaaagaagaagaaggaaactgccgatgtatacacactaatcggaagactctctataggatggacgaagggaacaaacgagttgatgccaaaagagttgcatggccgaaaacgcgacggaagcgagcttagtcattcgccggtggctattacccgcgatataggagaaaactattaggacgtgttgtagtatgtattggaaaatattcgtattgctcgttcagccgattggtaatcgtttccgagcacgtcatcttttccgatcagctcgtccagacccgatgccacgcgggtctgtgttaaggtctgttgtgttaaggatcaaggtcgtcgatatctgaattatacaaacagaacgtaaagagagcaggagcgagagaccgagcaagcgagcgagcggagaggtaagaacgacacaaggtatatgtatagtagagcgatgccaaatagagatggtcgtggattggaaaatataaaagagaagaaaaacaaaataaacataaaggcagatagatgtcaagaaagacggctatagaaaagaaataacgacaaagaaacagcatgctctacgacattgatgaagacagatcagtcactaataaggatacaatagatcaccgatcagcatctttgcttttttttttctcaagaagttatacaagattggtcaaaggcgaaaccactcacaatctacttgggggtggatcatgtacgagatcgcgttcggatctgtcggcgcctgggatcgatcgaccgagagctcgtccagcccagtcatatcccccttgatctcgagcaggtattgatcctatacatacgcatacatatgtgtatccgcttcatcagtcttgttcctccctacgttaaagcacaaacaggaacgatgattaaacttaccttgacgagcttgtgaagagcttttccaatcaattctcgttcttcttctaactcttcgaccgtctggagatcttgttctctggcctcgaggtaccagtcgataagttcctcccgttccaatccaggctggccttgacgttctgcatcggccaggtgcatgaccactgttgggtgttgaataacagatcaagcgaaatcattagcgctatatagcatgacagaaaacactaaaggaaaacttaggaaaagaaagactaaccgagattcatgatagccatgtatcgatcgtacgtgatcttcgtctttggctttgattggatagttggcggaacagtaccaacagggactgacgatccaccacttccactggaagaagaagtctgagcaaaagatgattcggcagcctctagagcagccacatcagctgcatctcgttcagcatcatctacctccatgtccgctccaggcgctttcttgccatcagcatcatcatcaccgtcctcttcgtcaatatccacatcgtccttctcgacgtggatgatggactgtcggagaagcgagaatgcctcacgaaccatgttcggtgtgatctaagatgcgcatacaaacacgttagatcccttaagtctttgatcgcaaggaggaagtaacgggaaagaaaagaataactggcctgacctcgttctggcagtttgctcgtgcgatagcctcactcaaccgaatcaaactctcaagttgacgaacggtaattcgatacgagttcttcccaacaccacccgcatcatcttgtcggagttttccgtacttttcgaccaggacgactgaagcatccggcgtgagctatcgaggcgagtgagaaaacatacggcatcagccttgacgtgcatgtaaaacatacgaaggctagaaaagaacatcaagagaaccttgacagagcttactttgggtttgaatgttcgggcgaaccgaatgtaccgctgaagagcctcagtgctaaattctgggttgatcgcagcatccctgaatcgatgaacgttcacgatatgctgggcgatatgaagatcggtctcttcattgcattcgtccaacacgacgaaaaatagatcgaatctcgacatgataggcgcactcattgccacattggctctcagacttgccttcctattgtacctacctccaatcgggttggcagctgccagaatggacgttcgagcattcaacgtcgcttgaatacctgctttggcaatggagatcgtctgctgttccatcgcttcgtgaatggcaacttgatcggcaatgtccatcttgtcaaactcatcaatcgcgcagattccattgtcggccaacatgagcgctccggcttcaatcgtgaactcgccggtctcttcatcttttaccaccgcggcggtcaaaccagcagcggatgaggccttgccggaagtgtagaccgctcgaggtaagaaggagcatatgtatctagcaccaatgtctcagccaataaatcgatacacacaaaaagacaagaagacagaaacacagaaaattcgacaaaattactcacttgaggaactgagacttgcttgtactcggatcaccgacaacacaaatgttgatatcccctcggagatggattccttcgggtgtctgcttatgcacaccacccatcagttgcaggagtaaacctttcttgacaatatcgtgacctacaagaacaagtgtgcacggaggaaaacagttgtgccaattgttaacttccgcgcacacatcctgaagagtagtcggaggtgcagagagatagaagatcgaacataccatatacagtcggagcgatactgttcaccaatcgattgtagatgtaaggagcatggaccatggccttcaactcgtcaagttcctcagtcgtcagaccactaaggaaagcagcctgttcttcgtctccgtccagttcgtctcctcggacgtttgttccagaagactatgtttgtttcgataaacaaaggaaatatttatcaagtcagcttctggcgctctaccgtaatgaaaatgacgggaaagccggaacgaaagagaaagagagcctcaccctagcatctccactcttaacatgacaagccaagaaagcagtcttataacctaagtctcgtaccccaagctccttcaaccccgtcaccccctgactagctggcccttgctctcctttcccaccgcctcgcccttctttctgcatctgagacgtcacacctggcatcgacatctgtgcaacatcaggcacgacgacaaaggttccggtaaaagtacacttatcacctgctttggctctctccacaatttcggatcgaaggatgacatccagactgcagaagattagagatggaaaaaaagaagaaaggcgaaaagtgcatcaacatctctatctcgtgtgtgtgtgtgtgcgagcaatctgatcgattcttcgttcccctctgcagaacataccttcgaggcatgcttcctgtaggaatttcattcgggttctcctggatcctgaccttttgccaatccgaaaatgtcgactgttccacgttaagcttccaaaagttcttgttcgcacacgtcggattttggcacatgatcggctgtttacgaatcccaaaaccaggtttaaaatagagcctctcccaacatcagatgttctgtttatactttcatcgatggaagtgaacgacgaggcagagaacgagagagactcacctcagtgtacttgaattgttgttcaacgttccctaccgtcgttctacatacttcacaagcaaaggctccaaacaccaactctggtcgaacttcactcgtcctggtgaccgttccgctgatagccattagctgaccaatctgaccagttcttaggtctctgatgccggaagtgattggcaagttctggaacgcgattgaaaactctctggttgaaagtccagacgaatttgaactgctcgaagatgttcctccaccggacgtcgctggcgataaatacaaatagtgaggttcatactttcgaaccaagttcgtcaacgctcgtcggaggaatggtagaaatcggtagtattgtccttggatagcccgagcgagaacttcttctcgttcgagaagatgaccaaagtcgacgtaaagcgtggtaaagtcaaactctttgagtgtctttatctgatcgatatagatagggacagagccctcaggaacggcgtggggattgtctctatcatcaggtgtagctggcgttgcagggaaagcgatgttgggcgtgtaactaggtaaagagcagaaaggttcggccgtatcaagagaacaaaaaacagtctaccattagaacatgcatcatcaaactaacaaggatgactgagtggaaagaagaagcaaggtacgcacgtctcgagaaatgtttgaaaactggtcatgacggcttctccagtcgcatcggtcactctagggatgtcatcttgtaatcctctcactctcctccttgaagctctcctcgctgctatctctccatcgtcatcttcatccgaatcattcatggctctctctccgttttgtccatctgcgcgaaggtcggatgaccgaagggagagagggtcgacgtttcgttgtctgttttgagctagaggtggccggaagtctgcaccaagtgagggggaagatgctctaaatccggctgatgaggaaggaggaaagagctgggatgacatcttcaggtctagatatcggtcagatcttcaacagtaaagtcaaatagagaaaagggtatgaaagaagagatatcgacgcaagtggagatgattcaagtggtagaaagaaatcaatgacttctgctcaacagacgcgtttgtttttcttaattctgtcgcgtcgacgcgacacgttgatcaacagacaaacattcatttaataatttatgcatggctggcataacacgcgcgcgcgcgcggtgggactagacactgccatcgttatcaacaacggagagcgaggagaaggaaagatacgatatgataagaaaggagcggagggaagcaagaaagaaaggacgtgggtatgcaatactttgaaacaacagccataatcaagttgggcacgtaaagaacagaggaggaagcacaaggcaaaaggaagagagataagaagacaacgaaatatcaagccaagaaccaaaagaagagtagaaggacaaaaagaaggaaaaagcctcgacggtaaggagtaggcagaataataaaataagagcgagtcaggctagaccgatcaaaccaacaaggagtttccatctgattggatgatatccctggttaactgaggagccgggctaaattttctccctcccgcttctgcttgaagatgtcttccagcgggtgcttggaagacgaacctatcatctatttggttcctctgtccaaccgcaggagtagtactagatccattggcttgtgacggcagaccgttcccgataggatcattttgtcttttctctggaccaaactttccaccgttcaaaccttgtgagggcagtccttcagagtctcgtccgttaacttttcggaagttgacaggaggaggttcgattagccgttgaacttggtagggtaggtcgtactcagcctgttgggctagggcaatatatcgggccaattcaagatggaggtggggatagtatgttgttgatgccttcctcgtggactgaagcagccagatggaaggacgacataagactttagctcaaaaacatgacgcgcgaaacgtatacgagcagagaaggaaaagacttaccaagatgatcctgtcaaatccgctttcaaagagttgggcgtggaatcgccaagcactcgtatcagaatctgatgaatcgttcagctcataacaagctcgagcctgtgcattgatcaatctgaagtggacggcctgtgaagaatggagtcatacgaccggtcaggatgtgtgatcctgcatatcagggatatcgatcaaaagtctgaaaaagtagagggagacacataccagataatttccagcttcgtattcaactgatgaaaggatgatgtgaaaatacgcagtaatgttgaataataaatagtcagagttgcgaatcgacgataagaacagaagataagacgcacctcctcctgtagctccaccaggtgctgttggtctttcgacctgggaaacatctagatctgacagtcgccaaatcccattggcatggcagaacatccaaaagtagtctcgactaagaaagaacccgaatcatattcatacaaagggggaggggcgatcaggccttttctcttctactcaaagaagcgatcgctgagtttcaacggataggggagaggagagttgcgcaaacactaaccagacatcagcgatttcggtcaggtacgtcttgtatactctaggccgatgagcgactgtgacgaattcaacaagatcattctctttttccggcccgacgagcaaccttctaacgaactctggcaagttagcccattcctgtgaaacgccacaactgctctcaacagggaagagatcaaacaacaagaggatgagctcagtcatgagttgtctggttggaacgtctcctggtttcttgtccgaaaagagaagggtagtgagtgggatgaatggagcaggggagtattgtcgaatggcaaggcagccgacatcggacgtggcaagggctttgatgcatcggagaagctcgtgaaggagttgatcatcgtgttgttcctccctgtgtgaagcagcacagaatcgagatttcagtcgaagtctcaggctgctgctgatggtacgttcttgatgggtgagcatacgtacctccattccatctcaagtacctcattcagctttcgtagcatgaatacatatccaccttcatgtaagaaagtttcgacccatctaagacaaaaagagaacgaagaggaagacaaattatttagaaaggatgtcgaatgcgatgaagaaaaaatagaaactcacaaagtggtttcctgtcttagtaacatcctcaacttcttcactctaccgagatccatcacaccagccggcggtccatcccttaaccacctcgccattcccattggcgaattttgcgtgccttcccttagactctcggcttgaaccattgaattcctctccggcccggttttcttacccttcgctcgctgtttgtctcctcgctcacggtcagatatttgtcgaacgtgagaggaggaggatggtgagctctggtggtttccaatctgatggttggatcctaggatagactgatgtctaggaacaaggaaatagtccgaatctcgagcgatagatgatcgaagatcgctgggtgtcctgtcaggagtagatgaagagtgcgaggaagttctagaaggctgtttggggtaaggagaaccaccagatcgggcagacatcccggtggccaattgaaaggattgctatatgattgaatatcgacgaggaataagcaacaaaacgagtacagagcaggtaaaccgagagctagaaaccgaccgagtttttcaagaacgcagatttcacgtgttggtccatcgtgttcatcttcattctaactgctgaagggacttccagagcgtcctgaggatttgattcatgaagaatagaggaggcaaacgtatatatcagtcaaccagcatgcaagtagtgcttgggatcaatttattaatccgatcacgtaactcaccatcattgcctcaaagtccgtatcgattctagttttacctccaggagctccctgggagaatttcgacagcccatcgagatctaagctttttgaagccgcgtgtccaactggtgtgccgttctgtcctcttccaacgttgggtgctctggaagtttctgatggccgttgggtcattatcatgctcatgggtctagctgttgagctcctgctggttggtgctggagttgctgatgatccgggagaagcatattctccaggcgcggctgctgctaccgaagaagaaaaatgcgttcgacaaacgggcatgcctggagtgaacagaggaagttggttcattacgcctcttgttggactatgaagaggaggtgcatgggacgatggtcggccttgctgctgctgctgatattgttgttgctgctgataatgttgggagtatcgcttggtaggagacggaggagctgacatcgtcaagacagctctggagttcactcagaagggaagagaaaattgaacagggagcgagaaagatggactgaggggaactaggtcgggattaaggtatgctgcttcggtctaggtcgatggtggtcaatgggttatctaagagaaccatgcgccaacaagagaaaagttgttgaatattctactcaattgacgcgtctgttcctccaagaaatcagtcgcgtcttccttctatccgccttgctcgtctgtataatcagtgatcattgcctgcttttctcttctctctctctttctcctctcttagtttttcttgtttgagtcttttcatgaaaatcaaaacaagcgttgatcttgccccggttattctgccctaaatgcctgtgaagtgagaaaagatagggaagagagatcaaagcagactctcgtcctcttacatccgccacgtgtggatgtaaacattttgatgcgcaatcttgtctctttcccaactgaaggaaaaaggaaaaaaagtgctgagactgactagatctatcctttcttgtgtcttcgagagaagaccagaccatccggtccaagcttctcgcctatcgttctttgtttcggccgaccgatcggcgatgaccgtcaagtcattttgataaggaccatcctctgcatacacatggctacaagaatccatttgacaaggaccgcctttccttcacttgatcgcgatctcactctctcactctcattctccttccttattctttgaggttggttatccttgcccagctaacaagtgaccatatactaatatcgtcgaagagtgcagaaaatactcaaaatatgacaacatctgaattaacgtaccggcgggcaaggttatcggacgaacccgagttgatcaagctgcgaatatcgtgtggatggggcgaggataagatcggtcaggtattgaaagattctgtggatggaaagttggcgctttatctattcgaattagagggtgaaccgatcgggatgtgcgtatctctcttcatttctgtactcgtttttttgaccgatgggctctccattgacaaccgttacgtggaaacatctggcttgggaaacgaaggggagcgatcgagtttgaacctgcaggagagccggacattgtcaaccccgatacaaacacggtgatgatatgtaggtctttcaagcagaatatgagattttctcttcgctctctttgaaaaaggtgctcactatgtgctattgatctactcgttgagatagcactgcttcatatatatactcgcttccaaggcaaacacctcgggaccaaagtaagtgaacgagagagcacctgtggtatctgtgtctcataacgttccaaccaatgacatgtcttgcttgtcaggttatggacatcatagaagatctctgcgtgcgtgaattcggagcaaagaccatcaccttgaacactcggcctcgactggaagacggaagggtcaaccacgtgaaaatttggtataaccgaaggggttataacgagtacaaggtaaatctttctgaattggatttgatcaagaaggaaagggagagctaaacgcttcagttgttgatttctaccttttcaggccgaggaacctagatacaagtggggtgataggttgttgacggcatgctttctgaggaaggttgtgggttagagtacgataaagtggatcacgacgtgcccaagcttgtttcctttgtatttcatactagaggattgataccagttccggattactgtccgtgacacacccgttcatgtcttacttcttttcttttgtattttatccgtattcttatcttgttcattatcattagaattttagatatacaaagaataacaaaaagatgagagagcaagatacagggagtaacagagcgtatgcaaaacctactagtgtagcgagaggagaggagaagagagaggacatagaatctcagaaagccacaaaggcataggcatagacgtactaaactagatgggtagagcgccagggaagcgcactggttactcacctctccaagctttcggatttgccagccaccgagcgcccaagggcgggtgactcaccagatggttacaaagtgatgttgtaactacgaatgtgcctggtgcctgtgtgcctattgcccaggtgcgtgcatatatatatatttatatttgcgtgtgtgtgtgcctgaacgcctgtgtgcctgtttatcctcccctgcggatttccgttcttccctccttctcatttgccctcttctccttcttctctttctccttcttctctttcttcttcttctcttctttgacccatccaccttgtccatctaaagtttgtttctcctttctctctgtctctcactcttgcgacgttgagctcgtgcagtgtgtcgttcttcacctctgctctctttttcgtccaatactaaccttgatgatagaactttgttctcttctttgggtcacctcaccctagggtaaacacacatacatatacgcacacacaccttcgtagcgatttcaccttcttctttctttcctcctttgctcattcacatttgagcccactggaaaggttctttctgggatcatctcctctctctgttctctccctcggcccgaatccatgccgacaagtcgaccgaatagcgcatctgtccctcagccgccgatcgctcttcacaaacgctccagttctcaaaaccagaatcatcctcaatacgcaaactataccagcacccacgactcgagccctcagcaatcgacgctctccatgtcttccactgccttctccgccgctaataatcc

SEQ ID NO: 1818 - DNA, 9511 bp, Xanthophyllomyces dendrorhous
ggccttactcttatgactcttgcgatgtcggaacgtttgctaaccaaacatgggctaacggaaccggtcctgaagctgctcttactactggtcagtatttggcctgtcaaagtacaacttcatcattcaaatgattcacgctctgaccgttactctatcttcttttttcctatgatcatccatcgttttaggctataacggaggagaactttctgagctgcccggacaacggctttctgcctgtacttgtcctggacaggatcaccctggacccaccacaagtacaggtcgaggagctcctgaaatcgatatcctcgaagcccgtcagtgtgcttgaatctcaaaagggatctgaatgactgttacatatatgatttcgactgacatgtttttcattggtattttatcttgtgtttcattcttattcataactggggtttctatcactcaaagaggtcgatacggacaaagatttaggtcagatgtctcagagtttccaaattgcgtaagtcccttcttcctcgaatctcagccttggcattgtttcttgactatttctgacatcatttccttatacgaacgacctcagtccgttcgatgatagttggcaatccgataccgatggttcggtaatctacgatgcttccatcacaaagtggaactcttaccttggaggtccctaccaacaagtgagctactgatcatgtcttcattctcacgttgttcttggtcacaaatctaatatagcttttaataccctttctcctgtccccctaggctgtctctgggttaacatacgtcgattcaaacaaagcctacaagggcaactaccagacttacggtcttgagtactggtccgatgtcaacaaccgagctgacggcttcatcacttggcatgtcggtggcgtaccgtcgtggaaaatgacggctgccgcggttggaccgaactcgaaagtcggagtgagccaaagaatcattccagaagagcccatggtacgtgcccttttcttttttaccttatgatgtttggaagatcactaactcttcatcacggatccaaaataaaagtcaattatccttaacttgggaatgtctgctggtttccagcctcccgattttgccaacttgaaatggcctgcttccatgtacatcgactatgtcagagtctaccagcgggaaggcgaggaaaactttggctgtgatcccgaagattatccgacctcggcctatattgcgaaccacgccaacgcatacgctgatgccaacttgaccatctggtccgatgccggatacaaattccctcgaaacagtctctacgatggttgttaaacttacggggtgtaatttatctctcctcgagcattatttgtcttgatgtttcttctgttgtcgttgttgcgttttttctttttcttttcttttttctttgcattcctactcaattttttccttcgtttcttcctctcctgacggaacctctcaatacctccctcttcgttgtttatttctttgtatgataacaaacacaacaagcttcatgatcatcttactccgaactcttttgttcttcacttcctttctctgtctcctgctctcctacatacacctctatatatttctctatgggttttctcatcctcgttctttctcagtagtgctctctcagatggtacatcctctttacccctcttatctatctttacttcttgaagcttgttcaagtctttattgtctttttctcgtctacttgtttcatttgtgttcttcagtgcgcggcttccggaccctttgctgtagtacccctcatccgagtttcttcgactcttgttcctttcctcaatcaccatttactcttatctctctttctctctcttctcttatgtctgtccggtctgtgccgtctatcgttggtgctgcaagtaagatgcatgctatgcctttgtcgagcgacatgcgcatcggtgagacatcagcgaaacaacaaagggagaacgacatgaattgacgacgcgggccatttctctattcttgcccgcggttagattcggtctcatccatcagtcttccatcccatattctaacccctccctttcatcctccttcgcttctttcccttccctcccttctctcccttcttcccagtagcgaaggagacagtctttcgccccctctcgtaaaaccataacaacaacaaaaaaacaagaaaagagaagaaagggatgaagaactcgtcgacagcaggtttcgtagcctatctccaatcccagcctacctttcacgtaaacaccgccggggactctcacgtctctagttcgagcctcaacctcggtctcaacctcgacggagcaatagggatagggaacggcaggatccactcaccctcgacatctgtttcaggaggatctgacggagaagaagaggaagaggaagaggagggcgaatcttccgctactggtggtttagtaggtgtaggtcgagggaggaacggaggaacgcgaggagcggaaaggcgactgttgctcggaggttcaggttcgggctcgggatcgaatacaactacaggtgtaggttccagaagagatggatcttggaggatgaaagaaggtcaatatcagagatcgtctgccttgacttctggatctggatctggatcaggtataggtctgggtgggagagaacctgggaaactcaaagaaaaagtcctgccgagaaacatgctggatgtcttgcctttagatgtttggctacatgtacgttctcctcttgttttgttcttctttccgcttccatggttgtatcaacagagaagagaggagaggaaggaaggcaagagaaggattgtatgctcacgtgcatgtgctcatgcgtgtttcttttgatatgaacggcaacacagatagttaaattcttgtcgactcctgacttgaagcgatgcgtcaccgtctgtcggttgttcgcctccatagcagttgagaatctgtggagcaaacccacattccgaacttatcgagatttctgcacattcctcaatgtgcttgatccaggaccccaattagcgccagacgaatttaaaaatctctcgcttcaaacgacatctcttggtgacgaagacagtgaggacgaggacgaggacgaggaccaagagcccgatagactaggattaaacagatcaggtccggaatcaatgttggtccctggcatagtaccccttcgtgtcccaacaaaaatcgaccgaccgacatacccttacgcgtcgtatgtccgtcggatcaatttatcaaactttctggcagacgtcacggacgatacgttgttccgacttagaggttgcagccggttggacaggttgaccttgacaggttgttcacttttgggagactcgatggtcggcatggtcttggggttgaagttgaatgcccttgtcgcactggatctctcaatggtcaaaaacataggggacgccgcattgagagggatagcgatgggctgtctgaaactacaggggttaaatctgaatgggtgcaataaggtaacggatgttggggtgactgcaattgctcagaattgtcgatcattgagaagagtaagtctttctgtttgcatatagatatgtgtggttaagtcttgtgcaatatgggtgctaattcatgccggtggttgttcgtggaaattcagatcaaattggtaaaatgcacaaaagtaacagacgcctcagtcgttctcctcgctagaaattgcttcctcctcctggaagtcgacttggatgagaatccaaacataaccgccgtctctattcgagagttttggctatgctgtctccaccttcgagagcttcgcctggcatcctgtcccaagattaccgatgctggattcccatatttgtctcctccgctctcgatctcggcttcatctccttcagttctggatcgcccattccggctttctacaatagaatacccacctcgctcgcttcatccaccaacaccccgtccgatctatcctgacgagacggtctacggagcttattcttatgagactgcctcgttcgaagttgttcctccgccaggaccaagaatcatgttcgggatccaaccacctccacattggttaaagccttttgaccatctgagggtcctcgatctgacatcatgtgcttccattacggacgcagccgttgacgcaatagtgacgaatgcaccaatgttgaggagtttagtattagcaaaatgtccagagttgacagatcagagtttgttttctatctgtacactcggaagaagtttgcatcagttacatatggctcattgcttcaggtctgtccctgctttcagcatatcagctcttataagaagtattgtctttcgaaaatggcgcggctgattttctctttgatctctgttccacagaatcacagatgcagcggtttcgagactggctagatcgtgtacacgtcttagatatgtagattttgcttgtgagtttcccattcttatccggacgagctcgctgagattgatgatcggctcatattttgtctctttcttacccgcacacgctcaggctgtcctgaacttacggatatgagtgttatcgagctatcccaattgacaaaacttcgtcgaatcggtcttgtccgagtacgtccctatcactatatcgacatagaaaacaggtgctctactgatccctcattgtcattcaattggtcgaacggaaatgttgataggtggccaaactgacagatcaagccatccacgcccttgttgaacgaccgtcctctcttgaaagaattcatctttcatactgcgaggaaatttctgtcgaggccatctattacctactgagaaacctaccgaggctgactcatttgagtttgacgggcgtaccgtcgttccgaaaagctgatctacagcgttttcgccgacctccgcctgctgtgcgtctttcgatttctcttctcaaatctgatacttataagcccaaactcaacgtttgacaattcatttatctttttttttatcttttttttttaatgatgatggtggtgagataggacttcaactcgcaccaaagagccgcattctgcgtctactctggagacggagtcatcgctttgcgaaactacttatcaacgttatatcacgttccacccgcaccgtcacccacttcctctgcgttcagctcgctagaagatgagccaagtcctttacccggtcaacagaacgttcgtcctcaagcttttccctctgttctcctgtcttttgtctttattccatcatccttctatattgacaatcgtcatgttcactctgtttaatgaagcaactgcgctctgcttcgtgaccagcatttgccaaagtcagaattcaaaatgttacttagaattattcgtcttctgtttccctctttcattacgtttcggttgcttttattttactttttttgtctcatcatatgtcttcatcattgcctgcatccatccgttcattcatccattttaatttatgtttttaaattctctctcaattttcttgttcgtctccttgttgttctccattgtttttcgtagtgttctgtcccatcgttatccttcttgcctattgcgtccaaggttctcttgtctcccgattcccactctacgatcaatacacctgacttcttgctacctatccaagtacatccatacaatcttggaagtactgatcatttcagctactatcgttctccgtttatgcatactctatctcttcagtcagggaaatcagacaaaacaattctggacttttcggtttgcttctagtcaaagttgaatcccatgacattcagattctttatttattcacgaactatcgaggttcaagtcttagggatcgctcgtataggtctatcggatcatcaagctcttttttcgccaatgactactcccacaccagttcatttgtcagcaatattgaaggacgagaacaaggcaaatcaagaactggaggctcactttcgacaagaacacctgaatttctgggacctcaataaacgtgaagggagtttggtatggttcaactgcactgatgattctccatagagcatggtattttgcaaggttgattaatggtcgagatgatgagtatggtgcaggtcgcgttgctgggtttccttctgcgcacatcgttaggtctgatagtacggcgcccaggtaaggaagcgcaggagggacagtttcacggagtcgggtgcggtactgtgtagcgaccggccagaacacaacgatgaggagacgaaagacttttggtacacaaacgtcatagagatcaagactcgacgaacgtttatagaattccgagagacattgaacaagtcttgtagaacagctagtgaatccttcgtctttgttgataaagcctttatgaagtaaaaagttcaaaactgcgtaaaaaaatggatctgtgacggccaaatcatgtatgagaaatcttcgaactatatcgtacctcgaatgtctttttcaatcgggcgacgctagcactgttgaacgcgcccaaaatggcgtaggcagcactaaaattttgcacatccgtcaggcgagtctattgaacgatatcaacaaccatactcagtaccttgatgtttcatatgcagatgtgaagaaaagactgacggcgagcttgatgaagtacttgacaaccgttgctcgtttcttggcgtcggcttcattcaagatggcttccgaaatatatccagtcctgtagaagtattgaacacgagtcggaggtgtcaatcagaaaaaatcaatctatcaatcggcaggtgagagagacctacacttgagtatgaaatgtgctcatcgccaccagtgcaggggatgtattttttccaaactccaacaaatctttcattctgacctgcttaaacagtccaaactccatcaacgtgagttgcctcgcaagctccagaggatcaaaatcagtcacttggattgtcgggttattcgatttaagatagtggaacaacgatcggctgacgaggagcggagggggaggaacaaggtcttcaggagggctatcaattgatgaaggttgttgggtggatgttgacgcaagtctttgacctttgtattcgggggaactagatcgaaactcaacggaagccattacctgaagagcgtggctcgaaagggcaggattaaagactcctcgggcaaaggcatgaagattgggtaacacgacgtgatcaacctcatttctccagtgcgtatctaaccaagctttgagaaacagcaggatcctcagtcggataagaacaacattctgggtctgtgatgattgttggttttcttcactctccaatgaatcaagcgaaggtcgtttcatatcaaaccgatgaaggagaagggaaacgagctcctgaggagtagtaaacatccgaaaagtgagaaagaaaacttgagcgagctctgagccaactgttgaactgtttgatatgagtttgtccactaaatccggtagagtagcaccgatgatttgacctctggattgagcacaaagtcagccggaccagtttcatttcgctctacataccggacagatgtcctagtagattgagtagcaacggtggtcaaagaccgagaacgaagcacgcccgtcggagtgtttagcttggcagatgcggtagaggcatgatactgtcggaaagaaacatctgggcaggatacatccaggagtctgggagggctctgagaagattcaatccggattaatggtggccgatgtggtgaatcgaaagacacccgaggggtggataatgttgaatctaaactcgtggtatctatcacggacatagatcctgtttttttgtcagcaaattcagagccaaatcaagtcaatcaacaacggtcggaacctggtgaaaccctaaagctaaatttgactcacgcagagagggcattgaaggtatctggtcataatcaccgtagtgatccctttccttgaaacgtacatgagaaagtgaagatgatctcggtctgatcggcgtcattaacaaggatgattgtgcgcgcccttcgttactatctttgataatgcccacaatgccaagtccaacagagtcgaaagcactagggttgatagtacattggctgttccaagcagagacggcttttcctacgactgtctcctcctgcgccttctcatcaatagccttgattttaccaagatcgctcgactgttgttgttctgacaaagctccctcgaaaggctcaatttcagaccccttgtttttgactgcactcgtctcaatccaaggcaaacaagacttgaccaggatccagacggcctgcttgtcttgaacaagtggtgcaacacattgctcggccaaattcttacagagtcccgcagattcaactgcctcggtgacagcgtggaggagggccactttctggcctacctcttcagtatcatcaacgtcggcgtctgcgctagaactggaggaaggcaggggttttctggctgaagcaatcaaatggtcgacagcataggagagccgattgcctgactcatgaagatttcgaacatcacccattggtctctttctttggacctccgggctcgaagcgatggagaggatgagggagagaagagaagttgccttatcgagacaagtttgagtagcttccaaaaggtgtgcttgatttgaaggataattacggatcgaatgaaagtgggtatggccaattagagctgctaagctggtcacaacttcttcgtgtaagctgagaacctgagtgatgatattggcagccaggaaaaacccggaagcagaaacgggagcagaagccagagcctgagaggaattcttagatgattcaagggaaaaacttgatgagcttgtcgacgagatcgagttgaatcttgaaggaggggctggagaggagacaggtgcaaagagtgatagaagtgaaacagcgggctgacgagtttcttcttcattgagaatcaaaccagaagcgctggatgtttgtccaagactacgagaccttcctctaaaggatccagataaaatgctctgcgtcctggtggacaacaactcagggcgctcttgtgtgaaagagggttgccaagagatcttcgcggggagtcctattcgaagagccgactgttgaccagagaacccttctccagtattacggttggtctgagctactatatgcggcccttctttaatttcctcatcttcggaagcggagataaacgactcggactttcgtctctccggtatcttgataccacaatccgccgccgttcgaaggaactgctcgacatcggagagcaactttcgagccatcgatagcatattttcaatctcgagttctcgcgtagattcatccgttgtcttggcagatgccttttcctggtgagccaccattttgtgttgcgtttggtgaattttttttcgggctcgggcaagagacggatatttcctcattgaatcagattccttattgaagcaatccattatggag

SEQ ID NO: 1819 - DNA, 1835 bp, Xanthophyllomyces dendrorhous
ggtttatggactgatcgggttgcatcttcttccacttttttttttctttcttaaactccggggactttcccagcagacgagagaaaggtgtgcagatccaagaacctgacgaccttgtaggtgtatctgcgaaagcgattctttgctcgacgagggttgggagaaagaggagaaaagagagagcgaaaaaaatggtctgtttttgaggtggcacggcgccctggtaatcatacacgtgaggctcatgagcacagcttcaacttgtaaccttgactcgaccggacgttcttccttttgttcctttgccagggttttcaaccgactgacacacattaatattccctcttcgatctatttctgagagaaatgaaatcggacttatagatgggtacaacatgtcaatcatcggatcagaagggaacggaagagacacgattctgattccggtataataacaatagacgtacaacagtgtcaaaaaaacaagaagtgagaaagaaaaggtataagagaaggactagactatgcgacgatatatgatgggagtgaaggaggatgttcaagacggcctatgctagggaatttatacatgtatgattggaaacaagaggaacagactgatggaggagagagagaggggctattaggtcaagacgagcgtgggagaaggactatcaagcgagctaggcaacatgaatgtttgggggcgcctggacgaagattaagcaagattcgatcagtcccaaagcaaatcgagagacacacacaaaaagaaagaagaaaaagacaagaataccactcacagtcgattctccagcactttcatgctcttgatctcgtgcatgatgtctcccgagccaagtcgacgagcacccgaactctgcgcattggccaccaagaccgagatgtcgagcggaggagagaatgacgcgatagggatggacgagtcgttcaacctgatggatgaaaagggaattgctgcaggaaccaatctgtattttgccaaaagctatcaagacatggcgatgttagtaagcacgaggaaggaccacaacacttgatcatcagagagaaatagtagtttttgactgataaaggacacgtacaccttggactttgagatcttcgacgaggacatgaagcgttgaaagagttcgcttcctaagctcatagcatgaagagagatctaagtggaacataaagacaagaaaaacacgcgcgaaagttagcgtcgccagcacgacagaccggatgggcaacgcgggtaactccggctatcgacgtgaatgccaagttgacacctcatcgggcaacaaccgggatttcccaaggcccacccttgtttttccttcttttgccttgccgaatgaactcaccatcccagttctccgaatcccacacgggaaggtcacagatgagctccacctcacagctgccagggaccatcaatgagctaaatcgtagagacggagtgaaacctatcagtcagggcactttctttcacacgcacacacatattcatgtcaatagacccatagggaagtagaagatataaagacaggaaaaccccaagatgtacctgaacactgaggattcaaactgatgcaaagccgagatcatcgactgggcaggcagctcgatagtagatcttggagaactaatcattgttattcttgcctacgtttgttttgagtctgggttgtttaacggggaaatcgatagattcaagggggtattggtggagaggatgtgtggagatcgagggatgagtgtggggttaacgtagaaggtgggtatatatgagaaggatcgaaagtgtacagaaagtcgaatgt

SEQ ID NO: 1820 - DNA, 32334 bp, Xanthophyllomyces dendrorhous
cctctcatgtctataagatcggttgtctcttttcgaagaaaaggctagaacaaaaggcttcgagcgttcgagaggaagacatccatgatgatatcatattacattaaactactcctctaatcgatctcgataatgttcgcgtcaggagttgacgcaggtgctccctgttgagatggacgttggtctttcacagcaccgagttgagaggatcggtacgtcttccatgtagtctcctcatcagacaacacaatcggctccctttcgccggcggtcgccagggtagaagattccatcggtcgtgatttactatgttgagccacagtagaatttacaaagcgaaagaacctgctggacgtttcagtttggacgcttgtagggttagactgaccagctcccgaaaactcgccaccctttttgacaacatcgacatcgttcatctcgtccaacgccgcccaatcatcctcgtccatcccctcagcctctgcgattgccaactccaaatctatgtcccatttttcttcagcgatcttcgtcgctgatctctttccaacagacgagttctggcgttttggagcaggttgcttcacaggagacggagcggcccgacgggtaggaagaaccgaggcaggaataggtgtggatgtcgattcgtatatgattgaagattgtccacgtggaaccgtattcaatggcatgtgagcaggcattagttcaaacccttccggaatatagtcttcttcttcttcctccttattgacatcatcatcgtcaaagtcgatatcgataggtccctgatgtagaggttggccttctgttcgggcccttggaggaagatttggtggcgagagagcgatattgtgctgctcaggctccggatcgattctggtatatcggaaaaccaatctgagtgcatgtaccccacaacgtcttgagacagatgaaaagaaaaggctggactttcacttacccaagccgatcattcaggcttctctccagcgcaatctcctccctaattccttcacaccattgaggtacgctgtaccccttgaccgagcagttctcaggtgtaagcagcaacaatcctctgagaaccttgacattttgcagaacaagctgtttgtatgaagtgtatgaaatcagaaacaaccgtatgatgcgtcaattctaacttcctgtcttcaagaatagacaggcaattcatgcacgaacaactgactttacatcctagccgagtctctcccagcactagattgggaatcttcctatactctatggcctgccaataagcttacaccgataagatttctaaacaaccaggataggatcaaaagatgacagagatatatattgaaaactcacttcgacctcgtgaactccatcacttagtgtgaacttcaacattgacctcgtatactttggtccagtgccttccttctcgtcttcctctctcccattacctgacccatcctcagcaccttcttcctctacaggtaatcgcctaatttgcgctcggccagaccgaacttctcgtttgtcattcaacgttcgtttgagattgtatgccgaagctccgatctgtggagagccatatatttatagccggagaaattaagaaggtgcatacagtcagtcttcattgagagaattagacttaggatgaaagtttactggtgtccaggacgggcgacaagatcatgtagaaaagaggtcgcacctctgtgatagccatgatcatgacgaggcagccttgtttctgcccttgatataatacctgctgatgcatcatatcctctccggtaatcaactcaagcggaaaaccagtcccatgtacagttgattgctcgagatcagactcgaggaaggcaaggtttacctgtttgatctgttgttgaagtgtcaggcctggagtcttctcctgaattgattgaataatgtttgtgacccattcctatggaaattgacagcaagtttcaaaacaacaaatatagaaggtttgagttcgaattaatataagtgcaagaaggttctggagagaaaatcggcaaccaactggatcgatagctggttttgggtagaggaacttcaggttattgaggataggtccgatctgagcagaatgagtggacatctatagaatgattagagggaatttttggatgcgatcactcggtcatcacccttcttgttcattctctcttgatgttgaagaaacggttgaggatggaagaagatggaaaatatctcggttatcagcgaaacgagcgattcctgcccaaataccacttatctccgtctgtccatctaacaatcaacatggcttctttcttcttttatggaactctcttggtgccagaagtaagcctgacaaatctgcaattgcaatttcgaacttactcatgctacatgttctccgtcacagatcttgcttcgagtcatcaatcgacctgggcgagatctcacgttccagccaggcattctaaaaggctactctagacatgccgtcaaaggtcaagactatccagccatgatccctgaagaacaatctcaacagttgaccggaacgtgagtcgtctcactatcactctttgtaatgtttatactttgtcgctgaacgatgatgcaatgggctgataaacagactagattctggccaagtgcgagggacgattgtccatcatctctctccatccgatgtcgccgctcttactgaatttgaaggagacgagtatgccattcggacggtatcagttgtcgctctttctgaaaaacgagtcacgattgaagcacatgcaaccgagcttatccttgaggaaggattagataaggaaggcgcgactgttcgggccgaaacatatgtctggatagcagagtcatataagttggaaaaaaaggcttgggagtgagtcgagtcacatcgcgttcttatacacaacgttatctctgaagttatcagttctctcttctcatttgctgatcttataagagtcacggtgggcatcttacttgtagttttcatacctttgtcacagacaaactccatctgtggacgatcccaataacctccttaccagataaccacgatcatccaaaacctagcccatcaactatgcctgaatccgtacttcctgctaacaatgccaatcctcctgtgctcggtcatggaatcaagaaatacttcgcattcagcccaggatatgtgaatctcaaccatggcgcgtatggagcagcgccccttccagttctcaagtatggcgaggaaatcaccgccgcttgcgagtccaaaccagacttgtttctgttcgtgactctttttcgaccttttctatcgttgtttgtctacttgtttaatattacctgtccaaccgtttttactcaaaacaggaagagagaatatattcctctactggcaactgcgagagcacaagttgcagagcttatgaaggccaagtccgacgatgtcgtcctcacacctaacacaagtcacgtcagtcttctttattccgtacttgcttcaatcttgcttcgatagctcatacgtgatcatcatccatatgcaggctatcagcactgtgttgaacaatatcgcttggaaagaaaatgacatcatcgtacattgttcgtgcctgcatgttttttgccattccatcgcttgatactcttgattggctgatatccaaacagacagcactacttacggtcctgtttataaggctctagcctacactgcggatcgattcccatcgcttaacctcaatgttcacatcatccctttgacctttcctatggctcacgctgagatcgtctctcttacggaaagcgcggtgaagaaactcaatgagcaaggcccaggaaaagtcagacttgttttagtcgatgcgattgcttccaatccgggaatagtgttgccttggagggaagttgcgaagatagccaagaaacatcaagcattatgtatagttgacggtgctcacctgattggtaaacaattttgcatgacaacgcgatgtccatcttcagtcgtgattgtcttctttcaattgaatcctgttttgtattgtttgttaaataggtcaacaaccaatcgatctatcggatcctgaaacgtgtgattttttcatctcaaattgtcataaatggatgtacactaagagagcattggctgttttatggtaaaccttcgtgcaatttggttcttacgttttctcttctacatgaagacaattgactcatgactcaccaatcctgttttgataaagggttccggagagaaatcatcgtttgattcaaagctcatttccgacgtcaatagaatagtgagttcattcatcattcaagtttgttgtaggatatttcaattgactcgcgtatgtacgttggtgccatagcacctctgcaacagtaagcggagatatattcttgctaaatttggaacgaccgcagactgaatgaatcatgtgtggtatgaacagaatcctggcgtaaatggtcctgctcccttccacaaattgtttagttagtgtcgacttttttctatgatttgtctgacgaatgaaagttcgtcctgattgaaacatgctaattcaatgtattcatcacttcagattggacggcgaccaatgatcttgctccttccctttcggtcactgctgcgctcgacttccgagcctggctagggggtgagaaagttatcaccgactattgtcataacttggctgtcgaaggaggcaagattttccaggcaatttggagcgatggtgatgtacagatggagatcatggagagtgaaaagagagagttgacggctaacatggtgtgtcctgactggtctctctttctcagatagagaagagtagattactgattttctgatgacttccctcgtttctgtatcctgggtttcaaggtcaatgtggagctgcctcttgtgaaggctcctacttatgcggatgccgtggctcagtatgatgttatgttggacatattattcaaggctaactgcttcgctatgcccttcgtccacaataataaatggtgcgctcttccctcttttcacttctaaatgaacacaaggcattccgactcattctttcgtcgtcatctctctttctgacattcgtttctataggtgggtacgtgcatcggcgcaggtgtataatgaaccggaggatttcacgtatattgcaaaggttttgaaggatcattgcgattcgctcaagcagaggcatgttgatgcagcataacgcgtcatcttttgatacatgagtcttgaattcatcttcatggactacattggttctctttgtctatttaatgagctgtctcttaattccaagaatgaagatggacttttcgctctagcacttgtttccgatgaagtgctcactgatttgccaaaaccatttataaaacgtccaggtgtctctctgaagatggatttcaacgctcttcggagagaagcttctgatacctcgcgcaagatctagagatattgcctcaagaggaagaagcaaaagatagtcgaacaaaagttgaatagaattcaagatggagataagtactgaaatgaaagggtgaaaacgaacttctcgttctggcacttgttcccaatcaagtcctcactggtttcccaaaccatatacacaccacccaggtgtttcagtaaaacggattgagaaatcaggaaaacaggagggaacccgctagaaaatctatagctcttcggaaagagaggcttgggactccgcgcaaacggaagtctgaaggtgatgcctcaagaatagattaacaaataacagatgaaaacatgtcaagactgttgaaacttcgacacttgtcaagaaaagcattttgaactccttatagttttgtaaaatgttcttcaatatagaagccgggctggctcaattggtagagcgtcagacttctaatctgaaggttgcgggttcgagtcccgcgtctggttaatagcttacttttttttctctagtttttcttttgctatctcgtcactctcaatccatttttaaaacccagtccattttttctggtcagtatgtcgaagaatttttttgcaagtggacagatgattgtctagattgatatcaacagcctatatagatggaggtgtggaagaggcatttgaatggccggcttaaccctaacatgtttaatcatactggtaacaaaatggatatcaacttcaatttctactgctgttcttacatcattaatcaaacgatacttcatgctacctttttagtctttctatcctcaaaacgatcgttctcgtgcagcttgtatcttttctttattccggagtccggaccgctcgggaatggaaacatccggactagtttgttccgtgggctgtgagactgatggttttagctgattctatattgatcaagggatttttttcccagaacggtccggattgaatgattcgtgatgatgtcagatgatcatctaatagtcgcatatcgaattggccaaagatttctcattctcctttacgcttcatgtcatcatatgaagagtgtataagtagctgttctatgaaccagatgtttgctactcatcgacatagattgctttacatatcactaacttcatcatgcgtttccgaggactgaccgttgtaatctcttgcgtggctttggtacaagcgttaccaactcttatcactggaaggaatcataaatgggaccgaacgtcacccgaagaaggtgatctggtcgttgggtcgaaccactttgagatggaatacaagacgatctccgaagctctcgctgcgttgggaccaactggaggaaatgtgtttgtgtatcccggaggtaaatatgtctctatttcagacacccagaccagctctaatcggtagattatttcactacatcgacgtacgttctagtttaccacgaacaggttgtgttgaacaagacgggaccgatcaagatacaaggatatacaagtgatgctcgggactataagaacaatcaggttgtcatcacctacggccttgatgcggtctccgtgaataaatcaaacgatctgtcgggaactgtcagagctgaaagcgcaggcgtgaacttgtacaacttggagtaagccatagatcagttgctgtccatcttgtcttcgttcgccctctgatgatgaataacacttttgtcggtccacatcagtatcgagaatacatacggtaagtgtactcatctgagtgataacgttgtgatgcatacgttcacgctcgtcttcattgctcttctcgattcatctttcaaaggtcattacactgcgggatgtcagtgtcaagcaagtaagttcacgatcctattttagttcagtcgcatcgactgacaatcttgtctgttttctaccttctccctaccagtcgctctctcagctcaagccgggaagcaaggctactacggcgtcaagttgactggatatcaggatacgttgcttgccaatattggcactcagatctattccaaggtatatcgtcttctcgtgctattcaaacaagcagtgactaattattcaattttatgctgaaatttagtcttgtattgcgggagccgttggtaagtcatttaatttctttgattcttagatggctccggttttctgtatatactttattgactagattcaaaatttcaacaactggtagatttcatctttggacagaatgcatctgtttacatctatagtacggtcagattgctattcttttgcatatagagtagtactcaccacagttcttgacctctacgtagaatccgacatcgtctctaccgctgagggaaacatcacagctcctgggggaactgacgagaatgctcatcaagtgttgtaagtatgatagcattatccacaatctcgcgctcaatagagaaggtacctgccatcatcttttgttcttaatagcgtttttcataagtcgaacatcatccctgcttatgatgctgcgaccaacgtcaccggaaatggaaccggaaacgtctttcttggtcgaccctggaaggcgttcggcaagacaatctatagaaactcttacatcggagatcatgtcaacgtgtgtatatccagcgcgatctatagtattttgtatacagtggtcttgggctcggattgagctgattagcgtctcgtatcttcgacagcctgtcggctggaagatctggaatgtagctacacctaacgtgaatcagagcaccctggccgagtacaaggtgcgttcttgtgttttgtttttctctttggacaacgtgacttgatgtctgattcagttgatatcatagaactacgggcccggatcatactacgccaacagagctgaacgagctagtaagatcctcatgctcattgatcaatccgagctctgaatgctgacaccgacttcttcttgatcataggctttgctcaggagctgacccagtcggaggctgaaaactacactatcacagctgttcgttcagtctctcctctatcatactctcaagtcaattgctgactcatttatgcatgatatctctatgcctaggtccttggacttgattatgagtcttgggttgatctggattatgtctgatctggaggatttctataatgtagcgctcggtagtgcaagtgctctgatatgatatattacctaagcgtcgggagaaacatagatacatcagtcacatcttcttcagtctatagcagcaagactccattagccatctccttcggtttctatctcgatacattctatcatggcagctccccagtacattgcagccgttagtaaaaatcgtactgtacatgagtagttcttgggtctgatatttaccttgttgtctcattttgcatcaaaaggatgacgacgacgacgatgtgctctcgtttgtcaagcctaccccaggcctggcagcagctacgtcttcttcctcagtcccagctacctcttcatcatcgagtggaccttcttacgcgaatccatcagctccccaggtgcctagtggagtatcagggcgtattggatcgaacccagctccctccaggtcaaacatcgcgggcgtccgagttgagaccgtacgtgtgtcacgtcccgaccccaggctactgattgtttgctgagcataaacaaccgaccccaatctttctttctttgattccctgttcggcacgaggctctctagagatatacaggaatgaacactcttgatgaacccgtgtcggaaactattgtacgcctcttccatctatatctatctgtcaataactttatacctaccgccttccgtgtccttactcttctttgctcatctatatcagcttcgggatctgaaaagcatttatgcaaaactgcttcaggttctataccctccacgaacaaacggaatcggatcccaattggatctgttgagagattgggacctatggggaccgttggtgatatgtttggcgttggctatcatgctctcattagatgtacgcctcttgaccctttctttgatcgcgatggaagtctcgttcgtcgagcattggaactcaccagactgataccctgctattctttcatgtcttctcttaaccttctgtttatgacatccgttcaggctccggcagcgcaatcgattgaggctttctccatggtaatctcgctagtgacgattggtagtgtagtcgtaactgtgaatgcaaagctactagggggaaaagtgttcgtccaagcgcctgcctctcaacatattctagactaagcatgccaattctaactctttgttctgtctaaaccaacaataggtcgttctttcagtctcttgtacgttttacatctcaaacgattcctctttcaaagagaaccacgtccgatgatgttcacttgttgtcttttgcttcaacaaaatctttttagtgtgtacttgggtattgtgtcgctccactgttgctggcatctattgtatcattcttccttcactcactcatcatcagactacccgtcagtctaggatgcatggcctggtctgtttggggtatgtcttcttcgttctcttctctttccttctctttgatcgaaccaagctgaatacgaccgtgtttttcacctcttagcttctgtcaactttctctctggcacgagattacctgcatcgaaacaggctatggctgtttatcctttgtttctattctactttatgctcgcttggatgattctcatccagtagacaacgtttcccctatctgttagaaaaatgtaataggatgtgctcgcttcacataaacgacttaaggatcacttaacgagaaggagtcattcaagggaagatcatgacatgtaaggtacagatgatggtatctgaagtagatcgtcaaacgtatagaagcatggaggtaagatacatgcatatgtaaaaagtagagaaagaaaggatagatacagtgagcagggtagcaaagaggtagatcgaggaccgaaatctcaacggcgctctttcagctcaaactcatccgtccttcttgaattcgttccggatgtagagccgatttcaatcccaatggttgacagaccagacttagacccactctggtcctgattcaggttggagctgataaaagccttcttgatctctctcgcgctcgccttgttcttgaagggaaaagaactcgtccgtttgtccgctttagtcgttttcgatagatgcgaaggttcctcgaaaaacatgcactatcaaacgaagatcaagaggtatcgaattagaatcgtttcctacaaaacagtccgcttcaacctaagcttccgaaaaagttagaggatgtatgctcactacccaagcaccatacactccaatgacgcccgtcacgaaggtaacatacagactcagaccggaaagagccgtgttgtagctcgtgccagctgagatgaagaacaacggagtaagaatccatactatggggtttataggacaaatccagagcaaggatgattagccgataggatgctgagtcaaaaatctggaaaaataaacatactagtctgaacccgctgaggagtttgcttgaatctagaccgtttggagtgaccggtggtggcggtagaagaaggtgcttctggttgcacagggtctaaatgtggagctggaggggcggtctattatgcacagtgatgatgattatgacgatgacaacaacatggatgataaattgatgagacaggctgaggcatcacgatactcagaacaagaagattgaagagaagacgaaccatacagaggatgagacaagccagcgcgatcaatctgcgtcaagcggccagcgcattaaaaaagggaaacccaggagtaagatcagtgacgtatcaagattgaacgacagagagcgagcaagatgacatacagcacccccatctgcaaacataagaatctctccagtctggtcaagccaatccggcctgacgagaagatttctctttgtgtacggccaattttccccatctgtgtgctctcctcatcgagacctcccatgaggaacatgattaatcttggaaaggtgatgagcgggatagctagcgaggcaagggcaacggccgcggtgtaggcaaaccaagataccgcatccgacggatcgaggtcctctgagggcggctgtgaggcctgccaaagtgtctgtgatggaaccttactatcattaattttagaagaagaagaagaagccatgacgacgaatggtgaatgatggtaaggatggatgatcgtcagagtgggaaggagcaagattgtgtaattgcctaagaaatttcgtatcatacatttatttaacacatggaatccttgacgataagatgatctcttactaccaacaacaataacgacaacagcagtaacaaagacaggtgtaaaagcatacagcctagaatcccagactgatagtgagcgagtctagccagaaactagaaacagcgtagaacgtccaatccgaatgcttcttcgtcgagccggccaagagctcgcggatggtctatccaacaagctttcaacaacattcgagagatgcaggtcggccaacttgaactatcttgctaaggatgtttgtcccatcttcttctcaccttcttgctcatctggatttactgtctggttctccttgtaaaacagtcggctgattgcttccttgatctcagtcatgccggcgtttacagagctcgccggtggttcggaaagacgtccaggataagtctgagacgtttggtcataatgtcagtccttgaacatcaactcgaccgactcagagggatatcaacggctagatcaatcattcatcttcatctattgtgttgcaactctttctcctaggacttcatcttgtctatcttgaatgcttcgccatcactacgtgactctcggtcgtttctcgcctcgttcggtgcacctctgtctccctccgattctaaaagacctacgccggtagaatccgataagcaacagtccgcagcgttggtgtcgagcttgctgaaccaccaccgtcgccgccacaccgccgtagtcaagatccaaggtcctttcactgaccgacagctcgagtcgatatgccgtggtatggtctatcttcagcagctcggtctcgtcagtgtgattgtggtcgaccaagaaggctggcatcctgacggacaacaagggggcaaattcggtcgggaggccaggcaggaggcattgagagagatggagcgtgtcgtctccatgctggttgggcttgggagcgaagccaggcccgtcctgcaggtgccaatcaccgccagtccagatccagaacagggtgggcagagaagagtgacggtcgaacaggcgaacttatcagccgtgatcaatgcgctgaaggccggagagatcccggtcctaccaccgctcatcttagaagtcagtggagagaaaaccaaggttgagagaggtgatgcaaacgaagtcgttcttgctcttgtcaaaggcctcgctgaagctggaaaagccactagcctgtccaatgacaagggtaacgtaccgttcagagtagcatccgaaacttctctctccgaatccattgcaattgccgagtcggtatcttcgtcatcatcctcgtcatcaacgtcttccagttcatctcaatcgtctccgctacttgacccgttgaatttgaccccctatcggctcatgctcatcaaccgagagggcggcataccttcatacgctcgtcagggccttcctcacttgacaatcaacttgacatccgaatactctttcatcaatcagacgttctcttccgagtggaacaactctcatccgactgcgctacgaaatttgcacttatcaaaagaatgcctgcagctcatgccgccaactgcgtcaggaattgtagtttcctataaatcgccgatggccctaattggaaacctaatcaccaacaagccagcccactctccctcccttcctcatgcgctgcttgattcgcaaaagaagctcacccctcacacgccgaccttgatccggctaggtcttcctatcgagatcatccgaaacccaaggggattcgaccgagtcaagatgacgacactgttggaatcaagcttcaaacgtaagcttaaccaggaggcattctacaaacggcttgaaaaacacctggactttgtacttatcgccggagactatgccggcgcggctatcgtgaccaatgaatgggaagaaggaaccgagcttgccgattcgggtctccctcccatctcctatctcgacaagttcgccgttttgccttctcaccaaggagccgtctcgggcactgtcgactttctctggtcagctcttcgggacgagacatttggatcaggactgtcttctgcgctgaacacaacgcctggttcgctggcgggcactttgaaaggtcgggatcttgtatggagaagtcgtgcagataacccggtgaacaaatggtactttgagaggagcgatggctttttgagaatcggaggtgaaggagggaagtggaaaatgttttggtgcgacaaggaagatctcagtcacgggctggagagtatgaagactcaagatcaggagcagatagaggaggcggaacagaaacaagagcgagttgagctatcgacggatggatggatggatttgatgaggcgaaaagaaaaggatgccggtgggtttgatcggtggggtcttgtggtggacaagattcctagtgcttgggcggactagagaacatgagatgtatatgtatcctatgcatttctgattagacaaacgaccagctatccaaacagcatgcccattcacgttaaccaagatctgttgatgttgttaacaaacgattgatggccacaaagtaagagttcgcgcttccaggcgatttcgtcaccgccatcggcaagcttctttcctcgctcgctcactcctctgaccatcaccataaattatctttgagcgtctctgactctgagtttctttctttacctggtttgattgtttcctgttcaagcttctgtctggaatcactctgtactgtgccctcggacgagacacacacatatacaccatcttcttttctccgccttgggagttcactcagtcatgcttcgagcccttcgaaggccaccccctcggctatcatcagttgcccaacctcagcctcgagttcgctcaatatttgttcctctccaacgtctcaccatctccactagctctgggaatgcatccaaactccagcattcccttagacctctctctgtcagggcactttcattcggatctttcggtaggattcttggtcgctccatcaggctgcctctcactggagcagccataggtggaggagctatgagtgccgctgcatatcaagttgagagttagtcttttcgttcttccctccttatcatactctaaagacaatgtctatttgtctgataacgttcgcacaatccaactgcttttcattctgatttcgatagacttgagaacgcaggcgacctcctggcttgactttgctacctccaccatttctgacacaacctcgaccttgttcgactcggcatccaatgcagcttctgaaatctcgtccgctctctcatccggagtggattctgcaaggcaagggatcgatggacttacctccgaactgtctgggttagagcctccggactggttccaatccggattggcttggttcaaagaaggccgtattggtacagatgagcctgcacctcaaacagcatcgaccgaagacagctcaaacaacgagaccgaaggagacgaggaaggaggagatccgtcgcccgctccaccagcaattctcagtgctctagccgcattaacgtcgtcgtcttcagatgaggatcatccctcagcaagatccacacttgaggattcgacgttgcttcttctgacaaagaagctcatcgagatcagacaagtcttgctaagtattgaccagtcggatgcactaaagctgccaagcattgtggtgataggaagccagagctcggggaagagtagtgtgctggaagccattgtaggccacgagttcttaccaaagtgggttgattcatatgatcttgcgcaactatccttgctctcagtttctgactatcatccttacacatttctattcgttgatgatattgtagaggcgacaatatggtcactcgacggcctatcgagctaacattgatccatactccaccaacggctgctcggcctaatcctgtcgagcacggagacttcccctccctcggcatttctggaatcactgacttccgtcagatacaaaagactctgactgatcttaacctatccgtacctgcgtctcaagcggtttcagatgagccgattgacctccggatctactccccgcatgtccctgatctcacgctgatcgatcttcctggatacatccaaatcgctagtatggatcaaccaccggagttgaaagaaaagatcgctgggctgtgtgacaagtacattcaggaacctaacatcatccttgctgtttgtgcggccgatgtcgatctcgccaactcgcccgctcttaaagcgagcagagacgttgatccgctgggtcttcgaaccattggggtggtcaccaagatggatctcattcctgccgaacagggtgctcagatcttgaagggaaatcgataccctctccacctagggtacatcggtgtcgtctgtaaacacacttccaagggaatttttggatcggacaagtcaaatatcactggtgccgtcttgaggagggaggaagactttttcggaggcgagaactcgaaggtattcagacgaacggacgagaatagcgtagtggtcgggacggacaagttgaggaaaaagttaatgagagtgcttgagacgagtatggccggaagtttacatggaatcacgaacgctgttcagttggaactggaagcagcaacgtatcaattcaaggtttgtgtgtctcgtctattcatctctcgattggcgttactgataatgttccccgacgttttttctatactgaatgcttctataggtccagtacaacgacagacgggtatcgcccgaatcttatgtggccgagaccttggatacgctcaaatctcagttccgcgaattctccactcagttcaccaagcctctcatccgagctcgtctgaagtctaagcttgacgagaagcttttaaacattctcgatcaattgtattgggctgacccacggacggccgagttgtctgcacttggcgacgatcgaaagttgactgagaaagagctcgatgtcgcttggcttcacaagctcgagacggccaagtcactattgacaaaatctggtgtcggtcgggattcgacctcccttgtcgccgatggacttcggcaattgatggagacaattacctcgaccgaaccgcttttaaaccatccagtcacgtctgaacgagttattcaattttctcacgcgatcctgagagatcggatcccggtgacatctgatcaggtagaaaattgtatcaagccttacaagtatgatatcgagttggatgaccgggagtgggaagttggtcgagtccgagcagaaagtttgatggagagggagattgggttgatggaagcaaagttggcggagattagggataaagttggcggaaggagaactctagatggattggtcaggcatgtaggcgatattgagagagaaaagaaagaaattgcaaagagaaagttagagagaatgaggaaaggagaggaggaggtggaggagacagtgaccccttcggatccttataagtacaacaccgctcatcttgcagaaggtccgcttcatctataatcttttcatactcctgggtacatcatgtttgctgactcgttggaacgcatctgaaataaaatccgattgactagctcgacatgccatgatcttccaggacaggctccaaatcatcaagcttcggaagcttgcccttaagtctcgtcgatgtaaagccgggccggacgaaagagcattctgtccggaagcgttcttgaacgcggtagccgataagttggcctacacatctacgatgttcatcagtatgttttcttcaaacgcgccagcttgagatcgatatgatctgctagagctgacaccgacaatgtcccttttcagatgtcgagttactcgaccccttcttctatcagttcccaagcggcatagacactggtctacgacctgaccttatcgtacgttcatgtgttttctctgtttgaagctcgtatgggaaaaggtattaatcccgtatgtcatgcagacaaatcccgactttgcgagagaaaacccgacaatacgcgctcacctcgagttgcaagaacgtaaagacaaattggagaaagtcagacatcactttgtcccgttcttgctcatcccttgcggatgggttgtcatacagtttggacgaatggctaattgttgtacttcttgttctatatctctccacttgaaattaggtcatggcttcccttcaatcgctgatcgatctccgacaagacgctatgccagagacgaggaagcgaggagcagctggcttcttcggattccgatcttgaaaaggctttccgtttctctgcatctcctgtgaccttctctcttccatatcctgctcccctatacaacctgaagctttcattacagtctcttcctctctgatacttcttgtcttccctctgctagccatcatctcatatacgacagcctcctttcaatcatcatcccaaccatcttatcccttcctcctcgacatgttctggttgaactttgttttatataatgatccccctttcttgcatgagtttctccctggccagttattttgctgatatctcagttggcatctatcgtcccacgggttctcaggactttccttctgtcaaattagaatttggcgcacgacaagagagtcgagcagtagggtgcgcgagtgagaagaagaaacagcaagaccgggaagtcatgtatgaccagcatgaatcaaatttatatccgaccccggtttttttaactcgtccacttctgcctgaagcttctcaatctctaaaatcaatctgtccctctcagatctctcgtctgaccctactacaggctcactgccgtctccgttttcaggtttgttcagacttgggttcccgataggtccggaagatgaggaggatgaagagagcgcggcatcaggcatgttgagtaacaacaaaagtttgagatcgtgtgagagtttcaaaaggttcgttgtgttacgaagtaaactcgatgaacggagagagattgatagtggtgtaagcgggctcgaattgtttgtcgtctttatgggatttgatagatacgaccatccgaattatgagagtaagcgtcagcagctggatgatagagatactcatttctacgaaaattgaggaagaaacagaagaaacgaacctcgataccgaacccagccatgacttcacccaatccatcaccgagcccactaacttctctgtctaccaacacgttccattcctcctctgctttgtccaaataagctgttggatccaagctctgatcggccgaatgagatcctgcgtttactccggatgaggatgcgttggagtttggtccagaggaagaattcggaccagaattcgtcagccgatgagtcgggtttctgaaagatgcagacggaagtgattggcggggtgcatagtcgttctgtttgatcagaccggctggtggtgagacagccatttcgatctcctttgtgttcttgttcttgtcttcggttcttttgactgcgtgtttgcggtacacttgaggttgcacgtcgttgagttgtgtttgtaccgatagaatatgtgtgttggatggctcaaaaccttcttgaatcagggaggattgatgttatagtaatacgttcagcaattacgtaatgctagaaaggcatgcaatcgtttcttgatctacactgtccatcctgctccgtgtcgctcaactcatttggagacagcgatagctcttctcgatgaacgataagatgtcaatcaaaacatgtcatggtatctatctatcggaaccaagggcgatcacactcaagatcggagcaaagatgtcctttcatcatctccattctgagcgacgtgcccgtttccatcggacgtaaggggtcttccgaaatcatcgatacctaatcgggcttgtctcttcttccaaaagatacacatggtctgagacgatcgtaccaagatgggtcagtctataggcaggcagaattctgagatacaaggagaaatgatggttgagacaaacaagtaataagccctgaaggataccggtgatggcatatgggagccaggctgggtataaccgtcaaaagggtgatattcagctagaattttctcttataagcactttaaaatgatcagaaacttacaagaccaagtcgttccctctcggatggcgatactcaatacaaacactatggatccaggggtttgtatcctgttcaggtagagaccatcagcttgcctctattttttctagatcaagctgaagtagacaaaaaaacatacatcatcgtaggaatggaaagcgcgccaacaaagccttcgcgccaagtcagatgaatctgaggcgcatattgcgccacggcaaggatggtcgaaagaaggcccatgctttgacgggaagcgatagcaacaatataagctcccaacgcgtccttggaagattgccgagaacaacatagagactgacctgtcagctaagcggccaagaactttgtgtggaggttgcacaggagtcggttggggaagagggtaatgatttaacaggtacaggatgacgcccaacataacgactctgaaagaattcagacagaggatcgtgagccaaacgtctgctttgaatgccgagtaatccaaacagggtgagcatagaagtcgaagcaatcagggcgcacgagtacaacaaggtcagtccggcaagtgcgaccgatgttcgccagagactcgaacttcggctctttctggccggctctgtagacgtttctggaagggccccatatttgagatggtcaggaaagtagaagagaaagagaacaaagctagaacagtgctccggatggtaaaatcagtgaggcagtcaatgcgatgaaagagatctcagggcatacttgaatgagaacaagatccattgtaggaacacctggatgatgcccagtatcgaggccgtacatgttccaaaggactagatgtacgaccagacccatcaagtcagattctgctcgaactttagaaatgaggagacggatgaacttgctagtatcttgcagcaactgatcaaactccaaccaaggatgaaaatgttgaagaacccgctggcgctactcgtgctacctaaaaggagataccacggagagagaccctctgaggaacgattgttgatgatccgcacgtgctgaggcaagtaagaccctactaggccgacgatcaacagacttgacaacacgaaagctgccggattgtataccggttgacagaccgctggttcatatggactgttgagcatggatacgatgaagatagatggttgttgctggttcccagagagaacatgctgatgacgcgcagggtctgagatcaaagagatttcacagctttcaccttcttttgcccgtttgtcttacaagttgaccatcgttgctgtcgacctctctcttctcttttctctccgctccttgtccacctttcatcgatcccaaagaggtaagcatggggatggagagagaggacgctcttgtttgcatatgtctgatgtcttgtttgtgtgtgatcctctcctaggcctcatcatggccaatccaaggcaccatcatcctatcgccatcaggcctccgtctgtggccaacccattgcagccgtcgtgtctgtttcgtttgtcggatgactcacttgaagcacttcgaaaacttgttctcagtggcagccaggaattagtcgaactagactttggcgatgacgaaccggtaagttggtttctcctatgagtttctccagaaatcttttccttcctctcctcccttctggatgtttgtcacatccttctggatgtttgtcacatccttctggtcgtcaacatttggtggaaatttgatcaagagggcagctcacctgagcaaactgggtctacgtatatcattgtcctgatgacaagtcctggcgaacctcatccggacatgagtacactctcaggagctggccattggagggcaataaggatggtgtcttcctaaatcaaacctcgagcaggtttccctcatgtcgaaagctttgaagcttaggacgtcaagcagatttcagatccctacatattctctcgcaatctagcaaaacgccgaccattcatcagttcttgctaaacccatgcttattcttcttccttctctaaaaaatcatccattgttcttcacttagacactatacatccctgctcctgcagcctcatcccagccggcccgtacatactccctcagtctctctccgctatcaccgccgtatgagatcctaaatcgatcaacagctcatccacaatcaccatataccctactcaccattccagccaccagatattccatccgtcagacgaccgtctcagacgccgctcggcacaagctccgtctaggcgccgagctggccgataagaaacgagaagaccggaaaatcgtccagctcgagactgatccggtaaggagtcagtctagaggacgaagccgaggcggcaagagtcaggctgctggcagtgtccgcgtgagcagcggaagttcaattgatcgaatcaaaaaggtgtccaacgggctcggcaatagttcgcctctggccagagcggattccttggagagagaatatctgggccctgggtctgggccggtatcaactggcactaatggggggctatctgtgccgttgtcttctagtctgctgaaaagagtcgagatcggaggaggaccttctagaggaagttccatcgacaccctcaaaagaggcgaatcaagacgagcaggaaacggaggcgatcacagagagagctcctcagagagagaaatccttggaggctcgatgccctcttttaagcggaaggatagatccgactcggaagccggcttgaacggcagtcggtctaccgcggacaagaagaagagacgtacgatcgatgcttcgttcctcgcctcttcgatcaagaaaccggacgcgcatctatccgttccttcatctaccgtcagcacgacgtccgatcagggatcgatagcgagtcgtgggcgagtacccagtccggatctccgacatgtgcctctgcaatcgtctcatctaaatccggcaacggcaaggagtaaggatcggaagctttcaccagtagggtctccatcgagttcggcgcgccctgctatcacttcgccagcagggaaaattaccaaagcttcgtcctcggtgccttcgcctatgaggaaacagacaaacaaaccttcttcgtccacttccgcctcgatgtcgaccacagataaaccgaagcaaggctcgaggtcgacaggaggtagtaaagctagagacttttcttcatcttcctcctctgagggagaagacgatcgtgttcaaacgacaaagacagagtcctcaaagaacccatcgacatcatccaatactaacaccaccaacactatgaagaaacgtcggggatcgttttccgattcatccgcctcatcatctgcttctccccctcggcatcattctcgctcccgtcctctacaaccaccaccggtcccttcgatcatccccccttcagacccggttatgcctcaaagttcatctcctccttccttcaaattcgttctcccatcgatgtccttgaaggacctccgagaacggttcaaaaggctgtaccccacgtatcaggctctaaacgagaagctcgagatcgagaaacgaagggcggagagcgtgttggccggagaacgtgaggagaagggactttcatggaaggagttggagagggatgtgaaaatacgcggaaagttacataaggaattggaggaaatcaaagaacggctgaaaaagggcgccgagagaaggaagatgacctaagaacaggggttccaattagaaggagaaatgaaggaaactgaaatttattcatgtcttcttcccgttctctttgtttttttttccttgccttgcgcttctgtatctgtttgcatccctcagactcctcgtcaagcggcttttcttagaatgttcagacatattcatatactaataggcactgctgatgctcccgtcgacgtcgcaccgtcaaccttctccggcaaccagaaagcctaaaacacatacgacacatcatgaagaaaagttcagagcgatagtatcaacatctgctgaactccaaaacacaagacgagaggaacgaaacgggaagggaaagagagaaaaggaacgaaccaattcaccagcaccagtagcgatcatcaacgtccttgggttaaatccgacagttctcgaaggtttatcgtggcctgtgatcgatccgattggtttcaacgtcagaaggtcatctactctctgctgagcctgtcgagtttcttcgtctaatgcctgaagagcatcatcttggacgtcccacatgtgaagatctcccttccaagaacctattgagaagttgttttctcagatcagtcatcttgcaagcatctcgaagcgataagagaagagagaagagagaagagagaagagagaagagagaagagagaaggagatatagagtgaagactggctcgaactcacccgatatgacaaatttagcatccggactccatttgacttcttctccactgattcctctctgaggcgttccacccgagtcacccatcgggttcctacccaacccactatggccaacgagtcgcttgaggagttgtccagtaaatgagtccaagagataatgaacctcgccagaagttccgacgagaatgtacttcccatgaggggaaaaagaaagggaggtaacgattgggatttttggagggatcgactcgaggggtagttgaggatctacaatgatgaatgttgcgaatgggccctatttgaagcagcgcaaagaacatgacgtgacggcgggatatggttcagcaattcgttcttgttctttctcaggaaaacgacaagagaacaagatgcaagagactgaccgcgtcaaagttggacgaatcatacatatgaatctttgaataaggcagacagttttccgccactgcaaacacgattccttggttgtcatagcacactatcggagctgttcccgatccaatatctgtccgtccccgacaatggggagttcgaatgtcccaaagacgaacagttccgtcgagtgaggaagaaatgaattgatcgttcgaaggatttatcgcgagtgcgatgactctacataattcagtcgaggcaagagaacacgaaggtcgaacgacaaacgtcaggtcaaactgtaacagtggttcaaagacgatcaagcgaactggcccaaatatggggtactgacttgtctgtatgtccggtaaagtaagtcaggtatttgttgtcgtgtagagaatgatatcggatatcatctgattcatttggagcattcaagcagcaaatcccgggaataaaaccttacagacatcagccatcgcgcaaagcccaagaaaggaaggaaggacaggggacatctaccgtttattcttgtactggcgtgaatcaagttggtctttccgtgtgtgaacctgacgtgatcgattccgtactttttcgaatagaacgtctttgtatgcctgaacagatgcagacagttgaaccccacagaggcatatgaatgtcagtcccatactgagtctttcaactaaagacgtgttggtgaggtttataatgggaacaaaacaactttcgcactcactttcccgttcggcaattccataatttgaacgcatcgtcatctccgctcgtcacacagttgtcgcccatatcatcaaacgtgatagacgtgatggtcgatcctggttcgactgccgtaggaaacactttggccggtttgaatgccgtctattttctccccaaaaattgaatgaaccatgtggaccagacgcaaggcagagagagatacaagttaggtaattgattcgtgtgcttgttgcctagacctttaggcgtagttggaggtcggctggacgagctcgtgaaagacgcgtccgcgaagagaaagacaacgtaccattatttgaggagtcagtgttataggaacaggcatcggctgctcctttccagaaggagcctgaatagggggagcgggagccatgggatgagagagagtgagagagtgacggtcggaggcacctgatgtatgctgagctttccgcttaacctgatacacctaagagattgctggtgactacactgcttatgtaactctcttctgattttctttcgcgatctccaagctcagattgggagcgaacacacataacgttcgaaaacaaatcgtatactacatgtcgtacaaagatcataaggggactacaaaacaaaagtgctacaacatacaacacgacctacagataggtatcagagacatagaagcccggattaaattacaaaaagaagaaagaccgactaagaggggaaaagaagagagttgaactcaagagaaatgagtgaacgtccagagcctaaagagtatattcaaatccttctcgaccctcgatcactttctctcccgccctgaccttcttgtttgcccttgaaaagtaggtggtgaactattgaaatagaaagaaagttgaaagtattagccaagtcacgttcatttatttgaaaggcagtaattgatgggatagggttgacgcgctcacagtaagtgcgagaatgatcgtcaaaaactgcaagccaactgttatccaaagacctttgagctattggtccagatcgaaagaacgttccgagcagataagtcaaacgatccatatcgagccagatgatcaattaacatggagagggagcactaacgtatcgaggagcatctttttggacaaagacctttattgcggtatcgatgtttgaagagaaccgtaaaacaacacatcagctttgttctcgactctaccaaggatattgtaatgttcagggaaagacgtgtgatacgaacagtggtggccaaaattcctccgatgcctccaaatccgatggccatgacacttcctacacttcgcttactggatcccaaaatagagttattcatccaggcaagactacaatcggaaggatcataagaaagaaaggaagaaaaagaatgagtgaagagacacctgagactgaaagaaaacatcacatgcggacgcacgtagcaggaacattggagttggctccggcaagacccataaagactccaaagtatcgtgcctgcataggaagagattctgttaggccagaaatacattgggctctgccatgaaaagataggagaacgtcaagtttgagactaacgtgattgttcttgaggtaggcgaccaagagcaagccaactaggcagcacgtcgcctggaagatgatcactcttgatcggttatgggtccgatccgaaagccaggcgagagccatggcataaggcgcgcatacaatgtaaggaggggccgtcaggagctgagagagcaagagcagtagggtcaggtggtgtcagaaaatcagtagagatgttgacccggaatatggcgggaggaacgtcagaaggttcgctgtctggtcagaactacgtacttgactctccttcacggtgtaacccattccagtgaggatcacaggcagaaagtacgcaaaggcatacgacggcctgcgatcaaatttaacaagacagaaaataaagacaaagataacaaacaggattagtactcggctaggaaagacatgttgacgactactggaagttacgatggacgacatacatggtgctggccatgaacatgagagcgaatccccagagtttgagatcagagatgtgggagcggaagagaggccaagtgagaggttcatagacggtatctcctcgctccttctcgattctggtgagaatcatagtggtctgctcggcagtgaggaacttgttcttgtcggggaagtcgacaatgactggaaacgagagggtatagtacatgttcgattcgaggtaaatctctatgttcaggacgacgatcaccaagcatgatttgaataagacgtacggaagtaagcggccattccaaaggcgcatgtgatgacaccctcgatgatgaagatccaccgccaaccctagaggtatagtcacagatgaaccatacttgtgagtgagtggattcgtcgtattgcgatcgaacaactgaagcgcttactctgataccggcagtacctcccatctgaaccaagccgtaggcgagaataccagagaaaccagaaattactaaggagatcaggtaaaatccctgcaagcaacaaagcaataaacggtcaaccaaaggcacaaattcgcatacacccagacgctgagagccactcaccgacattcgttttccagtctcgtatctcgtgtaccaagttgcctagatagggggcgatcggtcaagcctcgttcgtttctacagacacaagctatggagatactcacgatcacgaaagcacaggcctgaaggcgggcaaaacgcaaatttgaatcagccgctgcaatagggaaacaggttcttgagatacgcatagacacacaggaaagaatccggcctgagagggtcgaaacagaaagcaagaagccgtgagttaggatcctaatctgaggtatataaacaggcaaaaagacggcactgattatatctgggaagaactgacctcgagcgctcccaataaggctctgcacgctgtaagggcgccccaactatgaacgaagcccatgccgatagtaacggcaccccaggagacagaaatgaagctgtacgcggtgcgtttgtatccgaaacggatggtcaacatcaggccggtcaccgcccagattgggtttgaactgaaaagagagaatgcacgtacgtgagccatctggctgtgccgaactttcgcaatagaatatttgatggaagctccaaaatgactgcagaggaaggatgtgtttatgatatcgatcagcgctgattcctctggactgggcgaccgaagagaatgactagatgagcgcagaacaaattggaacgctcactgtagggtacgaagaacatgagggatactatcgaataccgattcccaacagttaactccaattcgacgtccataccagcaactcgggcgagggatatgttggttctatcaatcagtgcgatcgaatacaaggctcccaagattggcaacagacgaagatcgatcttgcgactggtaaacagatcagtcaagaaaggcggggaagtaagctatcagatcagcgggatctcctttgtctttcctgtatgagttgaaacgacagacaaatgaggaaggattacgatcgacgaacattgtttttctcaaaaaatctgggtccggagaaggggattctcctcgctccacaaactcctggtgttcgatctggttcttttcaaacgacccgttacttcggacgtttgacagatcgtccagcccagtctttgcaggatctcccattgtctagatggttgctgtgtattgttgagggcaagagggaatgaggcagagatcagaggaagaagggcagataagagctttctgcctcaagatgagatttcggttcaagagtcggatcgatagagagttgatgagatgagatgagatgagatgagatgaggtgataagaagaaagaagaagagagataaagagtatcgaaaacggaggcgatatttatctcaagacgaagacaagaagaaagacaggcaaccagggtctaagccaacgtccggttggacaccatctgggctgaccatgatttgatctcatgtggttgatgaagtctgaatccgagtataccggtggccgagagagatggtgataaccgaaggaaatcaacagacgaaaacaccaccggtaatagtcaacattgatagcgaaccggggtcagctgaaaggttcaggaatggggaagggatcagagaacagcaggatgattgttagtatggatggataaaggtccaagaagtgtgtcaggaagaaatatccgtgcatcagcatctcagcacactaacaaacggatagaaagaacccgagattgaatcagacagccggttgatcggttagaaccttgcagcgagactcaaaggaaaacaggtagaggcggtgaagagaggcaggacagagaacgaggcagagagaacctctggatctgttcttctctaaacatcgtgcgtgaccccgttcagagaaagtccttcggtttctgttggcagaggttagaatctccattcaatcaatgcctgggctcgctgctatatttgtccggtaacattagacgttgctcaacaacacgttgtgctctcttgcttttgctcttggtcttggtcttggtcttggtcttggtctaactcttcattccgtggataaggttgggttaggctctggcgtctctcggtgactaaagaaaatcgaaatgagccggaagtcgacccaatgtccgtgggccaagtgagatgaattcaaaaggtcagcagattctgaaaccccaacagaaccattagccggtcagtaaaactctgggcatccgtttgccgcctctttaaatctacaaaagaaggctttgaactttttgggctgtcagttcatcaggctatcctatgtccttcatatcggacgacgtggtttcattcttgttttcgtactcttcatcagagtcagtatcgagaacatagttagtcggttagcattcttgacgtccgtccatggtcaaagtgtgtgtgtatgtgtgtgtgcagagtagacgcgtatgggaagagaaaactctccgattgttccatccgtcacgcaccatggccacgtgcagaacagaggtcgtcagatgatgaaccggtaaaaagaaaaccccccaagacatttggacacagatgatcggtccagctagagctaccgccgtcactgccatctaagcgaactatattcgatacattccagagaacatgatggatataatgcattggatgaacagtgttgttgccgagtctactgggtatcccttcggtcgtagacgggcagacgatctctcgctttgcactatctttatcgaatggaatcagattgagaacgacactgaagacaagggagcagtgttctgcatctgcttttgagattttataccttctttgaccctctgtctgtctgtctgtctgtctgctcctctgcctgcctccgtccatccctgctaccctgattccatccgagataggttatcccccaaagcgtcctagagatggcaacaccataggcgcgtcggcagacgaggcccaccggttacgcgattgttacacgccatggttacgattgaaaaaaacggccgtactcggtagacgagaaggattcagaactttgctcgtcccaacactcactcacacatacccaacagttcaaccctcgccctcgttcatcatggcctccagagttgctcttcgatcggcacttgcctccaacagactcgctctcgctccccggtcggctcctgttcagcgacgaaccttcctcaagggattcttcggttctgcttctgtccccgtcaagcctaccgacccttctgtccccgccgagggtttcctccaaggtcctggagccaagcttggatccgtcagtatctctttctttctggtctggcttgtcgtcgttggatcggttccttctttgtttgccgagtgaagatgcgatgtacaaccgtccgatcacagaaacttactttatctctcacttttttctctcttgatctttttttccctttcttttttcttcctacctctggcacctgcttctctctctcgcttccatgatcgcatctcttccggcttcgtaatacacacaggtcccaactgatctcgaccaggccactggtactgagcgatacgagcttctcggaaacatggctggtatcgatgtcttcgacatgaagcccgttctcgtcgaccgaatgggaacgatggccgaccccatcccggttcacgccatcgtcagtattcactcttccttttcgctccttctggtccttctctcttgtgttgtctatcatcatcatagaatacattcggatggcattctacggaaatccagctgagagaacaaggggatgagattcggcgacggtgatagtagaagctatgagctttggtttgaatgggattcgcagtcttgagaaacgacctatggtcattggacgcctacaaagtcgctagaaaaaaaaagctctggacttagactcactcatctgtaggcatcccgctgacgactttccatctgtcctctgccattcttcccttccttgtttatctccccctcctttcagattgacgagcgactcgtcggatgcaccggttaccccgtggattcccacgatctcctctggtacaggtaagtagtttccaactgatcacttttcgacaagtccttgttatcttttcttattctaatgctacgggtgtggatttcgttcttctccgcgaaacagcctcaagggtgaggagattgcccgatgtgcggagtgtggatgctgctgttcgtctctttcctctttttgcacttcttttttctcttcctcctcgccattattatttactatac

SEQ ID NO: 1821 - DNA, 11837 bp, Xanthophyllomyces dendrorhous
ccattattatttactatacattgtcatgtcaccgagaactcaccgagttcccttttactcctattcacaccaaactgacccatccgaaacatcataaacagaccagctcaagtaccacaacccgtggtccgaggtcattcccgagattgccgagcagcagaagaacgccaagctccttccccaccccagccacgcccaccaccacggagagggagagcacaagcactagatgtccagtgtcatcctctggaacgaccagtgtcagtgtcagagtcgtcgttggagcctgtcaagctgaggagagacagaggaaggaaggttgtcatgtatggtttttgtagaaggtcttattttcccgatggatgcgtttcttttcttaagtcttccctttctcctccttttcaatcttttctttccttcccccaaattgaaccgggcagcctttgttcgaggtgtctgaaggtgggctatgaagatccggcttgaacagaagaaaacacatatataggctctatcgatagtgttcgtagattgccgaaaggggggggatcatttctgggaggaaatatagactagaatgcacaacaataggagactcggttgagaggagaggagaggagagaagagtatgaatcaactatctgatagaagctggctcccgagccatcacttcgtccatccatctcgtcattccatcagcatcccaggcctgcattacgttcaacgcctacgaaatgaaacgaacccacagagaccgtgcattataaattgtttgtatcagtcatcagcacaccgaaagtgagagagtgcagctcgagataggatggagaagcaaaacacaacaaaacaaaagagggaaatgaacgaacttcgccgagctcatcaagttgggctttgtatgcttcctcttcgccttttctttgatcttctgtctttcgaagatcatcgtatagtaccgatatgtccgagtcgagctttgttgttcggttgcatgtacaccgcgtttgtagaaaaggattgagatagaatgaaccgtcagtttctgatcctcatccttgctgtctttctcctgttgcgtcttctttttctcctctgggatctcttagagcacatccgtcatgtgaatcaatcataagacttacatcgaccagttcggcttgcagtctagcgtactctgcgtcgtaaagtggtaagttatgcgtcgccgtgagagctgccggtgtgagatcagtcgtaattctaaatacgtttgcgccaccatcccaatggaaccaaagaaagatcgtttgagaaatttaaagtcagtacagtgatgatgaaggcgaaagatggagagaagaggacgaggagtgagaagtcgactgacatccattcgtccccatgcagctggtcgttcgaaccggccaacagttttcgctgacttgctcgctgaacggcctcttggacaagacgcaaccctgctcctatttttgcttcctctagtttgatctgagcgtttttctggttgaatgatcacgatcacgatcaagcagagagacgagtaggtcgagaagtcaacaatcttcagaacctcgacgcgtcttggtcgcttcagaaaacagaacgaacaaatcggactgactagtacggcctctcgaaggatctctcctgattggagccaaacacctttactttcctcttcccaaagagcacaccttagagggaaacaagatttgaagtcttcatacctacacatccgtccggaatgaatgtcgagcatcgaaagatacacatacatcagaaaaaagcaggacgcgtcagtgactgtcttgattgaagacgaacctggatagagacaatcaacgtgacaccgctaaacaagacagaactgagaagaaagagattcgaggagacgtacgtccacttatttgttcctgttcggacagccatctcgagtgcgttcaacagactctgatatcgacggccataatcttccttgggttctggtatgggttccggggcatgggcggtcgtaggataactatcagaagctgagccagaggtgaatgcaggagctgatgaggtgttggagtctgccatagctcatagaatatgtacgacgattgatctagtcctcaaaacgcaaaagaagaatgtcgttcgtgattgataagagagaacaggccgactccaaagtggaatatatctgctgatgattgttgactgttgaagcgcgtctgtaggacatcgctcgagtatcgctcacatccatgttttctgataggtttctcttgctcgttcactccctacagcaattgaactgacttgtgacttcaacagaacttgttcgactgcataggctctctccatctgattaagaatattgcgatatgggacggtcatgattaacacagacgttgcttgtactcgaatttcaatttgacctatttccttcctgaatcctcttatactctaatctgacctatttcttcgaaaagaaaccagctagactggtctgaccttttaacggaggttttcctttggtacccaccgtcgccattgccatagccctcttcgccggagccggcttggtctcagcgacagcaggtgctgaagatttcgacttcttggctggaggaggcttggtctttgacccttcctcatccgaaccctcgtcatcctcgatgtcggctcgggaaaccttcgccgaggctctcccttttgagtttgcagacgcaatagctttagactttgcctgtgatttgggtctagaatcggtggattcatctgagtctgtaaagtgagaaacaagaggatgagagactctgtcgattgacaagaacacagagtgatactcgagataataagacgatgacttacagtacgattcatcggtcgagacatcctccgtgactgataaagttttggtggaaggacaaaatgtcagaaggacgacaaaataaaccaagaagagcctgacttgagaatcaagaaactagcgcaaatgcaaaagaacttgatccagacggaccttcataacctctcttattagtgctcgtcaccgtcttgattattctccgaactttccggatcttcttcttctcagcaccctccgactccagcaacatgctttgttccacttcagcactgggtgtcgctgctctcttgttagccgatgttttcggttttgctggtgccttagctgcagcgcgtttgacgaccgacttggagtcttcttccatatcggattcttcctccagagagatgtctctctttttaccttgagtgacaacagaatcaaaaccgaacgttagcgtcgagccaaaaatatgatcttcggccaagagccttgaagaaaacgcaaacctttctggcctcgtcccgaaggggattccttggattcatctatgtccatatcccaaagtccttctagttctttcttctgtgcagccaccttactctggtcgactcgcttgactgaggatggttttgcaaccggtggcgatggtggtgatgaagaaggtgctttggctcctgattttgatttttgtataggcgcttcgctttcgtcatcggacgagaagattgggatcatgggcttcttgataggtttggacggaggcggcacagtcttgacaggttccgtaatcttaggctctgccttactaaaccctaaagttccgcttccacctgacgtgggctttggaccaggcttcaaagtcgactttgctgttgaggcagcaggagctagaacatcgctctttctaggcgcggccgccgtcaaagctgattttgacttgagagcgccgttagtggatgacgaaaatgcaaccgttccgtacagagaagggttattgtaggctttgtgggacaggagagtcataaaaggaagaaccaaagaggaagggtcctgtacgtgtgatagagatggtcaatgcgagtcctgacaactccagttatgaccaaccttggaagataaatcttactcttgtctcagatggggataatgaatacagcttaattgaagccgttgagggatcaaataatcttgtctttgctggttatgacatttcacggaaagatccatagcaatcagccggtttacagcgaagcgcaacgttgatgtgaaccgaacgtaccttccacctcatctggtttgcaaacgaccatccccgcccttgaaacttgagcctcattgatctgttctacagtagcctgactttgacttccgtcgacatccatggccttcgactcgtcgggttttgataaataagttccagacaacaggtacgtcggatgaagtgactgatgagattcgtagtactctgccagaatactaaatgtatcaatacagacaaagttagttagaactagataattcacaccatgattcagctgtttctataaggaatctcacgattcggcctgagcggtggatactccaagttctctcgaaagagatcggtaggtcatctaacaaagtcgaacgcccaacaagagccagccaaagagatcagtgagcgacaaacagtttcttccctgatcacagaccaaatgccgacgaacgtacgatcttcttatcctgacctatccatacgtccagacatctctttgctttattatccatccttgtagactgcttacaatcgatctggtcgaggtttacggagagaagcgcgtgttgattgatggagtagccgtttaatgagggaggtcgcgtttgcttaagtaagcatttacatcattcctcttcttttaccactacttgctcgtccatccatgtagtcgtccatcacccacaacgatggcggtcattatcccacctcctccacctctgcatagcatcctggtctctctgcagcctccagagttccttcctccgcctcatcaagatcatactaccatttccagatcggagctcgacaaatggagggagtcgatgacgcgtgccatccatcagactaaagagcttcttgagctgggttcttccgaggggaaagagctcgaggaggtagagaagatcagtctggctgaaggactcgccagatgggagactaggaatctgtttggagaacaagagctggaaggttggatactacctgctgaggttacagaacaaattaacggttcatctagttcgactacctgatgataaaccgtccacagggctgaatgtgttctctttttgttttagaactgctatcaacaaagctaccacctccttcgctcgaatccttgaagcccatattctcatccagcgcgcctgcacagatatccatgtcatcgttccgaccgctttcgaaacctatcattagtgacgaggtggccccggaaagagagaaatggaagcagagggcaggatggggttgctggaacattctgcgaagagctattgagggtcttgatgtaagtaaatcttactttggtctccccttcattgcgacttctttagtataccactgatgagtctttcttctctttcttcggggtgcgacaactacacagcctgcgcaaccccctccgtttcctctccttcttccgccgctattgaccttgatggatgacccagatccgatattccgacttcgtgcacagtgggcattctattcccttctggagaaaaccaagaaagcctcgttgtctggttcgtctgatataaaacgaggctggggcggaaaatggctggttcaaactggaattggagcattgtttttcaaagtttgtgcatcattgatcctactatcatgtatcctaattacctgacactggctttcttttctgcattatttagtccctcaacacgtccttgcatcttccttcaccctcttctttgccgcaaacactgacgaaccatctggcgctgacggagctcttgtatcctatgaattcacaagccaagacggatgcactggatgagttgatagaacgaggtctggtcggaacttggatctaccgaactggcggtgaagaaggtgaaggagcacgggagattgcaacctggttgagaggaggcgaactcgtacgcgttctcggtgatctaggaactgtcagagtcttaggagtgggtactttcttctaatctccgtagcatcaccggacaatggatgaggagactttcttcgatagactgatgtgtttccatctaacttcgctgcacattgggtctcaagataatcctaccgtctcttctcttaccgctaggaactctctcaccaacatcccctcgctcgacggtgttcctatcagacctcctgcaagctatctcagtcttcttagttgcaaccttgaaagtcgctcccaaaagagttgcggcatggagaggaaaggttttcaacgggttaggaagactttgggtggcagtggtggagaatgaaaagattgggggcgagtgtatgtctcggacttttcttttgatgcattgtaaaagcctcatcctgcttttgtttggagcaggttgttctgatacgtgtttttcgttccatttgttgtcttaccttagtaacatcaaccgctctctcactcaaacaacaaatatctcagatcctcggcttgttggctcagtcctacccggcatttttggttcgtctttatctctaatacttctcgcccggtggctttctatatttggtactgaataaagcatcgacgacgttactggtactctttcttggtcgctcttaggacgaagtgaaagctgtcgcttctctagacccgtccatatttgagggttttgtggaatctattcctgacactcgcctggatgttgaaaacaaacgaaacccaccaaaatgtgtctaaaaaaaatcaaaaaaggaacgatcgcatctaatgactatagtataaagtgctaagcaacggccggttaacgctgaggtagagattctcttaatttccttctctcatcccaccctttctcaagggattcctcaacgaccttgtcgatcgcgacattccatgttgctcgggtctgaagactagggaaccggtcgtaggaaggctctcgaccgaacgcaatcacagcggtttctatctataaagtttgatgccattcgatataaaatttgataggcacggagttcacgtcgccttatgagatcatatgatatatatttgaaagaagaaaacagaggaaagcaaggacataccaggatatctgacgagagccctttgataggcgtctctgtcgttctgaatctatgcattcgatagatcgtgtcattctagagaaatagtataacgagataatcagttaagctccaacagcgcaggaaagggaagacaacattgaaggagtttgaagatatgaacttacaagccaaggaatatcactcgtcgagtaaacatcttcttcatataaccaatcctcctctccttttacactcaactttgatctggcctcttccgtctgattcccccagaatgccaaatcaagcacgctctccagcggaagctcccatatccgatcgacctcatccgggcttgcttccagatggtcgatcgttgattcatcagaaacgaacacgacgtgtggatgaacgatgaggttgtatttggataggaagggttcaagagtcgtcaaagggaatatagtagagtgagttggatctagtggaaagtttgtttcttcgtatgcttctcgacgctttcaaagcggaacagacattgaaacgatggaagagaggtgggagaggatcaggaaattgaatttctgattgacatctaggtatcgtgatccattgaagaaggcataccgctgtatgttctacacttgtatcttcagaatcaaccttccctccaggtaaagcagactgacccgggtgagagctatgtcaacccatcccgttgaaccccgccccaagcaatgtcaacattcagacttattcctcagatatcagagacagactgatttgaagaaccgaccgaagttgctgagaccgagttgtcatcaaaactcttagcccaggttgtgatttcctctcgtatagaatgactagaactgctgctcgtttgacctttccaaacctttcgaaagcatacaacaagttgtttgtgcccagagttcccgcaagcatgggagaccgaaggtaccgtcgtgatggacatgattcgaaggaggacaaggagcaataagtaaaacatgatcttctctcttctctctttatttcttcttctcttcctctgccttgcctattcagatggatgatggacttacgaccgtcccggaacccaagacggatatttttccacattcaagatacattctctggctttctcggatagagcggcaagggcttccgatggtactccttcgtgctttttacgttgtgtaggttcagattcgggaacggtcattgtatcgttcaatgtcgtcgtcgtcttcttcttcgttatgtcggtcggtcggtcggcttggcttggctatacttaatcttgctgcgttgggggttcaggcaaaaggggacttaaaatggggtaggattgccggcggagtagaccgaaacgaatatctacattcttgacacagggcggcttgagatactgtatcgatcactgatacttcgtctgacgaagtactttttcacgacaaacacgccaagatatgatgttaaacaaacatggtataatagtttataactttttatttatgtgagaaaagcaaagaagaaacaagaaggaccgaaatagagaagaggaggaaagaattctacaaaagtaccatgctctccgaacatgaactcagtgaaaacttttccgaggaaaagacatctaaagagaaacccaatcaagggcacggaacacgaagatctaggaagagaaaaagaatgggttgggaatctagatggtttaccatcgggatcctccacctcctcctcctcctccgtagcctcggtctcctcctccgtctgcacagataacaggtgaaatgtatgtcagatggagaacgacactcaatcagacatctgaaaaaggaagaaaaaaactcacatcctccccctcctcctcctcctccacctcggtatcctcctccacctcggaaaccgcctcgtcctcgtcctccgcctcgtcctcctccaccaccgtaagaagccatctcctcaagctcccggggaacttcagagccggactcacgaagaataccgacaagctctctagagtttttggagttctcagtagtgaagtaagtgtaactcgtaccagtagtaccggcctgtagaagaggaagagaacatcatattgaatcagcatatattcgaaaagatgtgatgatgaatataatcaactcactcgaccagttctgtttatcgaaagtacaaccaaaagagaagacttggtttagtgggagcaatagaaacacaaataaacgaagcatctacgaaccgtccaattctgaaagggagaagaaaaattcgacataggttagtcacatgcactgaacgatcaaagtgtttaaaggaaaactgtgcgaacctgtgaatgtaatcctcgcagttgttggggaaatcgtagttgatgacatacttaatgtccttgacactgttaaaaaaagaagattagataatttttcatcagtacgggtttcatcacaagggtagaacgataaacaatatgtactaactctgtagatttaaaatcgtgagtttaaggatagtcgaaagaataatgagaatattcaagagcgaaggcaagaacggcagtcaaggcacacaaaaatgattgtccagttaaagaaacaacatggtgatcatgaggaagaacgggcaaggtcaataaaccgtccgaagacagagaaggcgagggtgagaagggtatttccagcagcgttgaaaaggacaccaagccagcgagaaaacagggccaatatgtttgaccctaatccaatgtggatttcggagacggccaagcatcaacaaaggcgaaccaactttcaggctctccgtttcgtcagtcgacagcacagcaacgttccagacaagagttttggagatactctccagtctagcgaccgcctctcaatctcgacctttgatcggctgagcatctcgaggagatagccaagtgatcaaaagcagaagaggcaatgaagcacagaaaggaagaggacacctcttgagtcagtcggaaagaagccaagccagaatcgactcggaaagagttataaactccatacgagagatctaggcgagtcacccaacgaaggaccgagaaggtcataaactctgttagtgactagaaagccactttgtcggaacgcatcgtgtgaagcgaacaaggaagaagagggaagagggccctcttcctcggatgaatctaaaaagacttcggagaagaagtccttcagaaattcagacgaacggattgtgacgagcgaaaggaagcagacacggtgtttctgtaggggctagccaaaaggcgttttgtcgttttctcgcagcgggccagctagatagaaacccagaaagaaagtggaatgtggtaaaaaaagatgataagacacataccaagaccacgggaagcgacctgatgaaagcaaagaacaataacgagatgagtacagtgagcatcggatgaatagtatcgagacaagagaacgtacatcggtagcaatcatgataggggatcggccagctcggaactctccaagaacccaatctcgctcctgctgctgtttgtctccatggatagcaagcgcgggccatccatcttgcctgaggtacttggtcaagtcgtcggcaactcgcttggtagcggtgaaaatgatgaccttggcgttctcctgggagatggtgtcaaggtgcttgacaagctttcctcgcttctcgaaatcagtgcagacctcgacaagctgcttgacgttgtggttggcggagagctccatggatccaatgttaacctgaatggcatcggtcaagaagtcggcagcaagtcgctggacctccttgggccaggtagcggagaaaagaagggtctgtctatcgggtcggatttgggcaacgatctttcggatttgaggctcgaaacccatatccaacattcgatcggcctcgtccatgaccaagtaggtcactcgcttcaaagtggtcttgccagactcaagcatatcgatcaatcgaccaggggtggcgacgacaatctcagctcctcgctggagatctcggatttgtcctcccttgggaacacctccgtagacggcggtgtttcggattcgggaagactttccaaacttggtgcactcggcctggatctggacggccaactctcgggtaggagcaaggatgagggcgatgggtccatctccaggggagagcaaaggctgggcgttgatgtggaccatggcgggaagggcaaaagagatggtctttccggaaccagtctcggcaacggcgaccatgtctcgaccggaaagggccataggccaagcctggcactgaatgggggtggggttggcgaagcccatagccttaatctcagtcataacataatccgggaaaccggcctcgtcgaagttggtgatgggcttggggatgttggcaccgacgaccttcatctggtgttgggctcggtaggcatcgatctcttggatggatcggtctcggacccttcggtcctcgatgtagaagttcttctcgaactgtgaggatcgaaaaggtgggtataacgcgtcaggataaataaccaggggaggcatcaggagttgggagaacataccttagcgagggtctgagagttccagtcgatcttgccaagtccgtttccaagactggacattcggtctcctgtgcagacaaaggatgaatctgttaagtttgctgttgataaaggcaagtgggattcaagagcggacacatacctcctccacc

SEQ ID NO: 1822 - DNA, 37862 bp, Xanthophyllomyces dendrorhous
gacacatacctcctccacctccgtaccctcctcctccaccgcctccgtatcctccaccgtatcctccacctccgccaccgccgtatccgcctcctccgccaccgtctgttgaagagaaaattttcaaggtgagtcagaaaaaaagagcgcgtagagctgcctaaagtcaatgatatcaagcgtacaaccgccaccatcttcaagaaacgagaaggaagggtgggaatttttcgagggacaggagaagagtagtgtcggatttcaacaagttttcgctttgggaagctagacgagggaaacaaggaatacttacagccaccaccatatccacctccaccaccgtctgattcacaagcgagtcgtcaaatggaacagaagcgggagagaatgtcgagggatagaagagagaaagacgcgagaaccaagtcgaagggcgagaaagagaaaggggaaaggaggcgagaaagaaagaaaggaccgtatgggcatccgctgatttgacaatcgcgttccgagcaggaaccacagagatgagaaagaaagaaaaagacgtacatccaccaccaccaccggaagagccaccgtatccaccgccgtaagacatgtttcttgcgagtaaaaagagagagaagggaagggagagggagaggagagttaagagaagggctgagaaaggctaaaccttgaaactgcagttgggttaaacggtaaaagttttctccaaaaaataaaaattatgttaaggcacagagagaagaaaattggccagggcccgttcggttcctgaatcacgtgatcaatatactacaaaccggcctacttttttgtagtgaagcattagagacactttgtaatgtcctgtgtctctatatttctctagtctgtactagacttatgttctaatgtctatactacagatatcggataacctcgactacagatagtttgtattagtcgactacaggatattcgtagtcaaattgtctcctctaacaaacccctctttctacatatacactcaacccacgctgaccggtcttaccctcttcatctggatctcatacaaatcgcttggcaccgtttagagagatggatggcactcctacggttggtagatactttgatcattttctagatgacgtatattctgatcgatttttctcgccgatagacaagttcgatagatgccttgttggctgttcttcgaaacgtctctgctcttccaccttcaactgagccagcaagagatctcacgtcgataccggctacaaccacggctcaaacagagacgtcctacgtcacactcactcctcagcagcttccggagactcctgtacaagagtactcgccctttgcgcctcttttcacccaacaaccccaggtttacactcctgatgtcagttggacggccggtgtgccgttgacggcgacggcaataaagtccgaggatccaaaggctgatttgaaacatttaagcttcaaggacagtttacccatattgaaccgattgatgtcggatcaggtctttgtcgaccgattactagctgtttgtctccgttcttcatctgatcgtcctttcttcgtcacaaacaaggcgaaagcacaaaagaattgaccatgattgactatagatgaaggccgaacaagatgcgctggagaagaccctgtcggaagagagaaccgcgctgatacaaggatggaaacaaaaggctcagatggcgcatacagtgtaagtacgcgctttcgtgtacttcttgttctatcgtctttgacctgttcaactaatcgagggcagctgatctgaatatttcaaagagcaacgatgaccggtcagaagggaatttccgagttcgaaacgaaggtttgcttctctgccctcatgattcacttacgtgtccattctttgtgattctaccgctatctgacaagcccttcattatttgagagaaacagtcgttggtcgacaagtttcaacgtgctcttgcccggttctatcacgatcgggtatccgtaagactacctcctttcttacctcttttctcgcctcatctgaaccaagctcatataccgaaactcggccaaatccttacactatacttaatattcttggtttctcgtctagatcacctgggaatcccatgtgaaatctcaacaagcagaactcgacagactaggcgtgcccaccatgtcctcagacggagatagaaatcgtcagaagaaagtcatgggtgctttggaaggaatgatagccgattgaagacgggcggagggacgtggggggagggtgtgaaccatgctgtagcagtcattcgggaattgtcccctttagccctttcacctatgttctgtctcacacacggagcgtcaccttgcgtttttgccttcgcaaaagtaaggataggttatttaaattaaaaagaaactagggttgttgaaatgcacctaacagctgggtgatgttaggtctgtgggtcggtcagttcaagctgaatttatttgcaacggaatagactagcttgatccaactcatcatagagactacaacagaagcgtcagcatgtggctcgcaaaatgatttcatgaactatacctcaaatgacgttgcttgattcaggacctgctcgaacgatgtatagatctttcgtttacgtctgagtgattggctaagagcccaggtaatacacattcatacagataatccgtaaaacacagatagacgaagaacgtccatggaatggtagcttgatcgatgatctgataacgactgagagacaagaaggcaaagagagactagacggcacatcaaccctatacaattcttctcaagtagagacaagtggcccattcaggcactggaatcccaaggtatcaacatccgccggtttcaggtaatcggggttgcaaagcacacttccagtctttcggttcgaagtcacaaagttgtgtacgttttcaaactttatcccgtcgctgtatgatggcaggtcaaatgtaatagaattcaatgtcagagacaggagactctatgcgagaggagcgtggaggagcgatgtacattgggaggaatctgtcaagctgaaggatgatgacttgggaaccatcagcaccttcaacatagttccagcacgggtccgtgacgcagctaatttttgatcgtagctcgtatgttagttgttcgacgtgatgagatagttgcgtggtacaaagaaggacgtacgtagcatcagatagcttgggggcattactatcgatatccccccagaagttcttgaaagtgaaatcaattatctttgtcgtttgattcagcgcgtcctttggttttccaaactttatatccagcgcgcaccataaacatgcatccagtcagtcaatgactcagtctataagagatcagatgaggtgttcacctgttggtcatagtaggacgtagtcacaaagataggctggatcacttgccgcgcctcgatattgacccaagagatgttggaagctacaacgatatattcgcagaaagtgaacgaaagagtacattgatactttcagaaaatcgaaacgcttgagatgctagataaggatgaggtggatgggacataccatgacctcctcctccaacccagcttttaaaccgagcggcgtaggtgctaatatatatatcgaatatcaattcaactaatcgtctgtcagaccaagaaaacaaagcaaagacaccaacctcttctcgattcggacatcgctgataagtacatcttctacggttgagtttgccccatccttgccaagggaaccgatggagagaccatgagttcctcgacagaaagcgctgaaaacatcacacaaccagaaagtgagaaagagatcacacggatttagcatatgagttgtgatggatgtattgaagacttatacgatcaactcactcccggaagactagatcttgagcacccgatacaattgccacacactgtacaagacccatcacaaagtcgatatgtgaggatgtcgagcgcgagaggaacacgttcggtgagtgaaaagctaaactcacatcgtcacctccgtaaatcacactgttctcgatcagagtatgttcggacttgacgttgactccatcagtgttgaaaggatacctttgtgagaaaaggtgatattagaacgatacgtcgagctggtataacaaaagcacgataatacatatagtatcgcttacccggtactctcgctaaccccccaaataaaggtgttgttgactgatatgttgaacagaattgaaggcttatcaactgctgatgcatatagaacagtacatgactcttacgaacggtcttcaatagaaacacagaagaatattgattagatttttgtgccctcatgaacagtctgattaccgagtaagatatagaacttacagatgtgctctccgagaagggcaatgttccaagcgatctgcatccaacatgtactcgcaaagataagtctttttcctttatatgtacggcagcgcaaaacgcacctcatcaggatgtatataaaggaaagaacacggacttgtttgtagatcttcaaatcaagaattgaccccctctttacgtcgaaagccatagtctgcggcctgttggcagagagatcattgttcgtatagttggtggtctcaatgtcccaccatttctgaccgaagcagttgagccaacctgacccggaatccttcgagccttggatcgtgacatcttgcccagtgaactgcatataagccttcccatacgtctgcaattaccgagatagaaacaatcagtgatatgcattgaacttctgacaagattagagacacttacagcgtaggcggtgatgttggcaacttgcttttgaatcatctctcggtcctcggctatgacaaatccagaggaatataagataacagcgatataccaagcatcattagtcccagaatcaagttgctataaaatgagattgtaggcgtacagaactggaggtttcctttaatgctgaaatgaacgttcgagaggtttttaagttggaaaggcgaataaatgttatacagtatgccctcttcgaacacgatctcgacatcttttgatccacactttgcgacggcctcaagtaaatttggggtgtcatcctgtccttctccactgtgctgtacaactggtatgattttggtgtttgtttttatttttttttcaaagatttggtatagtcaacgacagactgtcaagcggtgcgcgtaacagaaaaaaggggagtgaagagtttaacgaaccacaggatttcgttatgttcttgagagcaccgtactgagaatactgctttgtgagatgatcgcccttgacctcgacagcatcatctaagacagaaggaccccagctgtctcgaagttgaagagaatcaagtgggatcgcagagaccgctgtggcagtgatggccaccagaagagggaagagggagagcatggctgacacaaaaaagagtgtaagtacgacgaagttgttagcgaacggtcagatcatttcttgttagttatcttgtcctttttatctatctccgaaagtagatggccttggtcgtaagccgagcacggagccattgtttgaatctgggatcagttttgggggaaacagatggtaagatgtatgagcggaacgtccggagtccgcccggaacttgtccggaacgaaagaaatgagccgggtggccatacttaagctaaacaatgggtttgagggttgtcagttgactatgaatcatcagagattcaatgtttcgaacagctaatataaaaggcttggcgtccgttggtttcgaagcatggatggattgctcccggtgactttgctaattgaatggaatctcgaggttcgttgttttctccgttagtctcttttcaccaagactttctccaatggcaggagaccagtgtgaccatctagaaggcaatcctgctgaagcactttgcgcatgcccccaagtagctatcatctgcctgccaatttactcactgaatagactatcaaccaaaatgaagagtcaaacagaaagagaagagacgggttgattctacggcccgggggtctctcctttccaacttgatttgcaaacgagggcacagaacaactcttccgttgcaaccggtccggcggatgacttttcactccggcatatccatccaatgaggaccaggattgatccacatatcttcaacaaagtcaaacacaagaagaagtgctgacggacatatctcgtcccgtagtcagctggttcagaatcggtttacatcgtttctcaggaaggtcaaggagtgtgtcgtcgtgatttgacggtgatcgagtaactctatctgttgtctttcttcagtcttgatatcgaaaccttcccatatcgtgttgtacattcaatcaagggagacagactatctcaaccccatcgagatcgcttgtcgtctctcctgtctttttctctatccctcaacctgtccctctctcgctttggttctctgattccgccacctagactgtccattccgacgaaagcatacggtttccctccgctctcgacgatccctcgagcgggtggattttttgatatgtttgatattgggtatggacgagaagaagaggatgttgagggagcggaagaggatgatgtggaggaggtgaaggggatattcgttcgaggctgggatggtcgttgagagtaggccttttgcaaatccgctaaaggaaagaaagacattatgtgttgagaaagaaatttaagatgtcggccgatcatctcatcatcgtgagacttcctccgcaaaaggaaagagaaaaagagaatgtaaagagacaaaccaattttttctgcgctccactccttactctcaccttgatcccagtcccatatgctctttcgaaaccctctgcgttcatccacgtcgacaaactcgacaagctttttgtagatcgtcggattacggaacgctctagacttcatgagtgaatcgttgaagtgggttccctgtgctttgaggtttaaaaactgggttaccttagcctgtgatgaggcaaaaacgcatccaaacgagacgcgtcagttttttcttcctcttctcgactccaatatgattactggcaacatggtaaggaaaagataataagaacgggttaaagacaaacctgtagaataggatcaatcttctctgctgagctcgcattccctcctgcgagcccgtatgcctcgtcccatccatccccatttttcagtggtgccggtcggacaagtcgtctaagggtctcttcctccgtttcaaactcttcgccctcgcctggtccgatgtgaccaagatgaaccggatcgggagactctggatgagtctgatcggaagtacgcgagtctttccgcaaaggtgagcaaggttgtgcttcgttaggtgtgtttgacgaggaagatgtaggctgggatgatggaattcgccggattatgttaggaggaagatgcgatttcagttttgatggtaaaggtatggctggtgatgacactgttgctgatggtggtggtggtagcaaggacgtggcatcttattgatattgtttttgggtgatggcacaaaagacagagaaaaacgacgcgtcgttagcaagtgttcacctaactgatgaacacagagaaagatcagaaatcacctgttggaggttttaagcgaactttagatccattctaccaaaatgatttggcccctcgaatagaacagcagaaacgaagaaagaaaaaaaggtagggaagggaagggagtgaaactttgactaatgttcttttctttctggcaggtcttcgtccacttttcctctgaatcgtcatgatcgtattttcgaggtcgaattcgtgagggagacgtcatgaactgggatgagaacttacggctatggcgctcgaaggatgaattgtctcatcctcctcgtctgaataagaaagaagacctgtgttgtgcattagaaaaacccgaggatcatcaacctcactgctcacacattggaccaagatatcttcgctaaccttgcatagtgatgttgttactgctgctgtatagacgaaacacctggtaaagattgaccggagagttgagtggtgcggagagaatactgttagggttaaacacgtgacgcactgctatatcgtcagccccacaatagtcttggctttgaatgtttacctcagtaggatgtaaaagcgcgttgaggaattccgtccacatgagatgattctttccgattgttgtcgtgaagaatacatgttcacttgaaggaggagaagagcaagctgatgtaggacatgggagtcgagctagctgatcgttcatcaagtcaagaagagagagtgtatgcatgtgtgtgtttgagtgtgggaaagcatgaggaagcgattccgttcaatctttgtttacggcctgattcgtgcacacactctcagacccatacacataatgaacaaagtgatcaaaccatcatgctcctgagccgatgggtatattcaagcatatggaacagaactcatcattgctgtgtgtgactgactaactgattgactgaccgaccggccggctgaccgcgcaacagaaccaaaggagctgacggtatttttctcaatttatttttattcttgatatcccccctttttgctttttaccggtcgatctttctttttctttccacccgtataagtttctgttccacgtccactctcgttcaacttcatctagctctgtcctggttcattctgggttgtagaaacatcttgtttgttcgtttcgatcctcaagcgaacgaagaagcacaatcttctgtctcattgcacttggcaagcgatcatcgaatcagccttctcgcaacagccttgctttaaacatcacaacgtacggattcaaccctaccgtcctcctccactcccatcttctctaaaaagagaaagaacagctcagggcacttggccaccgacatggttctttccaaaaagaccctgctagcatctctagctggcttggttctctcttcgtttgttcaggcagctccttataatgagacctgggctgactataacttcaacaccaataccagttagtcactaccgttcattctgtcttgctatccatcaggcacgcccgattctttccacaggtcccttctcttgttcagtttttttgccccttgtcattctctcgtttgtaccctatgctcgtccacgaactgctttgcaaggacgggcgaaagtagaggttcagcctatggttgcacagctttcttccaaggatacctttggaattagccaagattccttcgacgatccatcaaaacaccaagaaaattaaagagaagaaaacaagaagaaggaagaactctgggcgctcatacggcatcactcttactgctaccccgtctatcatatacaatcgcttacactatgtaacaacatctgttttcgcatacgaccgactaacacgcgcctttggattgtcttcgcagattctagtgctacaatcctggaatacaccactaaaaggtttggcgccaatagttcctaccacccatctcccaccaactggagagagcacccggtgtacaccatcatgctggacaaacactttgacggagagccgtccaacaacggtatgtcgtccagacagggtagttggtttctatacgcgggcttgtccgacttacctctcgcgcgcgtcccacaatcttagatcacttcaaaacacagtttgagtgggcacctcaagagtatgtacatcacgtatgatcatctgcttataagatacataagactgatgagatctgcctgttcgacagaacacaactccgtcatggaggagatataatgggtctagtcaatgaccgatctctagattatctccaagcactcggaattgaggtcatatatgttgcggggacacctttcttgtatgtcgctcttttgccctcaaattgaagctttatcaacaaatatctgccgcgttctgacccgactgtttatcatcgcagaaacatgccctggcaggccgatggtcggttgctctttctcctctgttctctgatatttatatgaattgcagtgatgattgatcagcccctacgcttctttctttcattaaccaggctactccgcccttgattttacacttatcgaccctcactggggaactgtccaggactgggccaatgcgatcaacaagattcactctagaggaatgtacttcatcgtggattttacgattggaaccatgggaaatctgatgtttgtccacattcccttcttagaagagtgacctgacatggaaactgacatcaactctcctcttttgaacgctcgtcgatgaaatagcgccccgacagagtaagcgcatgtagttccttttatcaggttttccgaaggttctgacgtccgaccactttttcttgaacgtagccacctcaatgattctgcgcctttcaatgtggatgaatgtacgttctgtggcagtgtttgttatgatgatctataaccagactaagatgttcttcttccatgtcaaatcacagatgacgtccagtggaaccgagctccttatggtccttggaacctgaccgaatatccagatttcaaatttaacaattccatgaactacacttgctcttttcctgcattctataatgaatccggttatcagaacacgtccataagtacaacatcttgtaaggcatctgttttcgatcaatacggagatatggaagcatttggtgttcagtacgtgtctcctctcttctttcgattcttctgttgatgtgaccgatgctgactgatattgtatcaatactcctatttctcatccatatgatatcatctaaactcgactttcagtctcgactggcaacgtcagctgggaaaattcgcaggcgttcaagaccgtcttcgagaatggaacgatgatgtccgagcaaccttggaacatcttgcttgcatgtttatcgaggcgtttgacgtcgatgggatccgaatcgataaagcaacccagatcaccgtgtcggcctcagctaattgggccacggcaacgagagaatgtgccacaaaatttggaaagaagaatttcttcatcaacggagaggttactggaggagacaccgttggttcactgtacgtcaatccttcttcgtacatccggcgtctgttcttgatgttgaggttcaatgttccttctattctgcatttcgaattatatagatactagtgagtccatgtagacaaggaatcttcatgacgatcgacgtttctccactaactattctttctcttctcaaacgtttttcaattcagcggaagaggtagacaggcacaagatcctgcaaatagccgaacctttgacgaagcaatagaagcggcgacaaattcttcgatggtgtaccttcgggagagtgggcatggtggctgggacggtagtgcgttccactattcatactaccgagcaatcactcgactggtgcaattagacggaaatctgtaagcgaacaatcctcatataaagtgacgagaggtttgggacaacttttaacctaaaaaataatcacgatttgtcatatcctaaatcaatagcgaagcagcatttgatatcggagtcgaccctgtcaccgcttggagagaaacagttatgaataatgatttggtcaattctcagacaggcgaatttgatcccagacattgggtgagtagctgatcgatcaacagcttcattctttcatggtaattcgaatacggtatggaacactcacgcccacgctactctgcagatggctatgacgaaccatgatatcttccggtggcctgcgatggtctgttcctttcttatttttctaaatatacaacattctagatagtactaacccatttactgactacctttcacaccgtaaacatcgcatatcaggtcaatgggtatgtacagagatgctcgctatcactttcaccttcattggttgacttactgaaaaagctgtcgttctacaaaacgcgctggtagaacccacaagatggcatttggacatcacctcggaatgcttctcatcccaggagtccccttggcaagtcttttgactttctgtctatcaactatcattgaaaaatcctataaccaatctaattgtctttctgcgtgtctataggtgtactatggtgaagagcaaagtctttacttgttggacaacagtgcagcaaattatatctttgggcgtcaggcgatgacagctacgaccgcttggcaaaggcacggatgttacaagtcagtctttttccacgggaactttttaggcaccatcaggctcattggttgaatcgtgttcatcttgtttaggcttggatctacgcaatatcacaacttccaatacggaaagtccttattcgggttggtagcgacatccttccttctcaagctgtcctcgtgacttgttcctgattctatctatttggccaacctttggtcttgttcgatttaccagatgtgacgatcccaacaactccctggaccattacgacccttccgccccttacttccgatatttccagcggatcttccagcttcgaaaggtttactcagttttaatggacggattccaggtcctctcgcactcgaaccaaacatatgaggttcagttcccaggaagtagcggaacggtcaccgatagtaggtatagactcctttgttatagaaatttgactactgctgatacagcctttcttttctcacctttttcttcagttggaattcgatcacaatctcgaagtgcattggcggttcaggcgaatgaggaaaagttccttcatggtttgacggactacgtttggtttgtgtggcacaatgagaacgtcaccatgagttataataacccctgtggtggctcagatgatgaatcttggatacaatctccttatattgctggcgttaccgtgcagaacttgctctacccatatcaaaagtgaggctgtctcgagagtgtctgtcgtcagatctcgtctttgtcacctgcttttgattattgactcttcaagactctcatctctaatcccagatacgttcttgagaactcaacggcctcgtatgacggttcctttcggggatggtacgtatactttgctgtatggacgcgttatttcagagctgatgccaatcttgatttgtggtttctaccacaaccacagtctgcgtaatgtcaccctggctccgtttggtttcatggtccttgttccagaagatgtctggtatccccctgcaccctctctgacaaagttttcgcccggacatgatgctcgacttttaacggtcgatggttcttccaatgagacttcatttggaatctcgtgagtaacctctctaataagatcttttgcctttccactttattagagctgatgttgagtcaatccaacatacagattcgagtttgaccaggagatgaactggtcagtcatcggtgcctcttgttaattctctttcgctcaaattgactgagatattcaagatacggctacatatctttcctttcctacagtgattcattgacccagagtctcaacatcaccttccatggcgccccagggtccaccgccaaacctaagataagcggtactcccgtctgtggatctctgaaaggccagagtccgcctgtagatctccaggtcgtccctccttcgggctggcggtggaacgctactgtggctgacgctgaggatggtatttatgagattagtttcaataacgtggctacttatccggcggccgtaaacttgaccgtacgtatcagtattgaccctctgcatcttcgtcccttgagttgtttttcttatcccaaaacaatcgttgaccttgaattgtgcccaatcagaccaatcaccgatttatcgttcggaagggaaaacttgacaatccgcttgtcttcatcgacgaggccgactacagcagtgatctcctgtccggttcagctggttcatggaccttgaaccacaaggccgctggtgcagagtacggtcttaacctcttcaatctctttttctcccttgtaggatcaaatcatagaactgatgagatcatgatctctatctgcacctgcttccaatagtctgttccgttactctggaacctatggaattgactggtctgattggtttgcctacgagaacaccacgtctctgaacgatagtgtgtttgatggcaagttttggtctggacaggtacgctgccaccactggctctgatctgtggccatttacttgcagcagcagcgctgactttctgctcaatatctacatctgaaactgttgtctcaatcagcacatcatggtacaatattactccaacatcagtggctcggccgctcctatagttcatgctgatgctgactacacagggggacaacggagggtgcctcgagttctagctcgaggaacctacaatcagtttggatacgatcaaggacttcaggcatctttcaaacaggtggatgatagcggaaactgggagatgcctgtaattacagcattctactttttaacatgcgacccaaagattgatatctgacaatgctgcgctgatctttttctgaggtagcttttgaccatattcccgacccttatgcaaatcaaccacttcggattcgacgactacttctatggagacgccgacggagatggtgtgcttgatcgactgccccctaattcgctaagtacgtgttcatcacctgacgatctagacatcgcatatctagagttagtgttctgaccatcgatccattactagcccccaactacctcaatttaactgcacctccaagaaacaaacttggttggaccattcaagttaacgatcagactggaaaatggacgttggaaccacgaggtcatgcttgggtgagcctgatcatctggatactggtctgcacaatccctcctttgacggcagtgattacagctgtctcgttccgtaagtcttgatttcgcagcagccagtacatactttgttctcacttcaacatgttttgggctgtgttgtcatccatttatcactatctgcaggcaagaggttctacgccatcaagatcaacaagtatggagtcgcagtcagcaaaatacaggatgacaacaacgagaaggctggccgcctggctcctggacaaaaaatcatcgtaagtaaacgatatttgttctcatacatccaatattatgtgtctcatctaactcttgtaatcttaataatggtagggctggccagaggatcccaacaagaagcgcaagatgatcattgtaagtcagaacttgaagtttgaccaatttccttttctttgactaacgcctttccccctcccatcttaccttaaatcatttcaggctactttggagtatgaaatcctggattggaagatcaagtaagtttctccagattgaactcaagcaattgtgtgacttatacagtgtattccccatcaacctcagagtcaaaattggtggactaggagtcatgtcaagtgagccaaatgttctcttcttttttttcttctacgaaacatatcgattaacctgagggtatatcctttactcctctctttttcagaacttatgggaactgccatggaggattgcgatctggtgagcacgactgaaattcgtgtttcaccactgtcatgttcccagctcacatttctatctgttcttctcaataggtttggctgattcctaaggttggggatgttgagtatcctcctggtgaacctactgagccgattgaagtcatcatttttggagagccgtatctcatcgagtgcgagattcatgtggtaggtcatttcactcaatttccgcgtgtcaagaccattctaactgaattgttttttgtgctcgaatatcaaatagtacaagaatatcacgtactacatcctggacagtccagtcttccgagctcagacaaaatcagatccctacccggctcgaatggacgatttgtcatctgccgtattttactcgacttggaatcaagcaatcgcagagactatccgacgaaatcctgtgatcgatatctacgtaagtaaattctgtgagcaggttgatcacagactcaaaagaactcatgtgtatgccttttgcgacgatgatagcacatcaacgattaccacggtaccttagctccgttatatctcctccccaaggtgttccctgtctgtctttcattgcacaatgccgaatttcaaggtctttggccgctacggagcaaggatgagatgaatgaggtttgcgctgcattcaatctgcccaaagaagtgacaacaaaggtgagggtttagcaatcgatttgcaccctgtatggtttcaactgaagaaaatgattcggtcatcctaactttatttacgcattgattttttaaacatgatagtatattcaatacggaaatactttcaacctgctccatgccggtgcctcctttatcgcacaccatcaaaactctattggtgttgcaggagtatcagacaaatatggaaagcgatcttgggctcgatatcccgctctttggatcttgaaacatatcgactctttaccaaatcctggtaaaacttgtttcccaaaaagatcaaaagatacagagagcctttttgatattgtttactgactttttcgcacttaaaacttgtctttctactactgtatccatacgaacgtgtacagatccggatgatgtagaggccttgagcgaacaggttattgacgtcaagaacattggcgtagatcaagcagctgaggccaagtgcgtattcgacgtcaagaaatagcagctatatcggtattatactcatgtactcttatcatttataggcggcctagtctcaaaagacaagctcaggaatgggctggtatagagaccaatcctaacgcccagctctttgttttcgtcggtcgatgggtaagccgtctttcgttatggacaaggcatctccacccgttattcactaacctttcttctcctattgtataaatcagtccaagcaaaaaggagtcgatatcatcgcagatgtcttcccggctcttctcgagaaacgaaaggatattcagctgatagcggttggtcctgtgattgacttgtatggtcgatttgcagccgagaagctggctcgacttatggaaatgtatccaaaacaagtgttctccaagccgtatgtattgttctgaattcactttcgttcatgtgtgtttttatcgttgacgtttttctctttatcattcttagtgaatttacctctttaccagcgtacctgtttagtggagccgactttgctttgattccatctagagatgagcccttcggacttgttgctgttagtacttgtactcttggcttagtttctttgaacacatccgtccgttgttctttgctgacggccttcaattggtgatcaatataggtcgagtttggtcgtaaaggagctctcggagttggtgcccgactgggaggtttgggtttgatgcctggttgggttagcagatcttcttcatcaagtgcgttgggatcaatggctaattttgatttactgtctttccttatagtggttccctgttgagagtacaaggtaacttccactaatcggtctcactctctgcttcatacctgtcagctaaccagatgtttttaaaccggtcgatatttgcagtacttcgcacatgatttctcagctccaaaagacaatcgttagtgtaaaccaccatctcttctcatacttgagcctgacactaatgtgtgatatttgtgcatgtgttttttgtctcttcgattttgacaaaacagaaactggccttgaagtcttctgagcaggagcgtgcggtccttcgagctcgttcagccgtccaacggtaagtatcttatttgtggagtttaattcagctccaaatatagagtgccacagtacaaaactaacatctttcttttcaacagattccctgttctagagtggcggcaacgaaccgagatcttgcaaaagcgatccatccgcgccagtcgaaagggtgctggaagtcacgcttatgattactctgaatacgttcctcctcagcaagttgttcatggtgatcgacagtacgctatcttctcccttttctgatctgttgttctacatatttgaacatctgactaattgtgcatgcgtcgcatacttcggctgatagctacggagatctcacgaggattgaacgggttgattggtcgaatagagtacgtgccgtgatagtccactagacaacacctagttgcacatgctcaagtactcataatccttgtatagactccaatggacgaaagtcaaactgcttatgcggagggtagcattcgaaatgctccggtcattgccgaccccatggaccctagtcgcgacaacgagggcgggttcaatgctcgccgctacggtgatgagggaaacacttactcgcctgctagctccgatcatagcgatggtccctactttagcgatgagggcagcccggtgcaacatcagaaccagtctgaagacctggcaggagatcgatcttcgtcctatggggctttcctggcttcagccaataggtaagcgctgtctatctaaatatgtcctggcattccaacagcgctcatactttgtgtcttgttcttgattagacaaattgcaaagcagacaggaagtacacgcgatcctttcttctccaacgcttcacgaatcagtttcgcagatgacggagagcttcaagcacctaaccgacctttcacgatgcattcgcgaaactcgagcatctcatcgattgtggatgagcatgggtcttcttctcctctaaacaaggcgatggaaacatttacggatgagaaaggtccgtcgccgtttcttatacaaccgagttgccaaccagaaaactgatgtgcttccgtatcactataggtttggttgctaatgaatttgttcagaaactaaaaaatctcaactctgacaactcgaagggcgacctttgtattgagaagtgtaagcaaacattctgtttaatccggcaaggccagatattctgctactgatatgagaaaatcaatatccacttcagacctggaaaaagcggagaaggcccacttcgttgagcttcgaagagaaaaggtttgtttgtaacaaaattatcatttttgatcaaatgctaagtgtggatattttcacgttgatagatcgatagctccaaggcttctggttatggatccagccttcatgagaactcagtgtataccgctgctggcgaactcgatgacaatcttatgccggacataccgatgtctaggatgcaaatctttatgggccgtcagatcggagagtggcctctgtactctatcgtcatgagtgttggtcaattactctcggccactgcgttccaattagtacttctctctgggtccgctacccaaactggtaaatgacatctttaattgcctctcatatttctgacgttcaactgaaatccattcgattactgtggtgtatctgttcagatctcgatctctacgtcatcggagctgtcttctttacagctagtatctgctggtggtatgtcagtctatttgtcatattgcatcaaatcgtatctcacctttcttctcttcttcaaaagggccgtcttccgaactatgccatccgtgtacggactatccttcccatggattttgtgagttaatacaacatcaagattaagtcttgacctggagggtgcattgctcaaaccgcttggtctatcacccttttaactttgtattttcatctactagcttctccatcgccttcttcatgattggacttccttcgttccatggaagtatcacgtcgaagcaaacttatatccaggcggctgcgacttggtgctatgcctctgcttctgccgcgaactttatgttctttggaatgaagtacgtcaagtatcctcagagtttatcaagtgcattctgctgatttcattccatttccccttagttttggtgaagaagccggcgctactactgagtcttgggtcttccgagcatgtgtgatccaaggtcttcaacagtgttggactgtacgtcttcttggtgctgcagctaggtactgatatgcgactgacccaagacttttctttccttatcaaggctgctttatggtggtggggtagtttgctggtcaacaatgaccgtaagtctagccagttcattgctcgtgcggaggatcactggctaactttcttgatattgcctttcaaactctccagctaccaagtacatagctgtgagtattgattacctacctcgaccatctgggtcgttcttgactgatacggagtttatacctttgaatctttcagcctcgagcggtgttgtatgtagtatggcctctagctctcataagtatggtgttcttcgtcacgacttggtggggtcttcctcaatactatctacaggtcagttcacaatcttctagtaagcgatagggaagttcctttcgctcaatgcagatcttccacggactttttcatcgaacagaaacctcctactgtgcccaacttctacgctactctcttccgacggcacattgtgcaatggtttttggttgctgagatccttcgagacttttggctggctcctccgacaggccgaagctggaagttcctttggaataacacgaatgtaccagaatgggctaccgttattatgatcggaattttctttatcggcgtacgtggttgattcatgattggcagtcaacgaaatccttctaattattcttttcattcgactgttagatttggtctatcctgctgtacactctgacccgtgagttcatgtgtccatatgaggctatctgtgacggagcttacgtattccttctttatcttaacaggatatgccaaggttcattcgtggcttctcccagtcttcgccatcggactgggtgctcctagatggtgtcagatgttttgggctatctctggaattggagccaacgttccatgggctggatccgtcggcccgtacctctctaccggaacatggctttggcttggagtgctcgacgccatccagggtgttgggttaggaatggcgttgctccaaacactcagtcgattccatggtgagaagctatttcgtttgataaattagaatgcatccactgatcgagattgggtgaatcctttttcttctcttcctcttcttagtcaacgctgctctgttcttctgccaatgtcttggtgcccttgtggtgatcgtcgcccgtattggtagtcctgatcgagtgagttctcctcttatattttctttaccctccaatgatatatataaactcttgtattaacatgttggtgttcgtcatcacagcttgggccttacactgtattccccaatatcggtctctgggataaggcaatcgatgggttgacaggtttacctgtgatctacccactcttctggatctgcttggcatgtcagattggaatcgtcgtcggctgtgagtgctttcattgagaaacaaatatgttgttctattctgactggagattatcttgtacttgatccttgtaagacctctggctattccgaaaggagcaattaaccaagccatagcagtttctagtgatacaaatctccatttcaattcttttcttcaaacagtcaacgtcatatttatttcaattctctcatctactcatggacattctttcaacccaccttgtggtatgcatatgcatctgtacctgttttcctcgatagaatgttctaaatagaagctcgaaattagatgtatcttttctttgtcaaggacatcattgcgctcatatgtttaatcataatatttgtcatcaccagttccctaagcaattcatggtcaatcgtgcggttaaagacaagtcgttatggcggagggatagtttcaaaactgaggataaggtggtattcatcttccctcgttgcaccggatttcttcacatatctctaaataagtcaaaaacagctactgctcataccattctatggcgctctcacatgtttgtggtttcaatcgaataaaaagaaaggagagaaaaaggaaggaaagaagtacgaggacaaaagaatctatagaatccgaccaactaaacgatgacacaacgagcaagttctccagtgacagtaatacaccagtcttcctcagtttttgtggaggtctccttgtagaaagtgataagccgatcgggtcctagcgaatttgatatccgtaaagagaggaataaatgaattgacgaacaaacctaggactagctgaagacatgaaagataagactactgacctccacaaatctcctgagtagtttgacacggcagacagtccattccagcattgtcagcaaaagaggagcgaacaaaaagaagacatggcattttcaaaacatgatgataaaatcttactctcttattgcctgtgcagaccatgctacattcgtcaaagtctgcaacttcagaagaaaaagcagaaccacagtaacactctaaacacaataacaaaggcaggaagtgaaaattgaagcaaaggtcagcagtaggtatattggttgaaaatgtacggaaaaggtgaaggtgttgaagttactgaccggaaccatactcggcagcggcgtattggtatcctgcttcttcgcagaatgcgacacaactaaggaccaaaagaagataacgtcagtaatatgcagccaagttcgaatatcaggagcagaacattgtttttctttttattaaagagaaagaaagaagacaagagtagtaacaaagaaggacgaacgattcttgactcatctcatcttcactagtgtaagaagtggctcccaaggttcgagagttttccaactcatgcacgcacggaccaatcttccaaccattagaaatcgtatcgttctttgagaccataagcgactcgttctctgttagaatacgatatgcgttgtcaaccggcatgatcaaggttgacagaagtaagcaaaaagaaatcaaggagctcacggagtaaagataagtgcgaggctccgccctgtgtggttacgacaaagatgagtatcagacaagcaaacaactatactatcccctccttgttgatgcacctcatagcttgcattgcgcatgtactgattttaaataaggaataacgtacacagatctcagtcgggtctcctccacaagaatagtcacaattagagttatcgacgatagcaccagtagcgccatttcggaaatcaaaatcacaatagcactcggctgatgtatcgaacaagatgtggaagaatagattaaaaagataacatcacacacaagaatatcaggtttagactgatcgaggagggttgagaatggccaattcagaagaaacaaaattactgttatattcgagtccagcatatggtagctctcttgaagatcagcatcatatcagacgtgcatgagacgcccatcagccagaaaggatgaaccgtcaattctgataggttttattttctcagcaatcaaagactcactgggactgtggaattcgaaggaagaaatgatataagtgctacatattatatgatggacacggcaaggaaccagaaactgcatggagctcttgacaagaaagaaatgaactcacctcgcaaaagctagcacatgcctccagggtcatgttgtccgctttatacacagcggccgccagagctcgtagggttaccgtggcttcagcgatgcatcctacgctgttccacccagttggtaaagtgtgatccacagaagaagtcacgggaacggtctcgttggctgaggtgccgctactcgtagtagtgttggcggcgggactgctgatagcagtactgctagagacaggattactggtagtggtaccattatagttgataccagtagtcgcagtattattgttgtaggtagtggtaacattatactttgtacaaaagtcaagtgaggagacaaaatcagtgattgatttttagtcaagagcagtgtgaaaggaactcagtccaatttggagaacaaaacgagtcaaggcttacagttgcttcttgtcgaccagccaactgtcgagatctgatcgtcgaccgatgtatgttttgcccggcttgagcaggaggaattgaccaagcaaaagcaaggagagtcgcgcaatgaatgactgattgggtggataacttgaaggcaggcatagctattgatacgagggtgaggattataggagctaaagtgacacgagaagtagaagtcaatctcgaggcagaagaagggagaatcgtccatattggacactagtaagcttctcggctttatacctgcctaaaaacccgttcgatcattgtcaacgaagaaaaagctcttcggaattctaagtgcaagacttgcgccgttagtcttgaatgaacccattcttgtatcaatcatcatcgtcgtcgtcgtcgtgagctgcatacacagaggagatggtcgattgtgccaaccataaacgagacagaggagatttctgaacgggatctgaacggatcaaccctgcgtgtgcgctcaagaatacaacaccggaataaatcttgaacaagtggctgattggattcaggagtattttgacataatctgagtgatttccgtcggtgtcagttttatgagaatgtagaagacaagatcggagatatgaggccgacacgatggaaatggtgatcagagaaaacacgttcaacaaagtgcgcctgcgtgttgatggaccattcaaagacacagagggaagcgagggagaaaagaataagagaagagtattcaagagaagaagcagatattgaaaacataacgtgtcatcaacaacgagacttcagaggtcacaaaacgtttcactcagtcagttaagattcggtcagctctgtcaaattccaagaattcacgctccagatagaagactatgggcagagagcaaaaagtttgggctggaataagagaaaaacgagcgttgacttgtttcatttgagtttgatgcaacacaagagtgatcgtcgttgtcaaggaacatgtgtgtggcgtcggaagtcaggtgatgccaagacaacactgccttgattgtcaggaatcaggattaggtaacatgtacacgcacagtgtagccattcccaagttctattagtcatcatgccttccatttcattatgctccttctcttcattatatgcgcttgatcattcttctcatcgttgtttctttggattgttgatacgcttagtgatctgttgctcgataacctccggcttcatcgtcattctggttgataatcctgtcgtttagtaatcgagtggcaaccaggttgccacttcatcttaggtagaacactgaacaacataagaggaacgcttgcgcgctccttcagatggggttctccaagttaggatcttgttaactactcctattagctatttgtgctattcaattgtgatcattccctcttccctgagccctgggagcctaaatctccgagccttgtatttccctattcaaccccagtaaccacctcgtaatcttgtaaccacggcttctatcattgataacccacagcttcggtcacgatacttatctgccacaaagcagtacgctgactcgactaaccccgaaattatctaccactttcccatcaacgttgagacccaagatcctcggatatcatacgcactcacccactcgcagttgctcaactatctcaaagcatgcccgctagagctcatacccataatttcgcagctggaccttctcctctgccaacttctgttcttgaggtcagtttttcctaccaatgacatcacgtactggttacgttttttttgttcttgagcggagctctttgcgaagcagcaaataagacgagagaacagaacctttcaactgaatagcttcttattattatcatcgtttctgttgtcatcgttttttgcattacaggaagcccaaggtgctctccttgatttccaggggtctggaattggaatctgtgaggtcagccacaggggaaaagagtttgctagtgtcatcaaggaggccgaaggtttgaccactttccaaaacttttcagccctttatacatgcctctgatatctgactcgactcgatcacagccggagttcgagcactccttcaggttcctgacacccaccacgtgttgttcacccagggcggtggaaccactcaattctctgccgtcgtactcaacttgctcgctcactatgctgccgctcacccggcctcaaaccctcccaagatggactacgttgtcaccgggacctggtccaagaaggctgcttccgaagccgctcgactcgctcatgctggaaagcacgctcaagtgaaccttgtggctgacacgaagccttctggatatacccggttgcccaccagagacgaatactcgttctcccctgctggtgaggccgcattcgtctactactgcgaaaacgagacgatcaacggagttgagttccccggtacaaccaccgagtccggagcatttcctttcgacctcgttcccgagggaacacctctagttgccgactactcttcctcattccttagtcgaccgattcccaatattgagaagcatgcgctcatttatgctggtgcgcagaagaacttgtcgcccgccgggttggtggttgttatcgttcataagtctatccttaactttacggatgccgatgcaccgattcctatccccgagcttctggtttacaagaacatggcggactctgcttcattgtacaatactccccctgtctggccgatctatatcacctcgctagttgtcaggctgttgcttgccaacggcgggctccaaggcaagcgagacgaaaatttggagaaggccacgttactgtacaacaccttagaggatagtgggaatgttgtcctcaaagttgagaaggaggctagaagttggatgaacgtcgtttggaacatgaaaggtggtgaagaggccgaaaaagctttcttggcaggagcggaggagaggggattgagacagttgaaaggtcaccgatccatcggaggttcgtacttccacctagtctaccctctctctatttgtgttgtcgacagcaactgaccgagaaagaatactaaacatatggctacaactgataccaggcatccgagcttcgttgtacaatgccgtcacgcttgagagcgtgcaggccttggtcgcctggatcaaagagtttgactctcaggttcaaaactgagctttgactctcttgaattaatccctcttcttgtttcctctttccctcttctcagcaagactttttcatcttttgcctctttcctagagtcatcctttcgtctttttcttagattctttaggttttgcttgattttcttcttctgtactctgttccatccttgccatttgcaccagcaaaagattcaactcccctagcatttacttgacaggatcaatgtcatcgagtacacgatactttgtaaccaaacacctggaagagtcagattctgggacggaaacgtaaagctacatggaagccgaaaaagaagagaagggacaaagaaaacatgtatctgtatattgagaactgtaagacaaaaggataaaacctaggaaatcagaatgaaagaaaggaacaggctacaggattaatatgaattagtgaagagtcgaattgctgtatctgtttattcgatgtcaccacaagaaagaaacccatggttaacttgatcaacatagaccgtaaagaaaacaagaagaacatagcacgaacattctcttaaaactgtctcgttcaatccaagccgcccaaaacatcttcgtcttttgaccaatcttgaagtctcctgaactaacgttcttgagagacgcaagaggcgcatctgggttctgtggtccccgcatcgccggtgttccgatcgttccccctgaagcagtggctgcacctccgctgagaccgagaccgatccgagtgcctgcgatctgcttctccaaagcctctaaaccggcaggcgtaggacctccttgagaaagaaacacgattcgggcgagccaggcgatgatgtgtaggtcagcaagagactgttataaccgagtgaatatacgtcagattttttgtgtgaattgaatcataaatcgtcgtcagctcgaacaacaggtccaagatcatgataaaaagaggacgaacgatttgatcccctaatgtatacggcccaacgatgtttgattcaattatatccaaattctcgaccactccgaccccccaagcctttcgagaagcagcaaaaaacgcttgtcggcgggcttcggtttctggcccggtatgaggagaataatatacgtcgtagactatctggttcgcttgcaattctgtcatcggtttgttaagacacacagatacgatcagtgaagggaacttgaacgataacagaggtcaggataagttcaaagataacatctatctcactatttttcaaaaacagatgggtcgagcttccttcctcggattctttgatatacctgtgcagggcctcctgtcttgctttgatccagtgcccggcaaagcccttttccttcatcatgagctcatgcggcgacctcgcgcataacagtaggaagttcggatctgcagtaggaagatggacggctaggatgagcgtgtcggaaagatgcttgccttctatcgttgctggagagagcgcaggagctggtgacgatgatgaaggagttgaatgaggggtccgagaggagtccaggaacgtcaagatggactaatcgcggaatgaaaaattcagcaagataaattcaggttaacaagaggcgtaggtgacaaggatcagataattagagcgcacaatagtgtcctggatggatttataacgtgtctctttacctgcttcagcagccgaaccatcccagacagggacgaccaaggtgggtatagttcctgaatgttgtttggcaaaacaaagacggtgtcatttccgttcattcaagataggtgcaaaagatcttactcaccatgtgggttcaatcgaagatagtccagagaaaaattgtcccctctcgcttaagtaataaaggagtttgatgaatattacgacaatatacaaacctgaaagatgacgctcaaatgagacatacagatgtcgacggtcaccatattgaaatcttcttcggagtatcctttttctcttagagccagcaatggaacggttgaccagacgctggttggattcctttgatagttgataatcgacggtgtttggatcgatgaagaattagaaccgtttgatcaatggcaagttccatatcgcccacgaagcgatatgagatcaaaattcaaacagagaagaacaaaaatcataccagtataagacagctttcggtatactgttagaacctgtggatgaagtgctcatcgtgtgtgtgtgtgtgtgtacgaatgtaagtgtgagtggaagagaccgtactcgtcaagcttcaagatggacggctgaagatgaagatgatacggttgacgtcgccactggatggttacacggctacagattaaattgtcagggatgtgacctgagtgttacacctcagtaaccttcttttggttctgttgtttctcctgcctcggtattccttatgctctctcattacatcaacatgcaggtatatgaccttccagcgcaggtgcttctagcaccttctatgacctgttctcttatgcataatcgttggagtctaaggatgatatataagacgggtcccctttgccacccatagcataatctaccaagtctggatcttttgtcattccttggttccctagtactcttgttccattgttgtatcaaccttattcatacgatttccctaccttgcgctctcgtcacagtcaccaagctagagagcctgaacttccttcttgccaaccctattccctgcctggttacattattgtaaccttcccgttaccctctgaacccggaccctgacataaatggtataaccggtcacgtgagctcagtcaggccggccggttaaacccatctccggagattcctcaccttacgttgagcactcgccattgaccatcgatcatatctcggaccactccgcactcatggacactgctactctctctggctcccagatcatcgcaaggtcactcaaggatcagggagttcaagtcatatttggtcttgttgggattcctgtcagttcccacttcccaaaaggcttgattatcaactcggactaattatatattccattcttgcgtgcttgttggcctgtttgatccatctcttatgaaagaataggtcatcgaggtcattaaagctctctcgtttcttcaatggtacattcagactgatttaaagactgatacttaaagtaatccatggtttatataggttgccgaagcctgtattgctatcggcatccgatttatatcttttagaaacgagcaagcggcgtcttatgtgagcattgatattcagcttcttagtatgaggccgagaactgaacagtccccttcacgtttctatgagctaggccgccagtgcatacggatacttgacgggaagaccgggcgtgcttctcgtcgtaggaggtcccggagtgattcatggtaagctttatgaaagcttgcaagatttaaacagagaagctgacgccgcaccttgtttgttatcctatcataaccaaaagctatgcctggtatccatcatgctttatccaactcattccctctagtcgttctcgccggtgcgtctgagtctttccagcaaagcatgggcgcttttcaagagctcgatcaggtagcgtttttaaggaaggacgtcaagttcgtatccactccttgtgcctgacttccttgattgccatgtgagcatttactgatgaaatttttcgatggacatgctgacagatttgcggctcgaccagtatcaatctcacgaacacccgtatttgtcgagcaggccttccgatcagctctttatggtcgaccggggccaacttacatcgatcttcccggagactatattcaaggatctgtgttggagaaggacgtcgaatggagaccgatcattgatgattttccaagaccacctgcgccaaagggtgctattcggcggatggttgaccttctgatatcagccaagcgacccctgattgtcatcggaaaaggagcccaattctctcgatctgagctagctctcctcgaccttctctccgttctacctattccattcttgccgacacctatggggaagggacatcttcctgacgatcatccgttgtgtatcgcttctgctcgttctgctgccctcaagggcgccgatgtagtactcgttcttggtgctcgacttaactggattcttcactatggtcaatctcccaagtgggcttccgctggccaagtcaaatggcttagggttgacatttgtccagatgcaattgacgataaccaacgggctgaagttggcgttgtagctgatgtccgtaccgttgtcgagcaactatccgaagaacttcgaagcaggaataggaaacccgatttaactcatcaggaagactggggaaaaactcttcgatcctcgatgtctgtcaacgctcacaagaccaacgaaaaaaccatcatcgaccgtaagagccagccctcattaatgaagtatcatcaggcgtttggaattatctttccgcttctgccgaaagatcacatctttgttgcagagggtgccaacacgttggatattggtcgaagtttcttccctgtcgagaaccccaggtcgaggttggattctggttcaacagccacgatgggcgtcggcatgggtttcgcgattgctgctgcgatttatgaaaaggaacgggtgaaacttgaaggtgaaaccacaaccgaacggaaagtggtggctgtggtgggagatagtgcgtttgggttctcagcgatggaagttgagaccgcggcaaggaacaaactaggaatcttggtgatcgtgatgaacaacagtggggtatgttgttgaatttgattcgacttttggatcgaaaaaaaacttaaggaattcgacctaatgcaatggttcttttgaccgaatttggtcatctccaggtctaccatggactttccacgtcggcctatacttcaacgcctctctcgtctctccctcctacagcgctcctccccggggtccgatatgatttgatatctgaagcctgcggcggtaaaggttttcttgttcgtactcccgacgaacttgctacagctgtcaaggaagctatgaaggaagaaaacacggtgtcagtcgtcaacgtagtgatggatcctgggaaaggtggaaagttggagtttgcctggttgaaagatacaaagaaggagtcaaagctataaggttgttccgttaatttgaacggtgcatctcaccttcttggattgcctttctcattacctccttttgttacaattttgtaggtttttgttcttgtatatatgcgcataagttcttcagaattctttgtgccttgatgtgtattgtcattcatgttgactttgatcagtcgttgctaatgagaacagcacaacccctcatatattctcgccctcaaccatcttgataccagaagaagcagcaactcttccgcttcttaatccttcacctgcttcatcttttgcaagacccgccgcagcgacgatggaaggtacgttgaacttcttgaatcggatgaattcagcagagggaatcaaaccaatggataccgtgttctgtaattccatcaagattttcatccggtcagacttgtgggcttggagttcctctcacagggatagagcaaagaatcaagggcaggaaagaagactgacccggacaatacgaacgagaacgatccattgagcgttttcactcaggtcgacaatatgtcctctatcggcaggaacagcctctgccattccttttagtaacgtcgctttttcaagcgtctgattttgcactgaatgatgatcgattcggaactattccgtatgtgaagatttacgaatgagactcacaagattagcccgaaagaacatgaaaacggagagtgagacatcattagagaaagaacaaaaaaacaggctaaacatactctcaggttctcctgcgtctcgaaaacaccaggataaactttttcctttaccagcttgatgacttcatccagctcagctcgacacgaatagctcactggcgtgatgcgctggatcgttcgggtctgagagacaccggtgcgcaagatctgattggcgtagtgaagaacaagatgcagtggatcgatcggtgggtgaagcgaaaagaacatgactagtgtccgtacacgagaggatgcaagaaggtaaatcaagttaataataagttaggaccaagtagtgtgtgaatgcgtaggaagaggacatgctgcaatcaatatcggtatgcttattcactttagtcaatacaaaacaatccaacaatgcaagtcggcgtcaggtgttgcaaaaatattctcacgcggcttgactctaaaggttttacgagactcaccaatcagactagccttcttctttgtttttgaacttctctccaacttcaactctgccagttcctttgccaattcgtcttcaaaatcgtcaccctcctcagcggcagtagcagctaagcgagctttttcttcatcggcccaaaaagattctctaaagattctgtatttctcctgttcccctggatagagttcttctactagctgcatcctcccaccaaacaagtacacagaagagatcgaccgacgagggatatgattcataacgagggctcccgtcagttctaatgggcgtccgaaagcaatggaagaaactatacgaacactttccagaacttgatacatctcggctacgctctgtctttccttacttcgaagcccggtcacccagacacctggtccagacaagttttgggtacctccgatatacgtcccatcctagagggtaaatgaagtgggaatcaaaaagaggataagatcattttacacgaccgaaacgaaagatactatgcacatacagatctgtactgcttcttctttttctgcctattatcaaccgccatgatggtccgtatatgtctgtatatgtgttcgttctacatgtccaaagaaggtgaggattcttattgaggtggctgagcctgagataaattcgtgtcaggctgagagagctcaaatgaccgtcacctttcagttgtccaacatttccatctatcggcaacggcgacggcaatagcgacggcaacgaagaagacgatatgcgacttctaactcccctactcgctctccgcatacgacctcatcctcatcatatttctctgtttcgtcggaacccgtctctttctcggtcctttgcttcgcctggtactcctttcaagccgcctcagtacggtcaacctctctcgttgacacacccacacctcgtccggcccggtcagctgactccagggatttcggtgggcgagtatgaaaagaggagaaagcagctggtggaaagagtcgaacaggatgccattatcgtctccatgggagcaaaaactatctactgcagtcagagtaagtagaaagcactttctttttgtctgcgctgctcttcgtaggtcgctgaagagtgaagactaaccctatctcggttacccaacgggttttatcagacatcttgtaagcaattgtatcagactaaaagtcaatgtgagcttggctgatcacctccatgatgggctccttatttaaatccaatacaaaacaaccactactacaatcaagctacaagtttcgacaaggtatgccatgtctgaccagttaggctgctgtttctctatactttggattgactcatcatttttgatgatcccaaccagggaccgactttaactacttgactggattcaatgaaccggaggccgccgtaatcattcgttagtcatccctaactcattgatctactttcttacacttgtatcggacgacagcaatgactgacctgtaaagaacgaccaactttgcacatgtgtgtatatatgtacaattcatttcaatttcataaaatcaggaaaggatgcctcacccagaggttatcatatgacattgttcgtccctgtgcgctcggccgaatctgatctatgggaaggaggtagatctggattggatggtgctgttgagtttttcggagcggacgaggtttgtttcctatactttgcttcgtcaggtaaacgaaaaaagtatagtataagctcacgaacttctccgcttgatctatcttctgaactgatctggtaggcctatccactatcgtccatgccctctgtactccaagaccacctgtactcagcaccttcgatttatatcgacctgcctccctccaaatccaaacgatccttcctatctggtcttttgtcttcatcctcatctgcgacgtccgatattgaaagccaagttgctaagcttccacctgggaaggtcaagccactcaacatgctcgttcaagcgctcagacttgtaaagagcccagaagaagtcgctttgatgaaacaggcgggtgatatcgcgagcaagggtcatactgaggttcgataaatggctctacttgtcgttcgtgaatgtaaagggctgacctcctgacaatgcgcactcacaggtcatgaaatttgcccgaccagatcttcctgaagctcatcttcaagcacattttgaatacatttgcgcgcttgaagggtctgaacgatccgcttatgtgcctgtagtggcgagtggagcaaatggcttggtcattcattatacggtcaatgactgcttgatgaaagacggcgaattggtgttgatcgacgccggtaagtaggcctttcgccattctcttgttaatccttcatatgactttttctaccaagggctttgatcctgatcatccaaattctctatggtaggttgtgagctacactcttattgttcagacatcacccgaacatttcctgtttcgggcaagttcagtcctgcccaaaaagatctttaccaggctgtacttgaagtgaacaagcgatgtgtcgctctgtgtgaggtcaataatggttggacgatgaacagtttacacaccagaagttagtctcttcttgctctcctcactctactatcctggcacagtctgacgtccttgcttatggggaaaatgctttcttacgataggtgtcactttcatgaaagaagaactgaatcagatcggatttggtttaagccacgaccatgctgcatccattctcgtaagcactcctatcgtctcgctcatactttcatagactcaggcttgtctctttcgagttcgtagtatccccatggattatcccactacctaggaatggatctgcatgacactcctcttgcctcaaaatctactccgttagttttactctctgcattcgtacctgtttttcttttttctcttgaggtttctggatgagaaactgatatacctcatcgcgctgtacccaattttcgttcgacgttcagccttcaaaacggacatgttttgaccattgaacctgggtaaattttggtgtcgtacttatttgatgggctacattcgagtacaacaactgatatagaatctgttcatgtatctctctatcgtgaaatccgacagggtgtacgtcccgtatgattcgcgttaccccaagcatttccacgggttgggtatccgtgtggaggtttgttgagatatttctggaatgcttaggaaggcaaaagactatttcctcatgctaacgaaacttttgtttcatctttgtgtctacaggacgacatattaatcactccagagggacccctggtcctgacttcacattgccccaaggaggtggctgatgttgaggctgcctgtcaaggacttctcggatgagcaggttcactgaaagaagaaaaaaagaaaaaaagaaaaaaatgactatcaatgatcccctcatccatgcaatattgggctacggtattcaattcttcagcctgatcgtaaagagagaggaagaaagtcaaagaaaagaaagacaaacttaagatgatctaatataccggcccggatcaagcggtccggctgcttgccgctttacggccaaatacgaaaaatggcgattataaaaccacatccatcggctgtcttcatctttcctctcaagctatcatcaactttccaccgcatcgatccataaccgcactatgacactgcccacttccttcaaactcaagtaagtcgtctttgctcgattcgttataccatttagggtcgacgagaaggaaacaaggaaactgacctcatcttgcggtccatttctgataagcactggagcatccatcccatctgtcgggcttggaacctggcaagctcctccaggcgaggttgctaaagctgtcgagcatgctctcaccgcaggttacagacatcttgattgcgctttcgtctatggaaacgaggtttgtccctatctatatacagtatactgcatctcttccactgtaggcagagttcgttgagtctaaccgtaagattgtgatgggctcgggtttaaggctgaggttggacaaggtatcaaggcttctggaatccccagagatgaaatctttatcaccacaaaggtttggaacacctaccaagaccgagtcgaggaatgtctcgataagtctttgcaggctctcggggttgactagtgggtttgattaatcaaagtgataattcagtttggcagtccatctatagtactgaagcttcgatt

SEQ ID NO: 1823 - DNA, 47095 bp, Xanthophyllomyces dendrorhous
tataatatctcagtgtcgacttgtttctcattcattggcctgttcgactagttcccaactcgaacgaacctgatgccctcatccctctcaactcggatggcagtagagcaacagatcgagaatggaaccagcagaagacatgggcccaactcgagaaaatctacaaagaggggaagaaagtcaaagctattggagtcagcaacttttcgattccctacctcaaacagttagtctctattttttctatcgagatccaaccttcgaatatttcaatgtcaaagtctaagatatcactctgtgatctgctcaacgttttttcagcttggaagaggcgtggacggtcatccctgctgtcaatcaagtggagaaccatccgtattgtcctcaacatgatcttgtggagttctgcaagtcaaaaggcatcattgtccaggcttattctcctctaggatcaacgagtaagtctgtttgcatataacatgaaatgcatgatatgctctggtcacgggagcccctcatttactcaattcaaatgaatctttagactccccactcttgacagactctgtcctcaacgagattgctgaagcgcattcatcctcacctgcgaaaattctgatctcttatcaggttcaaagaggaatcgtcgttctgcctaagtcagtgacaaagtcgaggatcgaagataatttgcaagtgatagagttgaagccggaggaactggaaaagctgaacgaactggccgcgcaggggaagcagcaaagagtcaacgtgagtcttcggcctcatgtcttctttttggtttctggtaagaaggcttgaggctaaatgcattaatccatcatcacgggctttctctgctttcatttatcggactagactcctgcatttggatgggatcttggcttcgatgattggtatgaacccaagaagtagtcacatcagaatttcttcttgctaggatttcataactttctgtatctccgcttatggtacagggacctgtatggctagttgttagaatctgtttgaagtgtattgtggctcacgtagctgataaccaacagcgcccaaatgagatgatgtttgtttggacgaataaaagttcgcatccgtcgactgataagattctcgagaacactcatgagaatcaattacctcccctggaatatgattccttcaactttcctaatgcatgaccgtaagcctctttgaaaggttcgagctccttctcctcaaccttcagcttctgaagtttttccaggtgattgaaggatctcatgagagatttgaaatgacgagcctgcgtatacccaagggcagatttgaacagacgaagaatacaagatgagacatagacaggctgaatttgagaaacatgaagagaagcaggcaattgagatgaagaatagaagcgaacggacctcttgagactcgactaaactccaagcagatccctctcgaccagctctagcagttcgaccgactcgatgaatatactttcgagtgtcaactgggacatcgtacgagatgacatgttctactgaagcgatatcaattccacgggcgatcaggtcggaacagaccagactatggtaaggttgagatcaagattgaatgaattcaatttgatgttagtcggatacaaagaagggattataagaaaacaccacttgagcaaaagcaacgaacagatcgatctggccctttccaaacgcgctcaagacttttcctctctctcctctttcacctcctccaccaagatcactactataagccctaacaaccacgccctcttcacctttatgttcttttacccattcttcctcgaacaactggagaagtcgaacaagtcgagaggcagaatcaaccgatttagtgaaacagattgctcggcgaagtttgaatgtatcagagtgaagtagatggagcaagtggagtggtttcagtagcgtgggtagaaccaagtatgattcctgtatggtttgttcgcaggaggagacggttaaactcgtgaatacattaaactcaaatgtttagggaaaaaaataggctgaccttgagagtagcaggcaaactgaaagactcctcggcgaactctttggggttgctttctccttcatcctggacgatgaagtactgaggatcgttcagcttcaaggctgcgatctttgaaggatctctcgtgagggtagcagagaataacagcttctgacactgagaggcagatcctatatcttcaccttcccacctaggttgggctgccaaccaagccttccttcccatgggaaacaatatatcatcttcgaccgattgatctgctttgccaaagctgccctccatcaggctcggttcggttatcgaatcagagacggcagacgattcaggagtgacggtgcctcggatgttggccagaacgatctgaagccagtcgttgaaagactgattcaagagtcgatcagcctcatcgataatcaaaaaccggagatctttcaaggtgaatccttcagtctgcgcgagatggtcgatgagccttccaggcgtacagattagaatgtcgaccacagaagattttgttgttggatctataagtaatgacttttcgtgtgagaatgaatgagatccagtgatggtagcgatctaaatcatgaacaaatggttggaaaatttttgagaaaagatatacaggctgagggtctgttgaaaacaaacagaaagcacatccgtaccttgagaccggttcctttggccagcgcctcaaatgcctctcttccttgggacacgagatctctggtcggcaggatcacgagcgctctcaatctggtaacaattcgactcgataaaacttcaaccactggaacgacatagctcaacgtctttccgcttcctgttggcgcgctgacacagatatctctgctcccttttcttcccggataaagtccttgaaggctacctctacctgttccagtctctcctccgaaggttggaggtaataagaagggaaaaacagcagtttgaacggcaaaaaagttttcgacccccatttccttcaagcgaagcaccgttcgctgagataggttgattcttggcgatggagaagtagtatgttctgctggtgactcggatggtgggagagaggtggacgcagtatacagaggcaaagtgtgagtggaagggatgagacgagcggtttgaagcgcagcgggaagggtgaggggatgcaacagagaaggtgtaggttcgggaatcagaggggccgacagagggaagggagtgagtgaaggaagctcaggagtatcttgtctagattgccgagattctgatgaatgcatagacgcgtccgagtcagattcagagtcggagtcggagagatcggaagaagatatcgagggtcgagaggttattgagagtgatgtcaaaccgttgtctccaacaggattctccttcttcttcttcttcttctttccgtctgcgcttccgtcaggaggtagaacagatgactccacgctcttatcctcttcttcgcgttttcttttccctctctccttcttctccttcttttctttcttctccttctttaccttctgtcctttctcattcgacgtgcccttcgcgtctgtattggcttctactattacgtcgattcccgaagaaggagcaagaagtgaagaagcctcgacgatctcgacctgctgttgtatgtcctgagcatgacaatttgaccgctcttccttcttgtcctcaacttcactttcactaccgctctcatctgaagatccctcgtcggcttcagctacagctacggcatctgatgccattggtgtcgaagccgatccaggcttattcttcggagccgctcggattgcggccgcttttcttttcttggacttttccttctttttcttgaggtaccttgctttggcttctgttttcggctttgatcccggctttggtgtcgtcgtagggattgccatggttgtgtgttatgttatcggatgagaagtgtgtagagttgaacaactgagagtgaagacttctcaaaatattcccaaggctgaagtgagcctgactgcttatctaaataagcaagcccaaaggtagtactcactaccttctcaccggcatcaacattcttacataccatccatccatctatacaatcatcattggtcgtcactgttcttgacatgtccgagcgcgtcagagtaagcaccatttttcgtgttgtctgtatgtctctttttaactaaatcgcgctgaatcctactttgccttgtgttgttccctggcttctaccagggaattgtcgttcacagatcaattgtctacggctcgttcgccagactcttgacacccgaagaacgcctaagatgcaaagatgagaaccgtatgtgtctctcaacttagcaggtgctcttgtcattatacccttctctctccttccttaccactgcctctgtcgcgtgtgcttccatcgaatctttgtgcaagcagacacccacacatggacgatctttgtccggtcggcagcctcaccatcacctgacacgtcagtccctgctcccaaacgagcggaagatagcgatttcttgccaggtggagcagatgatttgagttatctgtttaagagggttaccttcaaacttcacgaaagttttcctcaacctaatcgaagtacgtctggacttatttatttcgttttggatttattagattcaaggtgcttatccttggagaatgtgtatacgaacgaacaaactggaaacagatttagataggcctccatacgaagtaacagaaacaggatggggagaatttccgcttcagatcagactgacgtttgtacctgaagcaggagagaagccgattgtgatcacccatcaactcaagctgcatcattggatgccgcctccgttaccacctcctggttctgctgaggattttgtgaatgtcaacaatactgacggaggcgcaggcatggcagacctggggccaggaatagtgacgacaggagcatcgtcatcaaatacaccatcacagacattgcaacaatctataacagcatcgacatcaacaccaaactcggcagcgcctaccccaccaccgccgccgcctcccccaaccggaccggtatattcatatcagtacgatgaactggtattcacgaatccgactcagaactttttgacattacttcaaggtagcccgccgacgcctttacctgcccaagctagaaggtgcgtagccgtcatcgtttctttccagttttaggtacaatgtttgacgaaagaaacgtctatatgtgtttggcattgggaaatgaaaccttagacgagaccgaccagaattcacattacttcaggaaaaagaagagtccgacaagctagacgaaggtcgacgacaagttgttcgggagactgataactggcgtcgaaagtgagtttccatattttcttttttcaaagatagtacaggtctctgagatggttgctcatatctcgtgtaaacgtgcggggcaaggacagattgatcgaggccgaaagggaagcagcaagactaaaggcagaactagccagaatagatgaggtgtagtcggttgccatgttatgcgatgggtcgattgtcttcataaaaagctcagtatgacgaagggaaaggcctagaatgattgagcgagtgaacacgtttatttgcaattgacatcattcgataaaatagacaagatgaagaaaagaaacttgatggaaaggagaaacgaaaagaaaacatgatagagaatagatgtatgcctctccctcccagacgtcttcacactaaatcggacgccttttataaagtttgttattttaacgggagtgataggaagagaagcaagaaaatgctttagggttacgttttgaccgccggtgatcatgggtttaagcaaacgactctcccgaaggaaaggtgctaggtaagaccaaggcggcttcgaacgtcccagaaatagatttatgaggagagataggaaggtagaaaacacataagaggatgaatacaagactaaaggttagaaatacggtttcaattgaacgtcagctttgccatctaggtagccatacggttgaggtgatgatatcgttgaagagagcaaggcaaagactcaatcgacagaaaaaataagaagcctagttgagactcggcgtgacacgtgagcgtgacgagtgtgtggttacaatagagtttacatcggttccgtaatcatcatcggcacgatgtcggcccgatcaaattaccacgcgtggtgtgcaccgcgccaagaccgcgcatccgatgaacatcctgaatatcggagagaaccatgaggatcttatccaacagtcatgtgtactcacactcatctttgccggatcagaactgacctagcaggtatcagaggctgatgagacactgatagggtattaatgtgtaatcttagatttccaattttccttgacttctgtgatccttggttatcttacccgtcccctccgatggttaatatctcttcgttctataaactcacgttcccaaataaactaacccgactcctatctccatcccatacagtatcctgaatcaaaagaaagatcacgttgaacggaatgctagcacctgcagtcatcgccaatattgccttgcttctggcaaacatcactccttctttcgtctctgcttctcctatcggatcacttttagacggtcaagcattgattgaagctcggaaactccggatcgggcagcgagaccagccggacgaaggggaatggaatgtcaagaatcatctcgttagtcttgccgcccttctcgtgatgatgtcttcgttctttggctgacatatcgatcctcgtttgatcagggaaatctctcgccctatttttcagccccttctaatgggtataccactgagcttccagcaggatgtgttgtcgaccagtaagatccgatatctcctatatctcaagatgatccaatgggtctggctgttgttgatggctttggcgtgtctctagagttcagcttatgcacaggcatggatcccgattcccacttcctaccgagcttccatacattgaggccgtattcgaactcttgcatgagcatcatgatctactggccaatgtgtcggaaccgtttcaatttctaaaaagtatgtctcgattctgttcgttaatacatcctgtgcatttatgttgtctttgccgttgaatacctcaaaacacgtgggcttgtgtcatgtagcttggaaaccgaccttgggagaggacaacctgaccccaatgggtagacaggaactcttcaatcatggagttgaattcaacttaacttaccctcagttctcaacctccctccttctatctagccctcaagatcgagtgttcgttcttaaactctctaattcaacgatgtcttcttccttcttcatggtctgacaagaaaggtcgtttcgttcttcgtttcctgcctaaaaaaacagtctcgagagcgccaagtggtttcagatgggatacaacggtaggaactacgccaaccagtcaaaaatcgttcctctcacctccaccgttgccccaatctcttggattaggccttctgatacttgttcgttatggaaatatgactatggttcgtctttactctctccgtctcctcatccgtatactttgtagctaaatgaaaataagaatggctggcgtaatccacaggtctcactgcggtgaacgattggaatgcaatctacctccctccgattgtttctaggatcaacgatgacctgccaggtttcaactttactgttcgttttcctctctccctcctcttttcgattggcattccttttctgatttaaaccgtcaccttatcaactctaatgatcaggctgatagcattcatggaatgctctacgcgtgcgcttatgagacagcagctgttggtcatactccttggtgtgcagtgtttgaatccgaagaaattctagatttcgaatacgagttggacctcttgatgaactatgcttttgttcgtcttttctcccttggtttctgtgatcgaacatctctgttgatgggtatgaacaatctggaaatcttaaacagggctacggacttcctcaagagttaggcccaatccttggatctgtttatgtgaacaaactgattgagcggttaacaaacgctaccggaaacgcaacggatctataccttgagtttggacatgatactacgatcgatttagctttgactgctttgggcttggcaaagcgagttattttctgactttccttgcagttcttcgttgtttgtccttcttctaacacgtgtgtctttatattgactgcatccaataatgacgttgcagagatacaccaaacatctccgcgagcgaaagaggagcgccaaacgcgactcgacgatggatgacctcacaacaagtcccttttgccgccaagatggtccgttttatctctataatcttttgttcccaagtaaacactgatatactggaaggtttgtttctcgcatatggcgggaaaaatcgatagatcactgaacggatctcatgcacttcgtcaaacaccacaaacaccgatacttggattagatttttgttaaatgatgctccgtttccaatcttgacatgtggagacaagatgaattcgtctaccggagcttgtcctctggatgtctttgtacgcccatcctttctttctacctcactttgtctatgctctactaatcgcaaatttatggggaaactggaaggtggaagtcaacgcgccttctttggcggtcaacaagacaattttcgacacggtctgcaacaacataaggaccacataagaatggaatgtatcgatatgttctcgatttcttacaacctttcaaattcatggttcgaaagccctcctcgttttcttgacctttcgtgcggcgcgttgtataattgtgtcacttgctttctttcttcttcattgcaaaaatggataaccaagatgtcacatacatatatattttatactttattttcgttttcgtccaacgtgagtatgaatgtatgtcaagttatagcagacaactacgagtgggaatgggagggcaaagacaaggatcgtcatcgagcaaagtatgctccgtggagtgtgtggccagaggacgaggtcgtggatctcgactcaggctgtcgtacgcttctctcgacgaccgcaggagggctaggcatgtctcctgacaacggcgatctggccgagcacggcacgcagtggttgctctctcgtgattcatggaagcactttgcgtgaatgggctgagacgctcggaaacagcggctgtggatgaagaaccgtacggaagtatcaaccgctgtccgtggtaagtgccgctcacgctcaagctgactgtacaaacagccttactgaccttgcaaactgccttgcccatttcggtgtctttcttcggcttctttcttcggcgtctttctctagattttccttcgtccagatctaccagtctcgatcatctccgcgctgctcccgtctcgcactctcagtcctactcctgactcgcgaccttcttcgccgctcgacggtggagacgtcttcgctggggcgcacacatcagccgcgagcaatcataccacaaggtggcgctctgtctgtcagcaggacgtccacgcaccttcctgaccttcggcgatgccgccttctcgtagtcttttcgtgagcttgctcctggtcctgtcaagatgctgattgtcaagctgagggcctctccattgctctagattcgcaaagtttgggactgtcggacgtcgagggcgtgctccaagtgccatggcgagttttctggaaggggcaaagcgtgggcaatcaaggagtgtagaagcgtctatctagtgggtcagatttgttacatatttgttgtgtgcctgtcttgtgtctcatgatagtgtctcgagtgttgatcgcattctctgtcttctcttctatctatgcttgctctcagactttgtagaacagagatgtgaacacatcgcgcaacatactgcacctagccctgcatcaggagaagaacgaaggggcgagaatgctagggtttgacgctgtttcactgaggctgacgctgagactggcacaaactaaacccatgacccatgggatcttggtggttcgtgatctgagggcacccaagtccaaaagggccaggtatcgaccaccaccgattgcggttgctttctaatagccaaggccatataactagtctgtatagcagacaacgataagaaacacttaaacatggtaagactgagcttggtgatcagatatctgtttcagtaatctttccgcttcgtctctctccatcacgttctgatgcgtttgtgtttgagcgtcaagagggtcgaaacgagaagaatataagttagaatcaagatggaaagaagtaacagaaaggaaagaagaaggataggaataaagaattcttacatgaatgatgatattctccaagtatctcgcagctagcccccaattgccctccctccttccttcttcgtctgacccctcttgtacgccctcttcctttctttcgatgccagccagctcatacttcgccaagaacaaccaactctggaccagtacacctacacttgcacttcttcttcttcctacttcttcgccagcttctccttcctcttcaccttctgcgataccgtaagctaagagtcgtcggtgaactttggctgcttcgtccagatggccaagggacacatggaggttggacagggtgagaagggtgttggggatggagatagcagggtcgtttcctagaagagcgcgttcatgacattgaatggcttccttcggactgagttgtttccaagccagggttagaaaacatcaggaaacgaattcaataaagaaagcgcggagaaaagggatctaccgattcgtattctcatatacttgagcaagcgccgtccacattctgggatcgtatggtctgtttgatattcaagcgaaaaaggtcaagcactgacgttaccaaaagaacaaaagagcgacaaaatagatagagatgatcataccgaagagcggtggccttgttgtaatactgaatagcatattgaggcatgtctagtaattcgtatgtttgacctagaccataccatgccctataatctctcgggttgacgtctacgattaacatcatatcagtttacgtcatcaggacacgaagcatgtcgagttgaaacatatgagaacaacctaccaacagctcgtcgataagcttcgatagcagcatgactgttcttcatctctacgaattcatgacccatcagcgtccatgcaggtagataatctctattcagttgtagagaccgtttaaagtattgaatcgcctttggtctgtcgcctcttgaggaatagaagttccctatatattatcaagccagttcaacgtcagatatagtcattcctgagattaagaaaaataacaagtcgaaaatattagagttaaggagactttacctatcagacaacaagtctctgcccggtttcgatcgacggaagcatacgtctttgcaagctgggcaagtttggtgagctttggaatgacgtatagcatgtttgaatagatatcaatatcgtccaatctaaatgggtcaagggcttgcatattgtcgaatgtcctttctgcgctttcaaaatctgtcattgtcccgcggacgagcgacagaaaaaaaagtaagttcagttgtgaatctctgaggattatatgagaagatacaaacacatgaacataacaaacctctcaactgataggcaaccatccctctcatgctctctccccaaacccaaacttttttattccttcgcccttcgtctgtaagtccgattgagaacacgtcctgctcaagctgatccagagcgtgaccaacaagttcggtcgcgcaatgaagctcgattcgagtgtgtatttcaagaaggtcgaaaaatgggtgaggttgttgttcgttgagaatttgaatgatttgatccagctaagtccgtccattcaacataattgagacataatagaggaaaggctcaatcgtgtgctgaagataggttgaatcactgaggaatacaatggaccaactcacgttctcttcagaatctatgcaacgtgcgagactcagacagcaagaccaattgaacgggtatcgtttcaaactttcgataaaccactcggctgcttcgattcgtctatgaatccggaacagaattagccctttactgtttgacgcacagcgcaattagatgattgagaggtaaggtaagtcaggtaaggccaaggaagacgatgccggcgcacgatggaaatagaatcttgacggacagatatatcaagaatggatcatctgcgtctttcagctcgtctagtatgggctggaatgaaggagctagtcgatgtctatcatcttctggcgctgtgattcaagaaaatagaagcgaaaacgtataagggcatctttcggagggtgtcgcttccgctaagtagagggtacgatctaactcataacggtgggcaggccctcttgtagtcttttgtctgcgctctggaatcgagagtaaaattctataagatcagcatcatttgaattactagtactcaagaccgaaacgaagtatgtgcacgcacaaggtaggtcgcgtacaatctaagaaattcactcttcgcgctccttgctcctgcaagtacaaatgcgcatcgatccaactccttggcttcaaaataacaatgagccaactcaaagatgtcttcttctctcggatctgcaaaggtgcctttattgagactaccaagttcggtaggtcgttcgtgcggagggaagagcccgaagtccacatcgccatcgccatcgaacgcgcctccaacagaagtaggaatgaattcgctgggactcaacaccgacaacgaagttctgcctctaattccttttctagaatctgaaaccgttggacgagagggcgtcgatgtagaaaatactggtaaggccgaagcaagggaggatgaagaagcgattgggttcgcaggtagtcggagtctgtgcgcaagcggaatggcgttgagttgttcggcagagaacttggaggcttgagtgagaccacgttgacgtagctcagagattgactggcgaagctgggtgcagaaattgtggtccatttttccaagtaaatgttcaagtttgatcaggaaacgtttgaacgatattgatattgatctgtttgtcaggaggttcggctgagtgcgatgaagacgggagagatcgtgataaagatgcctgatgagaatttccttgggctgaagcaattgaacagccttgatctcgagagaagatgatactatcaaagctctcagcaggtggtgagtgagagtttgtgagtgaggtgaagatgtttcgatgttgttgacctgatggttgtgtgctatgttgggttcaactgcttttgatgtagattacaaaaccttatagtacttttccatgtaagtaatagggaggattgtagttcagggattacaccgctttgtggcgttacaacaatttgaaccttccttcttcctcatcatcaccaccaaagacagacgacagagaacaacctacacccaccctcgctcttccaccctatctcgtcttactttcctccgacttccacagatgcgtcagttaaagttccacgagaaaaaacttctcaagaaggttgacttcttgaatgtacgttgaatatgtctctccttctctacccttgtattctccgcctgtcctcggctgatttcagttggtcactttgtcttgatgtcaatttatgctctctcgtagtacaagcaagatgcaagtcttcgagaggtcaaagtgatgcgtaggtatcatatccaggagcgagaagactaccacaagtgcgtccctctcaacattcttactttcgttttgttttgtagacctgactgacgccttagctttgcttgctctttcaatcctaggtacaacaagctggccggtcttcttcgtgcattggcccacaaagtttcacaactgcccgctgcggatccatttcgagcaaagatggaagccgaccttctttccaagtgctacgaccttggtcttctcaacttggagaacaaattgtcagatgtcgagaacaaggtgacggtctctgggttctgtagacggagacttgcggtcgtggcttgtagactgaagatggcagaaaccgttggaactgttcgttcttctcattcttccttcgatatttggattcttcgtgtgcctgttgattgactcatttgctcgatcgccataggctgtcaagtacatcgagcagggtcacattcgagttggacctaatacagtcaccgacccggcctacatggtcaccagaaacatggaggacttcatcacctgggtggattcgagcaagatcaagcgaacagtcatgacctacaacgatgaggtacgcttctcacgatcctttcctcttttctcctgctttctgggaatcatacttatcatgctgttcatcattacaccttttagttggacgattttgacctgctatagaaagaacactcttcatttctatggttcgcatgctccgtttccggaccctgtttcattttcctcattgccctggtaccattttggctcttattcctgcttgactctcctcgttgccttcttttcgtcttgttgtactatcattcctcaaccctcatacatacactcccttatacgttctttcgcgtgcttccttcttagagaataaagacacagtgggaacgatatcacaaaatgataaattatcagtcaatcgaaatcattttttgaacgggatgatgaaatacggcggacagccaagcaaaagaataagaaggtaaagataatctctgttgccagagatattgattaaacgactggagacctatccgagactcgagtggacccctcttctaaatgtccttcttctcccttacaccaaaaggctttgaatcgaccagaactcgtcctttgaatccccagagatcgccacctcttccttttctgacggaccggaaaccggggccttcccatgacaagatctctcctggcgggttcagtctgggccagtttacgtagctgttgaatagcaaggcgctcagagtcagaagtcatgacgagccaaggcaggaaagtaaagggaaaggacaggaaagaacaagaaagaggactgaactgaattccattagtaagcatatataacaaggcgaacgccgtgataggtagccattgagcgatgaacaaactgattggcgcctctgtttgtcgtcatcgatggaacaagaaaatcgataggaagaagtgttagatttatcgagaagaacagatgaaacggagatatcgcgagatgaagaacaaaaaaacgaactggaatatcgaggaaggaagacagcagagagtaacatcaaaagtccaaagaaaaatatgtagggcatctgataagagtacagcacaacaaactcacactgttagcatatatatctctcaacatgaaggtagaatctaattaaatacatacaacacgctcggtcaaggaccgatcctcctgaaccaagtggttcagtaaagacttgttctcttcatttcgagcatcaaatgaccctgtaagaaggtcatatgcgtccttgaggaggcagtcccagagacaataaattcaatttagtcaacccttcactcttgaaaatccaaccttgtagtaatccttcgactagcgatcgaagggaacaagagggaaacatacttgtcggtttccatcgaagaagttgttgaacacatatcgttttacagaattaacaccatcctgcaaagcgcccgctttcgtcctctttcccgtcctggtgaagtcagttttgagcgcgcctgtgcctgaatatggctcggaaatcgtgtctgcgtggtcagcccagactgtcgcattccatgaaccgaatatcaagaagagaggttagagacaacatcagaaggacaagaagaaaagcggtttgtttctcaaagccattgtgaatgagatcagaggcagaggaaaaacacggaccatttcggaagaggaacatgaaatcctcgtagtcctcaatcgactgtgcagaaggaagcacgcccgctagtcgtagttgttctgttaacgcatgtttggccagagcggattgtacgacattcgtcctgtcgagcgagtccatacctttaagttgaatttttaaatagattgaaaagtaccatcaaacgtgagttgaaacccacaagactaggaaaaaacatcgaggacgcacagttggttcgaacaatggacttttgaacagatactgggttggtaggactttgtttggcagacagttggaagaatctatgatccaaagtaaaagtttgatcgattcgtcaatatctcaagatagtgtaaaaaagggatgcctaagagcagacaaatcaacccagcgcttacccttgctctttcagtggctgttttaatcggtcaaccaagccctgcactcgatcaaatcgcatgcctttgcattcagtatggaaatcaaagtattcgtaatgagctttttggttacccaaacgttccatcgcatgctcaaaagcctccttgactggtttctcgtagcccttttgattgacaagattgatgagatatacatctccatacatctccacttgatcatcaatatgggccttcagcgcagcggcctatcatatttgagtcaatcattgatgaaaagaacatcagcgctcagccacagaggccaaagctcgaaagagaaaaagagatacaacgaacagtttctggtttatccatcacctgcaaatcaggttgatatctcaaagtattgacctgcgcccagaagaccggaacacttcctctagtctggacataactaaacagttggaactcatccccttttccttcacccatcacaacgatttgttcagtctcgtttgagttggcggcgtggccttccggactgattcctcgggtaaagtacctggtccctgctctatatcgagatcgacgagagatgagtacgaagtcgaatggcttgttgttaacccgagcagatttaaccacgacggctaaagaatttctcatcaacgcaacgagtcagttacatataggacatgacgtgaaattcagatgcaagagcgctcacttccaaaaattaccggcaggatgaatcggccaaggtttgcgtccgggtgtttgatgaagtccttcatcatggccttgttccagaagaacctctcttcagtactctcccaaaaagcgtgctctcctttccctccttgatgttcttttctaaatgttctttctacagtgtttgtaagatctcgctcgtaactgaaccagagccggcctcgacaagcagcaaggccggtctcaatcaaggaatagaggtatctatctctagggtcggataaatcatgtggagtcaaagggaggatctcgaacgattgggcgttatagatttgagcagaaagcaaggtctgaggttcggacacgctagaaaccacaatcaacacgtcgactgtatatgattaagaggattatgatatcaggtctcgggactcgcagagggactggaagtgagacgaaccagtagccaagctgatttttcctaggattccatagattggcttgcccgggccgagatctttcagaaaattctctacactgtctgctcagtcaaaacgttcattcattcatttgtccgaaacgacgcggtagaggaaacaacacaatcagctctctccatccttgttttacgaatctacatgctaaaacagctcattgaacgaactgacttttgaagtacacatccccgtttcgccgacgaaagtgtagttgttcgcatccaacttctggggaggttgctttcgtggcttggatgatctataatgtgatggagttttcaacgttcgaatgaccatcaggtccgatcaagatgacgcgtctcttcttcttataatcctgatgagaagaagcgatggtttgcaaaggataatgagaacgaaacttacaaagtaatctgtcgtcttgaatagctcaagagactgatgaaaactggtagagaacgacatgctgttgggcaggtcaacagaaaggaagcggatggtggttaacggcacctttgctccgttaacacaattgtcgcttgagactgataacctgtccctgttgttctgctctgaatattgatgtctggatgcttttccctcgtcctctatccctccttttctcttagtttcgtgagtgcttatcgttctatctgtgttcataaggactagaaactctagactatttcatgtataacaagaccctgtaaaaagaagtgatgtgcccctcgccggtaccttccagaggataaaggctttcttctctaccggccgtatctatagcttatagggttgaatgaggaaacaaaccagatgaatgacacgaccattctctccatccatcattctaggctaaaaaagcttcgagggagatggaccaagataatgctctagaattttgtctatgtcgttcatcttccctaataaatacagaccgtgtggagagaagaagaaaaacttgaggaaacagatttgatgtctaaaggatcctgaatacgcctcataagcaggggagctctaagcagatgaagcacctagcaggatccctaggcttcatctgataatgatgatggttgccatgggggagggaacgaacgttaatgtctaaggaatgaagacagtgctcaccgctctcgtccgacacgtcatcaattgccagcaagtcttctcttccaagcctcgtttgcatttcctgagaaaatgttgccttgatcgcccactacccaccaatcactcattcactcttcaagtagaatctagctatttggatcctactcgctatccacctgctttcatcagatccttcaagatgaggcttgaaattcaagcccttattgttgccacaattgtcgccgtcgctcacgcaagtgccttctcaggctataccaaagtcccactcaaatctatacaaaccatgtaagtcttgaaattcttctgagttgatctggaccaaacaactccgaaacttattcggctcttattatgtatacggcattatcaaaatcaaagtaccctgtatcccgaccaaaagacaaatgctcgtcggactagtccgatcccacagctgacatgtgtgggttcagcttgtcgacagtacgaacaatacgtcgaggtggtacaatgttcaaacatgggaaatgatgggtcaggtaacatacagtggagatgtcagacagatttgccgagtcctttgaagctgggcagggtgagtttcgcaagagacctttgactactgattcatatcaagagatttcatttgattgttgactgactagtgatcaacgcttctaggtcgaagtctcttgcgaaggatggtctgggccagatgacactgaagtactacaaggatcttgtggcctaacttacacgcttgtcaagccttccggagatattgaccgggatccaaaaggttcccacaaatctcgtaaggactctttccatcaaattgtcacgatcagcgagatgataagtttgaactgatattgttattgtcttgatctgttaaaaataaatatctaggacttgactcattcctccagttcacgttcaatctgctctttttctctattctggcttttatcctatactcaattttaaactcttgtatgagagagcgccgagcttcttctgacggtccgggtagacctggaggaggaggtaactatcccggcttcaatggcggtggtggtcatggtggaggaggaggtggtggaggtaatgaccctcctccgccctacgatccaaatgccaagccttcttctggggccacacctactccagctccttccacctcacgcggtggtctgggtgggttctggacaggacttggactaggtggggtaggtgcgatgggtgcggcttatctcgctaatcagcgcagggagcgagagaggtactacagagagcaggatccaggttacggagggatcggaagaactgaccgatgggattcggatcgaggtgaatggacctcaaggtggggctgggatcgtcaacccgggcagcaccacccaggaagatcaaacggctctggcggctcaagcaatctgggagatgtaagaaccacctctggctttggtggtagctctgtgaggtgaaagtataggttctggacttgattcgtcacttgaattatatatgaattgtatcgtcttaacgtaagcttcgacgcgtcgtcgctcttgtttttcccttaggggatcagaaaacaacgaatcctctgatctaccttgaagtgaagccataacccattaaaaactgcactcggccgatcgagacttgctagtcaaacgatccattggattgtagttgagaatagaacactagtctgtgttgctctagatggatcgctcttcgccaacagacgaggattggcctcaggagggcacgttttgcacgctgaaattactgaaaaaggccgatgggacggaacttcaaagataccctgtggatggagaacggacgacatttggaaggtgaatatccctttccgactagtgatagacataggattccatacagagtaaactgacagcatggatgtgatctatttgttttatgaatggactgctatgatggctttgctgattctttcagagatccttctaatgatgttcgtcagcgttcctttgtctggctatcagttgaatagtagcgagaatatcctgactaatcttcttgttttcgacatcggcgacctttcaggtccgaatctactatcctgatatatcccgattccaatgtgaattggttttcgatgttgatcgcaaggtctggctctatatcctcttttgcccaacgcgtgacaactagatcagactgacgggtcgcttttaatcttggtgcttccgccagcccttcctcaaggtactcggaaagacaggcttgttaatcaacgggaaacaagtcaaaccacccgccgaggtagagttgaaagagggagacacgttcgagatgagaaagaagagatggctactctgcttaccttcggatggtactattcaagcgatgaagcaagttgaggttagagcattcttttctttatctgctttctttacatgtgtaataatatcgttcttcgacatgacgacaaattatgatctgaaaaaggtatcaactcctcgtcgtcgacgtccatccacccggttttctattattccacctgacttaaccttttcaccgtacgcggctcacgatgctgccgctcgactgcctgccagtcctataggctcgctaaaagggctagaaacgcagtcatctacgcaatctttaagaagaccagtgccagagagtctatcatcgcaagatggtgaagaggtaaatcaagagaatgatggacgaaatgacagttctgaagagagctccgaacaggaacaagtggaagacgaaaaatccgaggaggaagcgtcatcgtccaagtcaactgcaactaggattcgagagtccatctggatggtgagcttgactttttgattcctagaaacctggaataaacgcgtctcaaatgatctatattatctcgtatatctgtctaacgcacgccccaatgctttcgttatttctcgacatcagcctcgacggttctccaactctctgccgggtaacaacaaagatgttgataactcgcagacagccagttccatccttcagccatccttgtcagacacacagctggataccgttgctggtagcaagagaaaatcgagagctgaagaagaagaggaaaccgaagtagtttcccatcagcaagcgactccccgatccatccctctgcctgtgtcattagagactccgtatgcctcagcagacggtacacccattaggaaacctctgatgcacaagacaccatcatcgacagctggtcgaacgcctcattcgtctgctaaggctccttctaacaaccgatcgtcactctacccagctctgccccctgcgccaatcagctatcggacggctcaacatccaaccaacactccaatttcaacttcctccgttgaacaagtacctgacgaattccctccaagacatgactcaccaacttctatatcaacggaaatctctacgcctcagtcaccagaggttcactctgtccctcttccgtccatcggaggctcgtctgtcaaacagcttgtagctccttcgactcctggtgcggtcatgcaacaaaccccgaaaaacttgactgctacaaaaggacctaactcattgaggaaggctatcttgatgaggagtgctcggaaggtattgttcggtcagaaagaggaaccggtggtcgtcaaggatcagatgattgggaacgttaagattcgtaggcggtctagtactgggccaggcaaccaggtgaatgtctccttctctttctgtctcaagttcatcttgtagattggaaaaaacttcttgatgctgtgactgatctcgagcgagaggttcgattgtgttcattaaggatgtattcgatgatctaccagccgaacctgtatcctccatcttcgattttgagcccgattcagaatcatcagatgaggaggaagagacagatatcgataaggaaaatgagccgacagaggatgtaaatccggctgctgcacaagcattttctgttggactggaagatgaagagcactctgatagaatcgatgagagagactcagtagagtctcctgaagaggaatacgtagaagataatctacttgatgaagatgtgtccgatgaagattcatccgatgaagattcaagtgaaatcaaggtagactctatcctcagcgaatattgatacgtttgtataactggaagctgatcgccgcttcgctctcttcgttttcttcctactttgatgaaagccaatggataactacgctgatcaggaggtctcgatcggttcgattggcgaatcagaaagtgatgatgaggcgttcgaagaggtcgaaaagaatttgattgtagaactcagtagcgggagcgagagtgaggaagagcagaaacctgacctaaggtcattcaagatcaagaaggaagaaacgagcctagatgatattttgcctccgggaccttccactccgactattttgagaacgcctcaggttggtctaatcttgtgaagtatataaaaaaaggttttccgtagcctgatattgacatatgacacgaatttgtacaggccgctcgaccaattcaaacgagattttacacaccgcaagccgtctcatccgcggatttcaaggtcaacttgtcaagaaacttgggtccacctgttcaggttccagcctctgcttccaagcccagaagtttgaacgcactttccaaggtttggaaagaagaggcagggcgaagaagtagtctgggaccgcctcttcgagtccaacgggtaaggaccgtggaagaagatgtagatgaggagaccaaggatgagcaggaagctttgagaaaggtcggtcgccggccctcctgctattgtctatcttgagtaataatcggtatctgacttctgttcacactatctacgggcttgatgtcttactaaacgaaaggctgccgctaaacgacgagaatctgcaattattcttgcctctgctcctcgacagctacctaagatttcggagtttgacatgaaagacttgcaatcccctcggaagaagcccttggggactcctctagccatcccagagttgaatgattcatcttcagatgaagaacggacacctcttcagcttcttgccaagaaggctgaaaagctaaagaggaaaagcatggctcgacataccttgttgggcgcgactcctttttctccgtccgctccaggtacccccttgagagcttccacattgttgacctccacgccaaagagcattctcaatcagtcctctgtgcctctccttgggtcgcccaatcttcagccttcacgtctctctgcccgtccagagccgcctactccaaatatgggcggcctgcgacatctgttcagcacttcttctgctgttccttctacccctcggttcggtggaatgagatctctctttagggaacctatcgcagaatctccgtcaacatcttactcagaaggcgttgaatcgatattccaattgtccgaagagacgggatcactcttttcggaattaccttctgtggtgaggccccttgcgtctagggacgagcttctgtctctaacggaggagcctttgggtcaggaaacggctgtagagaaccctgacgaaagtctgttaattgttttagaagactcgttgcttgatctcgagcaagcagcggacttcaacatctctggtgcggtgactgatcataaggaaattcatggagatgatgctgaaaatgacaagactcaggggaagcttcaagacaaacgcgatcaaatcgtgggtcaagattccacggaacacttgatcgatgtccgatctactactacttcatcttcgaattcggtctcaatcacaacgggcattgaggttgtcgacgagcacaagagtgggtcaacaatcacgaatttgcctagaccgaagactcgtcagacttccgcgcggtccaccacgaccgctgcttccgaatccgagtctttggtcgactcgagtcgtcctgacgtttcttcacctattgctcctccttcgccgcctcggacccgtcgagcgacatcgagagcagcaagcgagcagcctgcaacaacaacatctacttctctcacttcttcctcagtctcggtcagtaggcttcctgctcgtcgaacgacccgagctgcttcggtcacaccatctgtctcgtcagcccaggctcccgtgaaaccgaccagatcggctggtatggttaggaaaggaatgacgcctgtattgactctagcgtcccaggaacagattgattctaaagcgataggatctaaaacgagaagcggtcgagtgcctgtatcttccacgaccgggaacatggggtcgagggttgtatcagttaaaacagagccgattgaattagaaacgttggaagaggatgaggatattctggagattgaaactccacccgctccatcttctcgagctagaagcacaaagatgaaagcggcaacaacggcggcgaagggaaagaatcctgttagaccgggtgtggcggcgttggagttaagaccgaatcgagaagatgactcttccttaccggtaatcaaaaagcgacgaacgaccacaaattcttctatcgaggatgacaaggttggctctgcttttttttttctttttttcttttttaacgattgtgacctcgttcttaagctatatattttgtctttcattaccttaggagaatgaaacggccaagccttcaaaccgactgctggataactcatcggacgtgatcgctattgctaaatcggccctggtatcaaaattagttcctccgaaacctgtaggacgaacgacgagagccagaacggcgacggctgagccagaggagcaagtttcagaaaaagccacggctgcaaggacaaacacgaggacaaagaagtagcctttttgccctatcaggtctttccctttatgttttcatatttattcttctgatcaaggcatcttgtttcgagcgttgaatatgcttctatatttctttccagattccatctgtatcttattccctttcgattttttgtcattctgtaatcgttgctcttgatctttctcgttatctcccagtctacatatacccaagttattacttcttgaccgaatttcctatctgattcgatttattcaccattaccgcgtctactacctacttgctctcggtgtcttgttgagtgtgatcgtgtgcttcttgtgtctctttaagcgcgcttcaaggagctagggttctgttctttggctaattgattgttctctgatatttgcatctcctggagtcgtgatcattcgtttcaaaaactgtttcttttgctcaggcttatatcgttcatgctgactcttcagtttgatactgaagttagtaacaaggaaacgcaagcgagcaatcttcttcttggtgagcgcggacaacatttagaaatccgaaaagacacgaagcgatcgcccaggctgtgtccattcggaatgaaatctatttgactaattaaatcgcaagacgcccactcatcgaccgacttgttcatccaaccatcatccaacgttcgcttgtacatctcacagaacaccaacatgtctgcctctcgtgaattcgttgaagcgactgccaaggtaggtaattgatcgcgtggtcgtatatcctcgggcctatgtcctctgtcatctctttgctgatgtcgtgctttttttttcttcgtcctctcctggccatcgcagtttcctccctcgaatccttttgccttaggttcgctcatttactcgaccatatcgctcttgaagcgtctctggttattttactgagctttcttcagactgacctttttgattttgttttctcgcggcatgatcagtcaagaatggacagcaaaaccctctccacatcactcttcagaacggacctgaggacatcacgctcgtctcagcctctgctagtttccatgatcctgaaaagcactggaagctcatccgaaacgtaagaacgtgatcttatatccgtcagttcagttcttctcgagagttgcaactgacgaacaggcgctttgatcttgctctgagcagacctcggatcacaagttctcgactcccgttcttggcaactcgaacctgacgtgagttaacaatttcttttcgagggattttaaaggaatggctcaggaaggacaaaggctgctatgatgaggtgaagttcataaaaagcataaaaaacttacatcattattgttggtgttcacgcgttcatttctagtttcccttactctttctattccgagtaagtcattctgtctcttctgactgttttcagcctagttgatcggcaggagcctatttgcttctctccctattgatcaggttcaagccccgagatgttggccttacggtctttgtcgaccttttggatgcctcgaaacagcccttccgggtcatcgctttcaactcgaccgtctctgttcgttcaacttcttcttcgtctcaaatcatgccttcacgctcttaatcaatctctcccaactcataacttgatgaatgaatttcataggttgtcgagcccccatcatcgttctttgatccctcccttcttttcctatacatcatcctcgttgggtttgccgctttcattggaaactggatctacaagacttttgttgcacctattcgaggaaagaaatcctctggatcagctggaactgggaagaaagcgaaggtcgtgcctgctgcggcgggaaagagctacccagagagcgtcaagccttacgaggttcgttcttgatccctctctacctcgctcccttgcttattgcagaatgtcatcacctattccttctgctgacttgagttcctcgccttcattttcgtctgaaacaggaggagtggatcccagccggtcacctcaacctcaagaagcgtaacaccggtaataagctttcagctgtaagcagcggtgacgaaggcttcaccagcggtggtgccggtacgtccggtggagagtcgaagtctggaaagtcaaaaggtggaaaagccaaggctgggaagggaaagagggcctgaagtcggtctgaaattgagaccttaacagagaatcagaatcagcgggatgagtcagaggtgacgaaaggaattgtttctgtcacaactgttgtatgatcgttcgtcacgatgttggccttgagacgaagtgaaaatcgttcatctcgaagctgtcagatatacttctttttgttcatacatgtacatacatagatcgattagaacataaaatccccaagggttctagagaaaaaagacatagaagacgagagtcgaagagtcaaggaggacccgttatccaatcgcacgcctacccagatgatcatagagattttgagcggaaaaaccaagtgagcaaagcctgagtcgactcaaactccatgacttttgcttcgtattgagccgtgttcgggctgagaggtggaactggtgagagagatacctgagatgattcgaaggtagtgatgggacgacgattcgagtcgaggtagtaggcatcacttgggtctagtggtatatcgcttgattatagaacggcgttgacggaaagaaggagaaacatcaaaaaggcaagaggtgagatgacttgacttctattagcagattctatagacggaacgaacgagatggcaatatccctctcaatttcttcagcattcggtatatctcgacgtaggagattgtacatggctattcttgagtcagccgtgacaactgggtactcatccgtgtataggattttctaaagaattgaaaggaaccccagttttttctatcagtgtctagacaaaaagggggaagagcgaagagcagaaggtccgagtgaactctataaaagactcacctggtcgcggagcgcctcaacaaggaatggagatggctgtttcgggaaattaagtcgaccacatgaatagccgactcatcagacttgaactcctgaagagaaagtgaatagaggacataccacacatgcagacttggatcgatacccttgccttgatctactatgcgtcaggaactgttccccaagaatattcaagtcgagtcagagatcgacggatgtgaaagctatgaatctgtatgaaacaacttgcttacgagcaacgcttgggctcgagttgcagcttccaaagccgtgaaaaggagggacaaatgagctacgtgatagtctgctcacaagtaacatactaaacgatgcagaaaccctacttaccaacaaaaaaaactcgtctgaacgattaaccaacaattcaatcaacaccaaatacacagttcgacatctattgaagaagtcaaagagcgcgataaactactactgacctttcttcttctgtgtctttctggtccacatgttttactggaaagaatccgtgttcgactatcgaacacgtcaacatcatacccaagtatactttctgttagtcgtctttccttgtcatgtaacatgtctgtcatttcaatctgatagacaggttgagggaaactgttatttgaaacaactgaccagcagggatgaatacgaccggccactctaatcctttcgctctatgaactgtagagatcacgacctccttaagaatcaaagaccgataaagaggcatctggtcagtttcaagacgaatcgcgtgggatactcagcaatatacatacgggaacctgctctccaacaccttcttcaatctcaccagggaaagtcttgagcaagaagcgtgtcaacgagtctgaacatgccgtctgggcattctgcttcaaggctctcatctctttcttggaaagctgaaatttagtggcgaaatctttaagctccacaatgttcttccagctcaacacttgatctggactactatcccagatgagctccggacgaatcacggcgacaacatagtcgatcaactggctgatcgtcgcccccttcaatggacaaaacagagaaagaagaatgaagcaagacaatctattagctgcatggacataaacacacactctccgggggaatgctacatcaacaggtggtctacggacttcgtaggcgaatttccggatcttatccaggtcatgaagaaacgaggttacaagacttcgttctaacccggtcagttcgagtctcggaccccgaagatacgtcattgacggaactccgtacttctctgcgatgtgaacaatctttttggtcgtctgtgtgtttgatatcataccaatatcatgagagggagagggagacatagttagccccaagacagagtgaaaaaggaagggtctaccatcgggagaaagaatgaagagacccacaagaggttcagaacttgatgcaatcacatcaaacacatgttggaaagcagactgaagctccaagacattcggcgttagcactattatctaactcatcatatagagaaggcgacaaaatagaaagctcttccatacctccacagtctcatcgtctattaaacgcaggtacgcgatgatcgcccgaatctgcggtctgtagtagtacttgtcgagtgagacgtaaggaatccgataagcttcgattacaaaagcaagatgaagagcgacgaaaaccaagaacattgacacaccctttggtcgttcaatatccgacagggaacgttcagctcttttagagcttgctcgatcgctcttgactgggcgttatatcgcactgttcatgcccaaagactgtttcaacgacgggtaagaaaagagaaacccgttcgagaaggtactgactaagaatagcaaagtcactgtactctaggccataagcgatcttaagcctgacaatctcctttgcaaagaagtgggtttcgtcatcagtccgatcaaaacactttgtaaacacaagtttccctcgagggtttgccgtccacagatctaccgatccagccgaaagagagaagggggcatagaagcaaccattgtgtcagatgggaaacaagtatcttgaaccaactacgaagaacatacgtttgtcaattctgtgaatgtctttgagacaaaacaggatcaggccgaaggtttgtaaggcgttcagtaatgatacgagatcaagatgcatcagcataggagcgcgcatgataagtatatagattctactgaccttgagagataattccatcagaggctgccacgatatggccggtcgaacggtaattctcttccaacaaaactcgggagcaatccggaagatctcggtacatgttttccatgttctctttgacagcctagagattatgatttttcgccccgcgcagagggtaacagcagagaacggaagaagagtacatctcgtcaggtgtccggattacccgagaccaatacaaaaatcgattggggaaaaaattaataaatatctcaccgatcgccagccataaatactttgatcagggtctccaacgacggtcatcgttcgttttgaatccgtgaactgtctataggaccaccgtcaagtaagaaaatcagtgttggtacaaaatgctaggaaaaataacaaaagtcaatgttacttacttagcgagcttgtactggatggaatttgtatccttttggatgttgattggaacccacaacagaaaaaaaaatcaatctagggagatacacaagaaggatcagaagtttgtacctgaaattcatcaatgaagatatgcttgatattgcgtgttactgcgagaaaatatgattcatgagaacccacaccgagcaagccgcaagggaatgtcagtgtcgtatttgagtacgcttttaagatattaaattaacaaaacaatcgaggacaaacactcgggatgcctttcgaaaagctagcacgagtccaaatagtagagagacggatgaatttcggttcgatctctcgacaaagcatgacaagatgcaagatggacgtgcttacgtcgaccgcatagaccaatagatcatcaaagtccagctgaccccttcttctcagctctttttgatattcaagatatagctgcagacagaaaacagacatcatagattacatgagtcaggcaaaatacttttttcccccaatattgagctcgacgtgccgatggtcgagcaggaaggtgaaagtgtctgaacataccaactctataacgctatccaatttgggttctcgctccgacatcttgatggcgctaaccatagcgagagtaggcccggggaatggaactgatttctccatcttcatgatttttgatgtatttctccgaatcagattactcatcaggccaaacgcaacttcttcatcaatcacttggaatgttggaggaagtccagcctctagatgatattttcgaagatatctgaggcatactgagtgaaacgtccctataggattgttgaaatactctctcttttgtcagctgaatgtctgtcatgttctggctcagactatggggaaagagaatcgaaacgaaccaacgacaagtttagaagcgacatcgcctcccaacatcgtgtgcaacctgatttgcatttctgcggcagctcgcttggtgaacgtgacggcacaaatactctctggtttgaagccgtggtgtttgatcagatgaatgatccgggaggttagcaccctggtctttcccgttcccggaccggccagaatctggagaggatatgcgggagacgtgattacagctgaagatgagcagaggcgttttgagaaaaatgagcattgtgttttccaggcgtcatgattctcgatcggctcgtccgtctaatcatcagtaagatagagggaacaagagtagtttcgcttcttagagaagatatagcgaaccttgagtttgagccgcattaagggattcgagatgtatcgttcggatcgatggtctcaaagacaacataggagaacccctcactcgaaagattgacagagagcccctcctaggggctatcctgttgattgagcgtagcatgggatctaccgatcgatgtctgtagcaatgagagaatagataacggacgagcagaagagagggaacgaggacgcgtcgtgagataaattaccgttacgtaagcgtgcagggctggttttgttcctttaagcattagaaatatttcggatatcttcttagtctttttgctcgcggactagtttatagttttaaaagcagtaagaccaattttttttcttatttagaaacccacgcagggcctaacgatgagggctgccaagaacacggcagacaaaaagacaaaagaacacaaagacgaagcagctcaaagacagttttatcaatcacaagtctatcgttctacaatcacacttgaaggaagatgtatcggaaatgaaaagtatggtactgattcgtatttcttttcatgagagtattcaagactgtattgtacaaagaacactttcattagtcaaacgctcaggcgtcttgtctgggtcgactaaaacaagaaacgtctggcaatgcgctgctgtgcatcgatcattcgcacggatgccacactagccgctggacctctttcgagatggcagccgtagcgatcacgagctgcggacaattgctgcgcggattcgacgggcggtcaatctagtttgctcttctcagcagggccgcgagagacccgcgagagctctgagaccggcaggtgaaaccttcttgaacggctttcggcgaatgaattttcgggcgcagtcgcgttggcccagctgtctcggtcattcgtagaatccttgggtattcgcttcgcctccctctcgtcgttcctcacacggacagactctggcccgtgagtcgagttccggaacatataagatggggatctccccgggaggcacgagcaccggcggaataaaagttccgaaccttactcctctcctttttacatcattttatcttataccttctcattctatatcatcaattcaattttacccttggcccactcgctcattcacctactcaagtcattctttccatagattgctttcttcacccttccattcttccttcttctatttgactggctttctttgaagacgcgagtaggatactcaagacaagcactttcgcatactcaggatggctatacctgactccacttcaaactctagggctagtggccttatggattccacaacggcggtatcctcagacacaactccggttgtctcccagacaaagacgctgctcccaccgagttacctcagacggattccggtcccatccttatccccctcgctcgacaatatgtctgctctagcaactcagtctcattcagatacatatccggacatagacctcaataccctaggtcgtccggtctcctcactcgtccacactccttcggccgggtcccgaacgcccgcctccctctatgcagacttcattccgatgtcaaatccgatggcaggtcggtcgggaagcccttcttacgaccgtcaagcacaaactccttcacctgccttcatgtcttcgccaactatgtctcacaggctagccccggatgcgccgtcagatgaaatgcatccgacgtatccaccctctcccactttacaagattttgccgccttgaaatcgtcctctccgaatggagcgccgaacaagaagcttagtgggtttatttatcagaagaagatgcggtctggccaatctgacagcgcatcatctgaaagtattcagaatgcaggctctgctggcccattaaatcccgagtgagtctgatgctagatgtttctccaataatacatttgtcatgaaactgaaagatcgttgaacgtttcatacctccgtcgtccttcattcaagggacacatcgacgttgcttcggaacacatcgcaaaactcttatggtacaaatggtaagcttgaagcttttgtctaaattgctcctcctctcgctcaaatgaatagttttgcgttccgcaggcacccatcgggccacatcgacttcgagcaaatcgtccaaacaaaaacttccaaatgtcgaaccgttcacaaagtacaacattccctcagctacaaagctgatcgaggcgggcgaatgcgagatactgtcagagttgggagagagcgtgaagttttctgatattcttgctgaagaaaaaggctggaaaacggctgtgttcttcattcgtcatttctggtgtggacaggtgagattctctgaagcctgcgctctttttactgcgccctcggcctactcaccaatgtttctaaccttttcgctttacaaacgcacagtgccaaaactttatgtctaactcgatacttcagcttgatatcaacgttttgagaagaaatcggatcaaggtgatcatcatctccaacgggtatgttctcaaggttttttcgtgtctccttactcaaaatgtagacaattcctcatctaagtttgctctatttctttccgcttctcctcctcaagacactggcagattatcaaaaagtatcgacgtgagtcctatgacctctatgtttcgatgcctctaaggcatcttttgttctttctcaactaaatgaagcatgcgccttcgatgttaattcgctttctctctttcctcttgtttcattagatctcttccattgcccatttccaatctacgtcgacggaccccgaaagctgtataaccgcctgggaatgaccaaacttacgaatgatttcggtcccctcgcccaatcgaaacgaagcgcgtacaatagagacactgtgcccatccaactagccaaaggcatcggaaatggcttgttccgattaccacttcgtgacatgggtaaactcgttcaacttggaggagagttcgtgtttgacgacacaaaaacttgcacgttcgcgcatcggatgaccaacacctcggaccatatggaagctgtcgacctggtcgccgaggctggtgttgatcctgccgaattcacatgtctgcttacccctcgggcccgtcgggttgagcttccggcggccacttcatcgtcaggaggccaggccgatcgaccggaagagaaaccaaacatgaaactgacgctagacattcagtctggtggattcgcttccgagtttgaaaatgagcctggttggcaagatcgaagacaggacgagctttcgagaatcagagcaaaacgagaagaacgtagggctggtagactgagatctgccaaagcttggactgcaccggctgatattacccctggcgagttcgatcatgtccatatccctcgattaactcctacgccatcggagaagagtgcagcggacgagtttcaagcgggtgaaccagctcgacaggcagagttgatggctatcgccctggcgatagcagaagaagaggaggaggatgagaggatccgaaacgaggatttagaacgtgttcgggtatggtctgaggaagaacaagacgcctaccttggtcgagcgatcgtggtcgatgtgacctccgaagccggttccgaagggcagtcaggagagaagacgagggctaggttggatagcatgacgataggtagcgagatgggcagctcggttgacgggggatcaagttatcatcctgagactagatcggcgaggttcttgagcgttggcggggacagtttctccagtggcgcttattgatgatcgcaagtttctggcaaacgatcatcttcgctcttcttgccgctgctgtcaatttcttttctttctcatatcaaaactccgtcttctttcaatttagtctcgctctgttccgttcaacccttgtttgattctctttttatacctatttatccatctgtctacttagcttgttccacttccttcttgcttctgtaaactattgatcttgtgtttcttatttgccttatccgatttctctttctgagttcgcttttcgccttcttgtctttcttttctctgctctctcttcttgcaggccatgctatcctgtacattccctcctttctattaaaattctacaaggtttgaattcggaatggatcgtatacacacaaacattcccagtcgttctctctttctaatccccctcaacttattcatttttgaatattcaaactacaaatgtgaggaagactatgagaaacgtctattttattgacttcccgcggcccgccaccatctggaagaacagaagacaagattcgagagttatgtttcagcgctttcttcatagccgacgtcaaatctaaaacgatgatccaatggcaagcccgtccagagggcaaggttgttaaacgcaaaaagaatcaaacgtacctcacaactttctcatcaccacccgagacgaatctctttccagtcttgctcatatcggcctccagaactggtctccaagcaacaccccaaacttctgcgttttctccaaaagaacccaggcagccgcctttagaaccgccttggccgccagctcgggtatcccatagacggaccgtcttgtcggatgaaccggacagaagtctgttgtcgtgagtgcaggacagggagagaacccatgacgaatgtccggtcagagtcgagactcccgatgaggatttaccactagagtgtcggatactgtcaacagaacaagaagaggaataaagtgcgttgagttttcatctaggacaccgtcgtcaaggtgggaaagggccgaagaagagacgcttactcgtgaaggatgatagatttgtcgtccgaaccagaataaaggaactagaaatagagcgccatcaagcccatctcttcgttaatttacatgtggacacgatttttgtacgtgggctgaccgggaaaaaggaaagagaaagataacctacttgaccatcagggctccaagctaaagctcgaacagaaacgttatgagaggaataagaagcagataggtgaccggattcaacgtcaaagatgtagacatgtccagtttcggaagcgagagctactagtttgccatcaggactctgagatgaatcatagtgaggatccaagaaagctcatagagtgaggatcaggccagctccatcttttgatctcgagacggaaaggacatgaacttacaaacttgcagttcattccgaacttttccctcccactatcaagcaatttgatttccttcccgaacccatcgcctacctccgcgttcctcaacgcgatctttccgcctgccccacaagccgcgtagattttctcctccgggtgtaaacttacactccaatcgactcttgttgatttcccttctctatccgaatcagattgaaaaaaagattcatgtgtactgagtaaagatccgtcatcgagggaatgaagcatcgttgtaccatccacagaattcgtaagggatctagaacctgaaggcgagaccgatagagagacaattcccaatgcgtggggagcaggagcatgtagcaagtttccatccttgtccctgttaaatgacaaggtttcaccacaaaaagaaaaacaaggtatagggttgagcgactggtctcacgtaaaaggcatacgagagaaaataaagagtgaaagaatgcgtgaaagatatacgaaccaaactcggagggaaccatctgcactagcagagacaacctgatctttacccgtccactctacaccccagatggcatcctcatggcctattcaagagtcccatataggcgggatcaaatggtataccatccggaggtcagacagctgaatggataggtaggcgatcgagacatcggacaggacatacgtttttgagaatcatgtgttggaacaaattgcacagactaaatcgatcaacagatcgataaatactcaattttagttaacctttcttaaaaattcggcagagagagcaacaccatctagatcaataaaaggcttgtaccatgttcagtgttgaataagagagacgaatgaaatattgagaggtaggagatcgaagagatcgtagttggaggttttgttgatctgggcgcaaaaggagattgaggatttttttcccttggcgatgacgatttgtcctatccgagaagcttccagaccatcagttgcaacttcggatcaacacacaagggggtataacgtgtggcattcacatcttgaccagtcggccttgtgaatgatagcaacatattatcggtagagaaacatctagtctatatttgtataacctctcttggctaacttggggcgtaagttccacagagtgggaatcggccgtgacgaattgtacaagcgttcatgataatatcaatgtgccaaagtagattcaacacgccatcacatacgtctcaaaatatcaacaaacaagatcatatcatatggttgcggcttgacttgcaaacaagaataccagccttcatcaagaagactacagcgcatgcttcgattgctttgacgataacagacacatcgcatcataaccgaagcgtctagtgagattgagacgcaattttgatattcatataaccgagccaagattctattacgctagcataatgtcgactcggaaggtgaatgcatctaattctgaatcaaagatcgaagaaggcttcgattctcacagagtgtttcctaatcctcgagctctcttttgattttgtccttgacctctttcaaccccgaagaagaggagggcatttcaacgtactcttctccgttgagttggcacgaagtgaggaaaaacgggcagagttgaagaagtaggtggagagactgaagcgcttcggctggatacatcatagaacaaaaacgccaacagatgagatgagattggctcgacatcgtgaggatcaagggagaagcaagagaagatttgacacgaaccgaatgagacttccactttagaagacttgacaaggacacgtgcaacatcctcgatcggcattgccttcctcctctgcccacctccgcctagagctgatgacgaaggctgaccgaacgaagatgagagagacgtcacgctggatgaagtgaatagcctacagattaacgtcttgcaaacaacatcagcattcatgttactcgaagcagcatatcgtctcatagggaaagaagaagacagcttgatactcacataaaggcggcttcggcaacatttccgagtcggctcagcatactccttctcttcaagccttccatgtcaactccctttcctccgacctggacgctctttatagccgaggtaggcaagagtgaagtgattccggccgatgcgaacagtgctgccgaagacgcatttgctaacgagaccgattgagacttggcagctattcggtcccggagcgcttgacgtcgagccgccgcgctagtcggagtggttggttcaacacagggtgaggtaggcgctgatgatataggtttcgaagggaaaagtaactttcgaggagacgaggtagctgccgatgacgtagatgcgctcaacgcagaaccgtcacagggactagcatcttcccgttgaatacctgctcctattctggccttgggtaggctttccaaccaggctttaggaactggccttacttccctcccttcattttcacatagattggcaaatctttccaagcgatttttgaactctgcctcccgctcattctgttgagcagaccatctaccgatggcgccgatgactccacctgtagaagaagagtggttgatgagcaagttgaatccatacgtgtaggtgatcgtcctcgtctgtttggagagcgttcgtgctggagtgatggagagatcacaaagggaagaacgagcagcctccattgggccatcagaatcagagtgctcagaagatttgaagggtggccctcttccatcccactcccaaagccaaaccagtcttctcaaatcctcgagcgcgaactttcgctgagctccattctccacggtctctctgataccactgaaaccttcaaagttggcaattcctttgaacaaaatagcctcttcctctaatccaaagggatcacgtctgcgcttttcgaccgaccgaggaggaagcacaggggggtgttgggcaaggtgtagcgagagagtgagagacagggatcgatgcagcaacaacagagaatggagactggaaggaagagaagatgcgcggcaagtagacgagcttggggaaagggaggggtcatccttcctaaacgaaactgaaggagaagagagacaggagacaggtgatgaagagcacgaggtggtagaagcgggagaaggaggcaatgttgaagaagaaaacgctacccgctttttggctctaggggttgaaacaggggagcaaggagaggaaggggtgattgagagggatggtgtcgatgaaggggtgtgtttgttcgacggaggggtaggtagagctgatgatcttcgtcgatcaagtgaaggataataaagatgtcagaatcatgacaacgacaacggtgttatgtggcgatcagaaatatgcttaccttgtactagttttggatctcttaggcgtctccagcacacattcaggttcaggcgagagacgtcttttagacctagtttgtctgggagtatcagggacagagtatatggcggtgagactagacgacataattgagctgaggctacggttgtggcaaggatgtatgttcacgaaacgaataagaggcgggaggtaggaagagtgggaggaaaggtagagatgtaggaggaaaggaatgcagagagggaggtgacgcagggagagaagaaagaaataagagaaggggacgaggaaagggaggactctacgacttgggaataatgaagggatatgggatgaggaggattacgggtgggaggatggttgtatgggagtaagagggcgtcggagggagctggatgacttcaaggtagaagagacattcaatcaaacagacggaaggatgtagaacatcactcaacaaacgcggttagtcgcttgcttatctaagtggtttgtgtaatatatgaatccaacttatacctgaattatgtgcttccacaatcacatgatttgaagcaacaccgcttttcttacccgccaaagaatttcagtcctaactaaaccgagcgacatactctctgctccaaagacactcttgaccgttggcaccgtttactcccccacacgcacaaacacacaccaaacagtatcatcctgagtacctctctacctaaaatgcctcgagtcaagaagtccaaagaggtcagacacgatccactcggcgttcagctcgccgaagacgacctcgttcagaagtttggaagagtcaccaagcctggaaagcgagccaagaaggagaaggcagaacttgatgaggcaaatgtacgtgtagttttatcgcccgcctcagctattcagtagtctgaaagggtttagtgtgcgaatgtccgataccgaggtcattatgtggtcgttgaagaattcaaacacgggcgatcagaatgttatatctaaactgatcagctcatatcatatcttgatgttgatgttaatgttaatgtcggggttcggttttgttctatcctcttaggcagccccggatgcaaagctttcccggaaaatcttggatttggcccgagaacagcaggatgaaatggatgagctgctcgatcagaatgagagtaacccggtcggtcaagatgaagaggaagatgacgaggctcagtaagtcacttctctccgtcacctagaaacatttatatcgtctatgatgtctgtatatgtagttgacaagatttccaaaacactcatatcgtaggactataagtttccggtctaagaagtctgatgctcgtggagaggagccgtcggacgatgaggatgaggatgcctatgtgtctggagaggaggaggaagaggagtacgaagagctcgttcgttctcccattctggtttcacgctggtctcatgatcgcgagatcatcaattggagcatattgaaattaatctctgtgttctcatccctggcatgtctcaaattgacaggagatcgacccggaagatcacgctactctctcagcatacatgcaggattccctcggcgcctcgtcaaatagaccagcaggtcaaaccttagcagacatcatcatggccaagttggaggagggagcttcggctgaggctgatgatgcaggtgctaaaggtgttcggtttgaggaggttggagatgggctggacccggcagctggtttgccagtcaaggttgtcgaagcttacaccaagtatgtttttctgtttctctaaaactctggtgccgttccttcgtggctcctgccatcctgctttctctattaaccgatcaacatacttctgactttcaggattggggaactcctctctcggtacaagtctggtcctctccccaaacccttcaaactactcccttcacttcctcaatgggcccgacttcttgctatcacttctcctgctgattggtcgccacatgcaacctacgctgctaccaagatctttgtttccaacctgaagccgaagagtgcgacggtgttcctcaaaggagtccttcttgagcgagtgcgagacgatatgagagagaacggcggaaaattaaattaccagttgttcgaggctctcaagaagagtttatataagccagcagcattcttcaaaggaattcttttccccctttgcgaagtgggtccactcttctctcagactaaacaacaggataaacccaacatgtccagtagctgatttaattgtctttgcttctaatctataatttctacttttaaagtccggatgcactcttaaagaagctgctatcctctcttctgttctctctaaatcttccgttcccatggttcactccggagctgctcttgcgcatcttgcccaaatggactacactggtcctaactctctcttcatccgagtacttctcgacaagaaatatgcgcttccatacaaggtggtcgacgctctggtcttccacttcatcaggttagcgaacgacccgaggagtggtctgaagggtgaaggtggtaaattaccagttctttggcaccagagtttattggtgttcgcccagaggttcgttcatcgtcttttcgtccagccttcttgtttttatttgtctcatggacgtttcgctgatctacaacccgaatcttacgtgccgtttctctcgaacgaaacacaggtattcctctgatctaactcctgaacaaaaggattctcttctagacgttatcagagtccgacctcacgcactcataacacctgagattcgaagagaactcgttggatccgttatgagaggtgaggctcgagctgatgagatggacgaagacgctatgatgaattaagagttttagatagagactggacgaatggacggctgagatgatataagcttcatgtttttaatcgacaatgcgtttttcttatttgtgtcaggcacgatttttattattgttttgcgcacttctagagtttcttgatatgccaccttgtcttaatgatcagtcaatcaactaacggcttcaaacagtggaacatagtatatatcggagaggagtataaaacacaatgcaaacaattattaagaaaagaagatacatgggaggtattcgaatgattgataccgagttgaattaaaatcgagattcatcttttgaatcgtagttcgtatcgatcgctccgagtagaagtttgactagccagagttcaggactaagatcaactccggtctttcgcttcatctcatcggcctcactttcgtagtttgaacagacatcaaccactgataagaaacgcatgatgtcagtcttgacagttctcttttgctctgacagttttgtattattattattatatttataataaacaaaaagaaagaagacttacaccctccgactaccggtgaagcatctaacgtagctaaccaatctcgagctttgaggtcatttccgacttctacaagcatcaaacctcaagaaggctcagcattctagttcccagccaacagtactgaaatttaagaacagagaaatgaacagaaaagaagaggtcactgacgagcgaacatgaacgatacagcgtctggtccgtatcgggactgttgaagttgctgagaggcctgggtgatgactttgaagatacagtcttgagcctagataaccagatgtatggttgaaatgcccacaaatcagtcacggaaactatcaaggttttgtttgctaaggttgtatccaccataagggggggaaagaagaacgaacctctccggcaggcgttccatctgtgatcgaaataatcaacataggcttcctgagcgagccgtttcgagcaggacctagcaccataggctggaggaccttctgatccaggctcgttcccagcggggtgaggccagagaactggacttgtgcgacgaggcccatgacctgttgatcgttcgagatgttgtttccctctacaggactattgaggaatcgaacagaaactccgtcctgatcgaagagtccggtggcgaacgcgatcttctggaggatcaacttcagctctacaattcgctctccgttctcctcgaatgccatgcttccactgtcgtccaccagaatagcaacatcgaacagagccagcttggcgagatcgaaagcaatttctttggggattctccattcggcaatcaaccgatcaagtacacccgcatgcgcgattcgttgggcaatctgggaggttgcgccctgaggatagaatgcatgtaatttctgatcgccgatacattgttggagaacctgcgccagatggttgggatcaatctgtccgcttcctcctgaagcgggatgaggtggataaccgccgttcgatccataattagatggcatgggaggtgcagactggttatatgactgaccatattgacccgaagtaggttgagagtacgaaccatactgcccaccctgctgaccatattgctgattaggttggccgtatgactgtccggtctgaccatactgctgtccagtttgaccgtattgtccagcctgctgcccagactgggcgtattgagccccgtgttgctgagactggccgtattgtcctgcgccaggttgagaagaaggctgctggttatagaagctgataggtgatccagaataaaatcacagcatcgataattcagccgcacaaaactggaaaatacttggggcatgaaagacaaatcaagacacacgattgagcagatccctgattctgagctggttgtccataagcctgttgtggctggcctccatactgagagctagcgggttgcccgtatgattgttgactatccattgtgtaaaaatgatggatgatcgatgaatggtgaatcagtttagatatcagatgtagactaaatagggacgaacccatatgcagtttgttgatactgttgttgttgctgttgctgaccgtatgaaggctgttgactgaacataccgaacaacatgatgagctactgaccacaggtgtgtcactttgcatagaacaacgaagagaaacttacccataacctccagtcgcaccttgttgggctataatatcaaataagaggggcctgtattagtaacttttaggctaaaaatccaatctgtcgagcatgctgcactcacgattcaccatagattgtacggcagatgcggcaagctatggttgacgaccagaattagtatcaaatactcgtcccctggagaaaggtaaaaagcgtgctccaaccatacctttgcggcgaacttggactggaggttgacatattctctttagtattggaacagacaagttttgagcaagatggcgaattgaaacagactgaccatgttgtgctagaagaatggatgagaaaggctaaagaggtgggcgaacaagatggatgagactgagatgagtgatgaaatatatgtagccggaacccgggctgtgtatgtgtagctgggtgggtgtggaggctgttcttggcagagaccatacacgtgtggttgactggctgtgccatttcaattatatatgattttcatagccgcgaccgctcattcatatattgatttatactatagagaagattggagaccccgagagaagagatgtacccagaacttgcagaaaagtagtaaacaaggtggtgttttagagatgtacaggatatcaagctagtttgagatgatatatccatattcacacacgggtaagatatgaagaacagacatcagccaagtctgtgtacgaccatgaggaaggagagaagacaactaagtatgagaagagaaagacaagaaaggaagagaccgctcaaacgcttacttgctcgcaagcccacggcgcaacgaggtagtctatcctactaaccggtaaacacacccaggtgcaaagatttatctgacag

SEQ ID NO: 1824 - DNA, 1608 bp, Xanthophyllomyces dendrorhous
cgaagggagaaggaagaaggaagagagactgtaaaaaaaagactacagaaatgattagaaagcattagagagaagactagacaaaacactagggaatcagaccacagactagagagaggactgggggctcactgaatcagactgagctctatcgaacgaccaacagagcatgcacacacatccacacactcattcacactcattcacactcattcacactcacacatacatccacacacatagactggagggaaaaagcgaatcagtcggagcgcatgttgctggttgtcggcatcgaggccagggagtgtgttacgatccggattacaaaacattacaatacacactacagatttcatcagaatacattacaatacattacacaccgttgcacctaccattccgttctcactcactcactcgctcacatgctgaccatgggttgatgggaagactgacattctcacactaacactaacagtaacacactgatacactaacactctcatggatctcatttgttgtcgtgcgactgacgtgatcttggagtctcactcactcactgaccttatctactcacccacctagtgttcggtcagtcaactagcctgttccttttttcagccctcagtttcagcccaagcatctcacatccacatacacgtccagaagagaacatcccgatgctcggagaaagaatcaaacatttcagagcacacacaaataaacaccaacgtccatacatccacgcttgcactcacactagcactcacactagcactaggtcagcacctttttcatctttcccacgttatcgccttcatcttctctgatcgtcctccctccggccgatcccctgtttttctgttgctaagcatggcacatggcaggacgaggcgtcgctgtctcggctgcaagaggaatgttctctctcagccctttggtcttccctacggcacaacctcccttccctttgtctcttggcggggggagtgagcataacaaatagacgaggcaaacagagaaatgcacagtatttccttcttccttcttccttttctgtttcttcttctttttctttctcctttttcgtctttttttttcctgcatcccttgcacctctctttcttatctaactcggccagcttttttctttctgtctttcttccttgcttgcttttcgtcctcacccactcatcctcctctctctttgtgatctcctcgtggccatgctcttttccgtatccgcgcttttgtctaccttactggctcttgtctccctgcccctcaccatggctgtacccgccaaggtgcaggcgtcgcgagatctgcggccgagggcttccacgtcagcatgcacttgtaagccccgtacacgtgatctcttccaggccacaccgcgcgtactgactcactgaatcaaatcattctcgccttcaaacagtcccatccgcccctttttcttggtctggttctctggacccacagatacgtgccccgatatatttggttatatcttgacaagctctagtgcaagtgatctcaacacgtacaagtgtgtgtatctcattacgtgagtgtcaacatctttttttttttttttttttt

SEQ ID NO: 1825 - DNA, 3805 bp, Xanthophyllomyces dendrorhous
ttttagtgggatcctggtatcccagatcttttgtatgtcttactgaagctcactcttaatcggctactttcctcttctcgctttcttttccttcttttccatctaattttctttcctctctctctctctcattctctctttcccccctcgcgcaatcgtcggtctcttcagtctcatcccagtcacatgctactacagcacaaccactcttgctcctacaagcggttgctctggaacccttacttccgtctgcagcaactcgaagcgctcatctgtcgaacgagctctgagtaagccggtcgatcagatccgaaaaagacaatggagtcgtgcaaaggcaaacgcggttgttgcctgggattgggagtaatcatagatcgccagagtagtacaccccgctcactttctgctctttcttcttttctttctcttcctcccactacttgcttctttgtgcttttctgtgcttcttcttccctttatctttatttctatgttcttctttgtcttgatatagcgggcattttcttgcttaatctttgtttatgtacatatctctcgtatccctttcttgttttctactgtgtcctttcgtgtttctttggttttatcttgcctgctttttgcttgcactggaaacaagtcctccttctttcttcctctcatatacttctactcgtctgcttgtctgctttcttgcttccttgctttcttgcttccttgctttcttgcttccttgctttcttgcttccttgcttccttgccattatctttggtactagtttcatcactcgttctcatctcggacctcttgtgtctatagaccatcaaatgagcatctactatccaagactacagagcgccaaacagcccaccaagcaaaaatatcatgggccggccccgctcgctctccgcagtcaccttctctcccactccacccaaacatcctgctcgtcttctttttgttctctccctcgtccttcttcatttttcaccctcgccctcttgttcgttccagctcatctttcacattcgtactcgcatacgcaaccccaccctctcacacacagataaccccccttcgaaggcagaggaaaagccgcttcctctggttctgtcgttccttccgatctgcccgctcggcttttacacagccagtcatctccgatcacacttcaacggatcttatctccttggtctcgtctcgttcttgccttcatatagcgtcgtctgcccaaagtgtagcaagtccctcccctgttcttcctcgcccgatggatgagtcggataggacactggagattccgaaaaatatcctcttgggctgtttgtcactgttccgtctctattgtcctcgcccgcctttggtactgatcgttgcccacgttctctttcatgctcgtccttgcctttctctcaactcctaacaaacacacccccatcctcatacacgcacacgcacacactcacacactttttctcttccctctctcataagatgacgatggtgacgtcaggttcgcactcccttgggtcgaccaagtcgacgaaccgttggctgggctgacccaaccaggcttaccgaccgcctcgaaccccaaactcgcgctctcagactaccaaccggctatcgatcagcccgccttcggtctgacggtccagtccctggaaaccccattgaactcgatccccgtgcatccctcgccttcagcctacgagtacgagcccaccagtcgtcagtccccggctctcctttctatcgtattatccttgttgtcggatctgtccattgaatccaagattctctggttacctcacatgcatgtgtttgtatctgtttgtttcgcttcgtgtctctattcagatctagatgggccaaagatatcgttttctggctcagggtctcgttcgttcccacttggtccatcagactatcaagcccagccaacaaacgttcaagcaccctcctcctcgtcatcatacccatcggccatcccgttgtactattcactagacagttggtatagcccacagtcatccttccctccctcgttccatccacatctcaacaacaaccacattctaccgagaggcacaacccaacggcctctcagcctacagaacgtctacccaaccccggtcactcggttccaaccagcagacccctacgccgtcgactcgagcggtctttcgaatcttcatcaccgtcagccagagctccgttctgaatccccgccatcttctacgaaatcactagattccctgtcgtccctctcgaacgcgacagagggcgggctgacgtctccgactaatcaacagtccatctgggtgacaacctcgcggccgttccctcccttccagccggctcttcccacccaaggctcctaccgacggtcgaatgagcttgctccggtaccggccgcaaagcagccccggctatcacatatctccccgaactgcaacaaggtcctgggcccggccaagcggacgatgatcgcctgcgagcgttgcagactacacaagcttcgttgtctaggagggacgccctgtggcgcttgcgagagacgcggtctcggcgacgcatgcgtctacgtggccgaggtccgtcggaggggcaaaggaaagaacaaggcctcgtccccagcctcgtcgtccccccggaaggatcacacggacattggttccactacctcaaacggatcacacaccgatgcctgtggccgaccgcaaacgaccgccgagtcttcatcacgaagaaccagcaagacatcatttgacgataccgcagacatccacctgcccagaccaatcctgcctcctcctccgccgccaccactaccaccatcatcatcggcatatacattcacccagtcgagatttcccccgatctcttcctttgtgtccccatcaggccccgccctcttggacgacgcacatcgatctttgcacctgtctgacaatctgtcatttccgtctttaccttcgtcatcgaacgagccaactcggtatccgtccttgtcgtctgtctcttccttcaacggaccgtccccgtgggtctcgcccgggtgtggacagactgagctatccgaagtcttgccacagaacgctcttctcctgatagccgattcccacaggcctggctcacgatcccgtccgatcttgaacggacctgtacagaccgatcggcagagaccgtcctcggttgcgatcccgcccatggggacgatgatgacgatggctaggatgaagtcgtccaccgattcaggtcagctggttctgacagtagaatagcacgaccaactagatctttgggacacgtcttgtgtttgatcttttcttttctcttttccttcctttaatctaacggggtttctttctttctttcttcttcttcttcctttacgtcttctttacttggtcctggtcctggtcctggtcttggtctcttgtcttcttgttttgctctgtttgttcttgtttggccttctctcatacgttctttctctttctctttctagccgctctctttccttctttctgtccttgtttgtggggaatttctcatcatggtttcctcattcgtcactgtatctgtacacgacatctacaattctcaaaaatcatctttgtcttgttctctttctcgcccttcccgatatcctcccttcgtcctattacttgataaacggttagcgtccatcccgatctcatgaatcgtccaaagtcacccgtagaaaacagagcgacagaaaagcggaaattgagccgagcaagagagagagagagaggggggggaagaaaggag

SEQ ID NO: 1826 - DNA, 27428 bp, Xanthophyllomyces dendrorhous
agaaaattcagcccccggctcggtctacaagtcgagggtgtaagactagcgcgtgtgcgagaccatgtgtcggttgaagcctagcctgggcggtcgaccgagaaagtccagagtgtgagagagagagagaacgaaggcaagaacggtgagtacaacgatagaatgagaaagggaaccaagctccttgcgttgttgtccgtctgatgtcttctatctgggttgatctcatcctcatcatcgttcttgatttattcggattattttcatttttacttttatttattttattttcgtcaggtattttcttctccccacagaacccatttcatccatccatccatccatcctttctttctctccctccaacacgagatcagggttggacaaagcacgctcgtcagtcccctctccccccccctcgaccgcccttcctttctcctcacagaaacagtgatgtcggtcgtccgggacgggttcgggaaccaagacggaggcgggggcgaaggtgttgcaatcgtcagcgctcatccttctaccgaacatcactctgctaccgaaaggccgaacgaccgaccgacccaacctcgcttgcactccatccgaccggggaagtcgtctggaccgacgaactcaatcatatcatcaccaccaccaccacagcagcagcagcagcagcgacaaccctatcagcaacctcctgagtcatctttgcactccccgtctcgttctcgttcgatacgaccgtcttctagccctcggtcgagccgtttggatgatacatgtagaacactctcggtagacgggccttttctttcaccattgtcaccacctcgtcctcctcatcctcattcgatatcaagacaaccatcaccagtcgctgcctcaccgccgccacctgggtttaggccggacgattcatattacacgtctctctcggagcacatccatcggcttgaacagcaacagcagcaggagcaggaaggaatccaacttggaatcgatcaagatcaatcatatcattcccatcttcattctcacgaggacaaacattcagaactagttttcacccggtcctcttgtacatcgaccacaccaacgtccacatccacgaccatcaccacacctatacccacacccacacccacacccatacccacatcaacatcaacatcaacatcaacatcgatactgataccctcaggacgtggaaagcaggccgagagcgaacgtgccggccaaccgatccgacagagttcgcccgtacaaccagtcgggcaggatccggcattggcgatggtgatggccgctgttgcccaagcgtctgccgacgcacaggccgaggcagacgcggcccaggtcgctcgtcacgcacaggctgcccctctgtgccgaccgacgggaaagccggcggagaagacgtcgatcgcttgtgcgagatgccgggcacaaaagttgaagtgtcagggcgggaagccatgtgcgcgttgtgtgaaacagaacgtaggccacagttgtgtgtacgtcgctgacgtcaggcggaggggaatctcgaagaagaagaaacaagcccagagaatcagggaggccgagacaagaaataaagaggaagagatcccaccaccagcaccaccaccacccgaagaagaggaggagaaggatggggacgaggtcgacgagggggaggaagcaggagacgcaaaaggcaaagcggataagcgacaagagcacgaaaggcttgttcaaaaggtggatagaaccggatcctcaggtatcatctctcaagccgaaggtgagagcgcagaagtcgaggtgggcggcgctggcaggcttgttggcttgccttcataccaacatccagtgatccgtctgtatcacttctttttttttttcattctctttctttgacttttcttctccgaaatgatgttgacagcgagcacgctctgttccatcgtctctccccccccttctctttcgcgcgcgcactttctcatgaaaaaagactcatcgtacccatccgaggaatccttgttgtcattgacaacttctggatctattcctcaaatgatggatctctccacaaccgacgttcacaactctcattcttcatcccttcaagctcatttggcagcagcagtggtcgaagacgacgccttctcgttcgattacgttcacgggtcactcgaccattatccggatcctaaccctcatctgcattcccatcctcatccggaccatccttcccacttggacccgctcggacaaggcggaccaggtccgtccaccatgtcacacctgcagtcgacctcaaacggaccggtcgaactaggactcggaatggacatagcgctcgggatggatcttggaataggaatgggtgtaggagtaggcatgggcatgggcatgggtatgagtatgggcatgaacatggggttgggcttgggaaaaccgaacaggacgtcgatcgcttgtcatcggtgtagaagacagaagctgaagtgtttgggtgtggtaggtgagccttgtccgaggtgcaaaaaacaagggttcgttttattttcattttaaatttctcccttccctcttttcatccgcttcatgaacctgtccttccttctcaatccttccactttcactctttctctgttcatccaaactaacgcctccctttgtctacttgatcttctctttcttctagagtcggagacacttgtacatacatggctcatatccgtcgccgaggaaagtccggttcgaaacgatctatggaagagattgagagtatgatcccggagcccgtaaagaaaccgaaacgcagaaggagacaacgtccgaaaagtcagttgctcatctctgatctactagacgacggagaagaagacgaacataccgagatcgacgaggtcgatggcgagcatcaccatcaccatcatcaccatcatcttttggaacagggtagtgagaacgatgagcagggcccattggaaggtgaagtcgttgtggtgagcgattcaaaccaactcgacatccaactactcgcgcaagtacaggcccaagcacaggctcaagcggaggcggcagaacaggacgacctgtatcatcatcattaccatcctcaccaccatcatcacgacccccaaaccgatatatataccgatgaacaaactgatccacaggatgacgacccacacggtcatcaacagcctttacttagaccctcaacggtggacactgaattctcagatcaactactcaaacaccaacattatttcgagtcgcatcacgatcaccatcacgaacatgaccaagagcatggccacgaagacgaagacgaagacgaacacgtccataccaattcaaactcgatcgtcagaagcggcactgatgatgaagatggtacccacgccatccctgtcgacggccctccttcagattcccatcatcttcgtcttccgtcttcagatacccacttgccttctcacaaacagcacgaccattcgcaccatgacgatggtcatctaaacgacccccaggcgttcggtcatccgtctccgtcgatagggtttgagaacgaacagctgtcgttaccgctgcctttaccgttcaatattccactgccgaacacgtctagttacgacgcctttttcgcttccactcgacctggtccagaggacgatgaggacggggagatttgaaggtgatctacaagcgtctttacgatcgaactctccctgtgtttttctttttgtttgtacacaccattccatctctttttttcttttttctttcaccaacctcttcatcctttgcagttagttttctcttcgttttcggtcgctttgactctttcttttttccattctgcctccaagcgaacgttgtaagaccgtcctctccgattgtgcgctgtgtctttcctccacatatacatttgtagcaatgcccttgcccttttcccttttcccttttcccttttcccttttcccttttcccttttcccttttcccttttccccttccctcttttctattcacgcctcccagatgcctctcggcgcttacgtcttccctccccccccgtcacccctttcttagatcagacagactggctgtattcatatagtttcaacacagtaagggactccgatcaatccctcctgagacccaggaatctgacattctgtggacgattctcctctcgctaagttgtatgactgatttgcgctgtgcagaccgcgttcttctatcctgacaaaatacggacatcgtctgtgccccttctttcctatcacttggctttaaatatgactgggaaagaatcccagatcctgatgtgtctctgtcggacgttaattaaattgaagacagggctcggggaaagagtgaaggaaaagaacagagccgaacggtgcattggcaccatgcgaacatcgtgaaaagaacattattaagaattcaattttgaagagcttcctcctttactctgatcgtgttggcatgctgtcggcaagaaaaggagaaagacagaagataaacagaaggaaaggaaacacaccaccacacacacaaggcaggagaacaaaaagacgagcagcgacgtcagcgctggtatgagagggaactgagccgacaaccggtctggtctgttttctcaagacaggcctatggacacgaagaaaagggagatccatatggactcactctgttgacacgatccaacactgcattaacattcggtaacgactccagatcaatcttcaactctgtcccgtcggtgtagacgacttccagtcggtcgggatgattaccctgtgcgtcagccgttgccagatcaaagtgcaggtgtaggttcgccgccggtcctttcttgggcggaggaggtgatttggtgatgattggtggggtacgtgtcaaatacggcatcagtcttcggagtttcggagcttgaggagagaacggagagatcgtcaatcggacgactttggataggacgagagaagaccaaggggtacacgatgagaaaagaaaaataggagagaagaaacaaaatcatcatgttcagccgatgctttcgatattgcagcaaacaagaaaattattcaaatcgacgctgaggagactcacagtgcaggtactgcaaggctaatgtcggtcctcgtgccatggtgaactgtcgtttggtcgggtgtgaggttgatggtcaagttcaattcggggcgatgaacgaggttggaggtgttctttgggtaggtaaaataattcatatatcattcaaatatatcatacgtaagccaattcgtcctagctgctcgtgtgtgtgttgcttctcatgaacatagtacaaagcagagtacaagaggtagatttgatgaaatcctagaaccggtcgttgattcagatagactacaagagagacagcgcagtgttggaatgtctgccggtgggagttcaaacacgcacacaaatacgaacgagtagacttgagaaacaaatggcccaagactgcttcaaggtaaatggtcataggtgagaacttcagttcaacctcgatcgcttcaagcctgatatttcacctgccatgtacgagagatccaaaagagcaaagcaagaagagggatatatgtgtgacttcattttattagcctaaccgaccaccatgacaacctcccctcctacatcctctgccacggcctcccaaccatcgagccacctgccgtcctttgttcggacgatgacgacctctcccattccgatacctcgcagcttctgtagtcggcttccttcaagaagcttcctgatttcttgagacgacgcgtgaataggaagatgtggtttggagaacaggcggacggagtgaattaccgggaaggaatttcggtactttaatgtactatgatggtttgattcgtgaacagaataggatcttgagctgaatgcacacgagttacaggctaatctgtgtggaacaaaaagggtacatacaggtgaagagctttggaagcgactggcaatttgtgaaatttctgagggttggcaggttcagtagattttattaatggcggacctcttggttgaccgacgaggcaagacgaaagacgaagcgataacataagcatgaaaggctccagaaatactttatggaaggaaagagctccttccaaatccatggagaaagcgagaagaacagaaagaacaggtcgacgtaccgggtaacactggagatgaacccgtgacggagaaggatgctggcgattccaagattcatcgttgtatacggaatcgacgtgctggcgagtcgagcgagagtcacattctgcaaatgagcacacaggttgtgcggaagaggagccatgctggaagaaagtctgggctctttagttgatgtcttggacggttgggttcgatgatgatgggggtacgagaggagaaaaggcgaagaaaaagaaagccgaaaatgattacggaaaattgagtaaagtgactacgaattttgtgagaaacgactacaaacttttgtagttttgtcggctcaaatttcgccaaagaaaacaaaaattacacaaaaacttctttctcctttgcctcaaccgacctccacccacacaccctccttccctctttctctcccaactcttccctttcctccctagcaaccatggccaagtctctgcgatcaaaagccaagcggtcttccagaagactcaaacgagaggagggtacttatgccgtccacgacgctgcccgactccagcgactgaacgctcgactgttggactcgaactcgaacaaggataagatcggtaaggagaccgaggataaagacgaggaggatgtcgtaggcgacgatgaggacaaggatggagaggagggtaagtctaatgcttagtcttcatcaggccgtcgactagtgatatatttgagtatagatagctgactgcgacacttcccttcttcctgcctttttatcttctcttcttccgttcgctcacgtagatgatgcgaagatgtctcctactccttcaactactggagaggccaaggtgtccacttcgggtgcccgaggatctcgacgagagaactggcgagagtcgaagggaatgaagcctgtgcgtctactgcgtctccaccgctgatttgtcttcgtctgaagcactcacacttactgtcttcctttgttgccatatgtgtctgcatgtccgtttgcgccgtcttcttcgcctggatccaaaccatccacagcgcgctacttcgcacggaatgaacgggaaaggaaagtttgttggcaagcgaaaggccggccggcccgctcgaagaagataatccttcactcctagctcttcatccttctcacacgatttcatccattctagacgtacaattcttgcaactttccttttcctttctcgttcttctttcagggttctccctgtgaccctccctctttttccttcctttctcaggggtttcttttgcgtttcaatttaccgtataagagaggatcatacatccactttgtccgtatagacacctcggtttgtacttgtatctgatccatcctttcaaaattttacatatcaaaataacccttccaggtacatttcattcatcgcttcgtaccatcttccttagacttgctgaccatttagtcatactgttccgctcagtatctgaatgagatcatcttataacaagttatcgggttctttttctttcttgttgtggcttggctggattgactcaagtgggttttataaggtaaacgattaaataatactgttatacaggaagacatactgaacgccaagcaggacaacaaatcaaccgaatatgttagcatgagtttttcgttatgcaaggaattgaagaacgttgacaaggaagggagtttcagaatccgatgtatttcctcgaatccaccgctccacctcagtttgtacgaaagaggcttcccactgaaggggggagggtgtcatttggtccgcccatcggtatattatttcaacatagtggtgtgttcgtgattttgaagagatgagttggatgagcaaatcaatactaacctgattgaagatttcagaagggataagacaaagtcaaaagctacatcaaccgaggcaaaatcacagatagattagtaatcgtgaataaatacgaggggatgtgatgaaaaaggaacaaagagagttggaagctcggacaaggctgaattggagtctacagagtgagttcagtaggtttagaaatcaagtatgtatggtagaatttggttttcgctcatagctaactaagggagtatgtgggcccagttggaagggagaagactaaatctcaccttgacgggtggcatcaccagactatcctgatagaagactacacaacacaatggtgaatacctgaagaaaagcaagcaaaatggtcagtacattaagttcaagattgatcgtggcaagcagggataaagatgggttcaggtcatgtgtatgggacatctcacaccgatccctgctcgctcttcaaagaagaaacgagagtttatcggatcgctagtctaggaaaaagtctcatcaagacaactaaaagtaggaagaaagcgtattgaacagacagaagcttaccttgtcgagttgagccgagccatcccagttgctctcatcaaagagaacaacggggatggttcggataagggaaaagaaaaaaagaacacacgactttttctctttttatatttttttccttgtcacgcagtcacgtcgtgttgatcctcaagagagcacagcttctccaaagccaaatcacagtcacatccatctaatgaatcattgatagtccatattatcttccccttcctcttcttcttcttcctcgccgtcttcatcctcggccatgtcgaacacgatgagttctctcccttcccatgtcaaaagacttcccgtcattctcgacgggtttccgttcagcgccagagtcactgcaggcctagcgggatctccatgtggggatgaacgaggcagtcgatctaaagaggcgatatgacgcgctcgagtaaggggtagatacgactgacagagcgaaggtagagggttctgcaaagatcggttgcgaaataagaatcaatggatacatttgataaagaatgagagagacacgtaaatcacctaccggaatgtgcagcgctgttcgtaaggcttccccaggggatagaacagatcctgaatcagacgcagatatgtcggcatactcgcttgtagtgtaagcgatacttccgagcaggatcttgggacctataaaattcggttcaagggcaattattgtacattctagagacctgagagaacaaagggtggacttaccttctggtgtgcgtacgtctaccaccagaattaactcctctgagttgaaaaagtccatatcgactacgtcgcatgggcagacaaggccatcttcgatttgaacggccagctgaaacgacgagacatggacaattgctggggtatctgaggatctatacataatccagactttgagatatcgaaattatgtgtattggttgatttcgtagagagctgaatcagtcaaagtgggatcacgcgccatacgtaaactgaagccgcgatactcacgtaaagacgttggtgtaagttgtgaagtcgtttgagaagcgacgaatgcgacgtaagaccgtgaagggtcattgctcgtcgatgtcttgttaacaatcaaatacgaatctaaacaacgtcaacatcgtcatgaccaataaaataatgacgcaggctcactaacgtttgcatcgtcggaccactctctgaacattagctccatgttgacgtcctctaacttccttgactgaggatcttccctggcagctgaagactcccccgaaacaggcaaggcactctctaaaatctctctgaacacaccgatcaactccaccacgatatcctccaatctatatccttcctgctcatcttcgacacggccagtcaactgagttaaattatgaactgccgactgactgagagaactgttctgttctatgtcaaccagcatactgctcaggtccatcaaagatgacgatctatctgaataactatttccttcgtttgaggttaaaccacttaaaccagaggagacttttcgtcgacctagaatagccgatcggagtcgttcgtctctggaggaagtattgtatcgagagacttgcgcatcgagacttgttctgccttttgtcccgagagggattttcgaggatgaatttgagagtgaatatttcgacgcaaatgaggcagatgagttcagagcatccagagtggatgatattgtatcatcaagcgaaggaacagacgatagatcaatggacgtagggatttttatcgaaggtcgatgttgttcaggtggacgactttccaagaatggtgttacaggggatctcaagaaggatgattgaagatagtcggccacgaccagcacatcgtgcgatggagaatgattaagttcaacagaaggatcttgactggatgcaactgctaactctgttcttattgatgtgatccaggaagaacaaatcgttacagacaaatgaatatttgagtaatcttcttataatcaccttggtgaatagtagtgtacggaccgtattttagccattttgcaaattccacaaaacgcgtccgctcctctgaagctatcttctccagctgacacaatgtcagtacagcatgtttggcgaggttcaacgccttttcgacttgtccagggtctagattcagaataccatacttggtggtcctgtcccatataaagtccaccacatacagaaggatacacatcagaaaaccagatatgtattttccatgaacatatgggcacttaccaacgcgaccatccaaatatttcgtccagaaaaatgatgattctttcgaaagcaggaacgatgttctgatagcaagcattttgaatagccatcaacgaattgagcgtagacgattcccagcggcctagactctgattggagatagagcgcagatgcaaccgatgatgggatgttaatagttgagcaacaatatcgagacacagatatcaggttgatgacaacgagctcaacgtacacggctcgtcaattggcctccgatgaagtttgttatcgaatcggagccccttccaatcatgagcaggcgtgtgaggtctgttgggggatcgatcctttctgagaagttcagcatcacatggaaagcagaaacagtaggaccgtaagtagccgtagtgttgattgcgacgaaggaaaaaaaaggatggtgggcacaatgataatgtatactcaccaccgaaacgctttccgacatcgtacaggaccccaatccattcttttgccgctccccctcctccttctcttgaattccactctgtctctaaaccttcaatactctcaactgcgcctcgtatcagctcctcaatcgccgacgtcgacttggtaaactcttcgacaactttcgggatggagtgctcaactccattcgtaggtcctagaggcggtattgggctagttggagggaggggataagtgcctgaaagaaatcgttgagtgggtgcggaaatcaaagagagcgtcaacaggctcaagggcactgggttcgcaggtgatggaggaagcggcgaggcaagtaggcttggcaaagcaggcgtgagaagcggtgattgttttgatttggatggtaggttggaccgcatcatcataggaaaataaggcgatattgagggtttttttgaaggtggaacaggtgtgacaagaggaagatcatatatgatgttgaatgttgagcctatctagaaagatcaaaaatcaggcaacttttcggtcagggaaagtgaacggctaaagaagaacacgaccaagacttacgatttgttccttgttggagaggattgatcctcggccgtctattggattgtttactgaaactgatttccactccattttgaaaccactccaaaattcgtccatagggttcttctccgtttctttgtccttgtatcgagtgtattggggaacagcgacctctcgaacaacggagccgttgtgaactgacaagatacgtaaatgagatacttccggaacatatactgccaagcagagacctgacagaacaagacatcgattacaaacatggttaacaaatcattcaaactgctgacgcaaacgaagcgagatgaacaaaccatcaaatctccaggccagccctgcgactttcccttccatttgggctgtccagaccggcggtcctccgctcagtctgcgcaactcgattttagccttggtcaagtttggatcctttttcgtatcgtacgtaatgagggcgacaagatccattgtaggacagcttgcttggaggtgtagatagcatctggattgtatcaattcaagaaaacagacatcagtctctaacacgtgatgagagaatcctgacggaaggtcgaggccacaaagtagttccagctttatactcactgcgagggcagagacacggtcgagagcaatgtgaacgattgggattcgagaattgacatgatgttgacacacttgtcttcaaaaggggtcgtcagcaggctttcaaaagacaatataaacgaacatgatgagtatggtccgaagtagtaacaaccgacgacgttgtacaacagcccgcgtagatgagtttatttcactcacgtatcagcaaggcaagagctctactctgaccagctggcggaagacgtagttcgttcagaacagtatgattcaagaggagaatgaaggttgattgcaggtatatgattgtgaagagatggtcgttgcgaagtcacgctgttggttgatgaacgtctgctcttttgaccaaaaaaggattaaatcaagatgatcttcaatatttatctagcataagcaacttccccctgcttgtttcccatcgaaaacacttgcaacataacactaaaacatgtgctttctcaactttctgcactaacaagatgacatctgcgcctgatctaactcctcaagtctttctcatttattggggtgaagtataaaaaatccatgcatccaaacaaaacacaagtgtgtgactatcaaaatgaaatatatgaccggtaaagcaagtgcttcttttacgtcctcacgatctgtatctaccgactttgaagtagctcggtggtaagttcttgacgagatccaaccttggcctctccactacaaccaactcggatggtccaatgtagtccaatccgatgactggtcgataaatctctcccagcttgtacatcctctgctgagccttgtttgcctcagcagccgattgatccgcatcggggatggcaattgcttccttctcatcaccattctgatttcgcttggccttctttcgaggctgcttctgttgtccgttcgaaagctgaacccgacatgtccaggtggctccccacatgagaactaaaccttcctttcgatcagcgaacgttccgttaggatcgatagacagaccgagtactggatcgtgcatatttcgaagtgcggctggggaaggaatgttgaattccgaagggaatcgtctcttttcaacatcgtacacatgtagctggttgccggagggaagtgcaaggcaaagaacagaggtgttgggggtgatcgggtttggaaggaaagctatcgcggccggaggatgtccagggaaagttggaagatgcgcgtgcaactgagcaaatggcaaaataagacagagatcaggtcaggcccggtaatagtcaaagaacgtagttcgacgtgaagaattattcaaaatggacttacttgcaacgtatcgaggttatacactctcgttcggccggataggtctaccactgcaaaccactggccatcatgagcaactgaaacgatgctgattccggcattggtcaatgcaccactagcgttgggactgagctcatcaccgtccattatggactcttcatcagcagacttgaccttccggctgccaacaacaactctggtgccgaggtctttgctctgttcaaatactcgaaggaccctgacctcaccaagcttccacttcttctcctttcgctctactggttcgtccatcggatcgtcctctccttgagcaacaacgatgtccgcatcaggcatgagatcggcaaggtcaaggacgatgacatctcctcgtcgagaggttgcaagaataagcttagtcgagtccggggtaaaggcaagagcagaggcggaggttccttgagatgcaagaggcaaagaagggcattgtgattctaaggatgtggtgagagaccgaatcagatgtggtcgggggttggtctaaaagtcaacaaagttggtaacgaattgagagtaaagttcaacggtggcataaagaaaattgagtatcttgatcttcacacagaaaaagcactgaaggaggatagatcacgtacggcactagcggcaatgtagaatagcttggtctcctccaagtcagaagcgacgacccaagatccatcctcactcacagctgcactgatgagctcgctttgtcccttgagctccatctcgagcaccttctcccaagcactctcctcctcaccttcaaccttctcgttgattctccagattcctacggcctcctctcgtctgaccatgatccacctagcacctcgagagaacatgacccttcctcctccgtcagcgccaacaccgttgagcccaccggttcgtcttgagaacgcctcaccgaagacagtggatcccactccactgccgtagtgaagcaatgggtttccgatagactcaggcttgacgtcgagtccgggattagagcaggcggagaacacaagagttgtatccacaccaccagttaccaggatgggcgccaagttgtcgggagatttagggatgtaagattcattgacaggaagtgcgggagggtagatggctaaggcgagaacatcatgagtgtgcattctcttcgaagtcgactgaatccattgacctcgctgagactgaggagacgagaccagagcaaactgtatagtggtttgatcgattccagaagtaaagactgaagtttgttcctgatgatacgaagagaagaagtcagatttagattttgcggagagataaaaaaaccaacacgaacaggggagatcccaagacaaagaacatcggctgcgtgagctttgaagctacagatttgagtggccgtaacggcatcccagaaccgaactattcctagagaatctcctgaggcaatggtaccgtccctgtatatgtcaggttgaacttggtgtcagcgcacattgttctcattccaatattcatatactaaagaccaggcaagaaaaaaggtagacatacctgaggacaccgacacaccagaccacactccgccccttgctcgctgttgctcctctctttccatttccccatccagccgctttctccctctcgacgatcatcctttcaactacccgacccgtgttgaagtcccatttacgaaggcatgaatcactgcaaccagtgacaagccagctgtctctccactcggcttcatcctcatcctcacttgactcttcgacctcgtctgagccgaccttggctgccgaagccgtctttttcagaggaggtaaagaaggaccccaagcgatactgagaagtcgggatttcgtcctttcaaatttcttgatatgaaccaggtcttcatcgttttcaagggaaagaagtcgaagagaaccatcttcgcatccaatggcaagaatagttgaagaagggttgggggcgatagaccaaatagatccagattgggatgagtgaagtcgctataggccacgcatcaaacgtagagaaaggaaagggaagggctgaacatcagtatggaatagactaaacattcaatgaaaatgagagaaaagacagtataataagaacttaccatgacagatccgttcgtcagatcccattctaccaggtcggatgaacctccagaggaaaatagtcggacatctccaagcccagcaattctacggccagaggcaatgaacgaccgtcgaagcgtgaaaaccagcgagtcaattttggtcgatttgggcgggacaagacgctaattgaatccgcagaaagaattatgaacaagcacgtcagatgaatagaaatgaacacggggcgagaacgaacatcagccatcgatggcaggaaagacaaagcttgaacaatcaatagagcttcgcaccttgagaataacccaaccttgaccaccatcctttcgttcaacccatttatgaatctcgacttctccacttccttttccaacagccatcaatccgacctcgggctctttcgagctagaggacgatgcatgggcagaagaatgagaaactcggagaggtaatggaggaaaggcaatctgagtgatcgactgaggttgatagtcgacgaagcgaactcgatgaagaggaagagcaaccatgtgcaagtgaaatccgtaagtccgtttgggttcgtgagatagtggttttgaaactggtagttgtggagttggacctcaacgatcttcgattctagattggaatcaagttaggatatttcggctttcgtattaagccgaaaaaaggaaagactaatccaacggtttaagatagacggtcaaggagaaagtctgtcgaatgttaaggcaaaaagctcgtctgggtagaaaaatacaaagtatgggaggttaaacgtcggaaactttccgtacgcccaaatttggtcaaacttactcaggtcacgtgacattctcgctttcatacgagctttgcctatgtgatacgttggaagagattgatatgtactgttctgtatctcttgtcgacatgttctattcctatcaaaggttatcgatggcacagagacaggaacaaacttcgttctgaacggtgtgtataaaagactcaatagcatactcgactctgcttaaaaaaaaccatcacgagtctgacttcaacaatgctagttgttgtcgtcgctccgatctagcacaaatcataaagagggtacaaacaggaagatacaaaacggaaaagtacagaacaaagagaaacaacaacacttgtgaaaaacgtccatcgcacaccttgattgtgaaaaagccaccgtacaggaaccccctccttgtttgtgctttgataggatatagccaactaatgttctccacctcgcttgatataatcctcacgctcggattcatggcggaattcgtttgcccactttttatcatagtaagtcttggttttggctgcgatgtctttgttgtactcggcttctttttgcatcgtcgcttgccattccttgaactcgacctcggatttttcccaggtagtctgtttgtacaagtcaaatcagaaaatggtggagggtcagtcaaaaagaattcggcaaactacctccaattttttctaaatgatacgaacgttttgtgactctgcataagcatccgactctgcccattcttcagcggtaaattgcggaggctatgaaaaaagggtgacgaaaagttgagataaccgtgaagaatattttcgtcagtgcaaaggactaagcttcgatgctcgtatcagtaaagtatgatcatactggcatattcctttcgctattgtgttttagttcgaaattggaaagaaaccatccaatcagtaaaacatagagtaaaacaattttttgaaaccagacacgtactaaagaactcctccaggcatcttggggtatatgataggatcatgatgccacatagcattcaagatgttttccttttctttgatccatgcagagatggctcggggatcgctcaggtttctttttcagatgataagacgatgaagcatgatccgtatgtaccaaagcaagccaaaaccggttataagacacaatcagcttttcgtcaagataggtaaagcgatcaccaaagtcaaccagtagaaggccgggtcgtcgagtgggcaagcgagcgcgtgagaaggagaatgtaaagtaagacaactgacttggcggcttcgaactcagatcgaatgatggcgacatccctacaccagtcgttccgtgtattgtactgagtggcctttgcatccagacaggaacgcttgtaaagcctgaagagattaatcagaccgagtttccagatggatgagatgccgaaaaggaaagcaggggattggagggatgaacttgatgagcttcaagttgggcaacacatacaaacgaacaaacacatcaagaagaacaacgacacttacgatttgatatatatacggtgagcgtgtgaatagcccctcatgacgacaggcttttaagataggctagagtggcaagaggatcagagaaggttgaaggattgttggtatcggagaacaggtgtttgaacggacgaagacagaagagatggactctggaggcccaggtaaggaaacggggtctaaggtatttgaatatataccccacacagttctccagtcttctcgtctgtttgggtcttcgcatctccttcatcgttccatcttccatctacaaacatacacatcaacatcggtatccggaccccttgttcttgtacggatagtcttgtgtaaaacatacagtcatcgccatcggttagtgttttcttgttcggtcgcaccaaacgcttctggctgccaatgacaactttcaggtgaatcgggcaaattaacggatcggccaatgagccgagtctcagatcgagcgtccttgagtggatgcattcatcgatcatcaactcagctaacccatatctgttgcactctttgtctctcctaccagcagatcacttgcataatttatataaacaaaataagtcgagatttgacatgaggctctcctctttccaaaaacgcctacctagccaagctgttctaccaaaaatccggctcgtccgatcttatgtaatcgcttcggatgaggcaccttcgatgaagccaacctcagaatttccgtccttccttatcccctacttgtcctccacttctgtctcggatgcctcatgggcatccgggatgttgtcctccactgagcgacctcctattcaccggttaccgtctcctcctccattatctcaggttcagcttctgtcctcgttgaacggaattcttcctcaatgcacctggcaacagcatctacttgtcacccgctattatttcgctctagacccatcgatgatcaccaccgcgcttcataggcaggttgcctctacacttgcccgcgggcggggcaccctcgatggctatcgtcgactcaaggctgtagttcagaggatgatgaatcttggggtcgaagttccattgtttgtcagagatcagctcatcagaatcagcacacccgataaggcggatgaacacgaccggtatgctgaattgaaactccacgggaacactgttgagaagatgaacaattggaataagatctacggttctgaatcagccactcaagtgggagacgtatactatagaccatcgagtcggtctttcaacatgttgcttgaatcgaaacatccatcctccgtcttcagcaacatgattagccaatcaccaaatccaaatcggcacatgactccgatcatcaaacatcacgcccggtcgttcacgcttatctcgaatctgccggccttgctacagaacccgtcgactgggaagcttacaatcaaggcgatgaatgaagtcttagctgcattttcatcagacgaaaacattcggcttaccgttcctatggaagcatatgttgctcttcgaagacatgctgccggactcccttggagaagggtttatatcgatcgggcttcaaaggggttgtatcaaaactacgatgatccggctgagagttttgcaaacccaattttggattcccttggatacgatttcccgaaggatctggagccaaaccgagacacatacactattcttctgcgaagctgtatttaccgaggtgaactcaacctggcgctcactatctttaaagatatgctcaatccaaacgggctttcgttgagattacctggtgcgcctcccggacaaaaaggtcaaccgccaaacgagctcgagagctttccacccaatgtctctgactataccgcgtttttctctggattctaccggttcggcgagttgcccacactcgattcagccgctgctaggtattatgacgcccacaataagatcttgcgtcggggtgaagatggtggatccccagaaggcagagagagcgaggcagacatgaggaggaagacgacagagatgtggaatatcggtatgggctttcaggaggctccacttgaagatccctatacacctggtttcaatggagaaattcctagcagaaatcaatatgcggtcaacagagcgactgagccaaagaaatgggttctgccgacattgattattttgttccgaagcttcttgtctatgagtccttcaaactgtgagttctccgcttgtttcaattttgtcgctcttctaactcatagctgacatactctcaattcgattgattgcgttttagactcctcaactgtccctaatcctcgagcgtcatatcttcctcctgctcgaagtcgagcaaacaaccgcgcgatggactcgccaacgcctcgacggattctgttcatccttcgagcctttggtcaggtgtcaaacttcaacccgtacatcattaaaggtgtctgggaggcatgtgaggaaaagtttgggatgggaaacgatgagggttgggtgaactggaaggtcactccggaactcaaaagcttcttgaacgtatttggactaaaagccaaaccggcagaatggggaaaacctggtggatatgaagggtgggatgacgaataaacgaaacccatgtatgaccatctggtggcactctcgttgtataaaatgtagtgttgtagatatctaccagatgttaaggcttgtgtggaccgcaacgaacatggttacagacccgcgtaactctgacgatatctaagatgggcgtgtgctcactttgaccttgacctttgacagtcaacttcttcactctcttttttccaatctcacttatcttcataagatgtctacccctttcaacactcctgtatctgccccgataccttctgaggatatcgttgctaagaaggttcgcatatctcatgaccgtagctttcaaacgtggttctaaatcatgatgtacctgatcgctcacctttgctctttctcttctgcatcgcgtctcggatacatagttcgacgcctgtgtacgtgcttactgagtcgtatggatcataagaaagatatctccaactggatgaaaagtgtagctgattgatcaattgttttttgtgaaatgggtatacataccatccttcattgatctgtgtaggttgctgatttgattgtgaagactggtgttgggttctctgtcggtgtcgctctctcagtcatcgtcttcaagcgtgagtctggtcttttattattgttcatcaggcattatgcccagcgatgacactgcttatcgtcgagtacgtggttttattttcaattcaaattcggttcggacaggacgaacctggcctgtggctctcgctactggatttggtattggacaagcatgtatgttaaatcctcacatctttggtcaagtcaattgatgtgtctgatagttgttccggtgtcgcttggtgctatccaaaatacagaccagaactgtgaccgatctttcaacccttacaacgtccctgggtaagtcgactcatcaccctcaaggttcgaaaaggaacattggagctcatacgccgaccaatcatgggctgcacatcatctttgcatctgttctctctcattgaaaatagatccaaggtccttgctgccgaaaacgtcaagaggatctgagtacactgaatgattgagagtcggagaaggggtgcgggagggaaaaggatgtgtattatcgataaagaagccatctttatatcatactcgtttcatcttcatgttgtagaaattatctgcagcgaccgactcgggaaagatgattgggtatacaaagatgcagcaaaagcacgagtccgctatgaaggcacgagcttctttctcgtcatatagctcttgtcatctcatcatcatgaaaacccgttccaaaatatttaggtccaactgacgggacagattccaaaaaccagaatcattctcttcccttcctctaccaaggagctgcaccttcctcagcgggtaatctggaaacatattccctgatagcagcatgtccgctgacagtaacgaagaacatcattcgttccttcccaacgtcatgtagaacaacatcgagttgacgggcataggccagtgcttgagagtattggtagaatgaagagaagtcggaatacagatgtcctgtcacagaagcaaaaaaattcaaagaaagaacagggaatgaggagaagatccatcaggagacagactaaagagaggataccttctgcgatcttcattcggtgaagctcagattcatacagtcgaagctgatcttgaactgtcacaggaagaagtgggttctatttagtattgaccaaaaacacacagagcaaagatccgatcagtcaataacgcattcaattttgaagtacttttatactaacgtttttgtacatctgagcatgggcgtgaactgtcagatagctgatgatctgttccatcaaaagcgctagatacgtcaagtctttcattcaagatgtagaaacacccaagaagcaacatattgagagacgaacctgatcggctgtgattcctttttcaagcgcgcctcgcatctttcgacgagtaatttcaccgacaaccatatttgggaatcgagctttgaactgaacaaacaaattcaagaccgatatctgtaggacgttgtctagtttgatcgaattttgagaagaggagaacaacaagtttacgagattaattttcagatcggacgaaaacagagtgaacgatagcagggcaattacttgtgtacgcgtacacccggaaattagtttcgacgatgatgaaccccttttcagttccgcccccaggtccaggtgtggcaggcgataatcctgttgttggtgctgatatcagtgcacctgaaccagggagacctgtcgattcggtctgttcagcaactgaagcagaaagggatgctgctagacgggtagggtagaatcgcttggatgatttctaaggaagaaaatgaaggatatcgttttgaacatctaaaactatggaagagacaaggtatgaacaatagtaattgaagcgcactgtacgacgatagagaaaacctgtctcgttcagatcctcaagcattgttaattgagtagccgtcagattttctgttgagtagccctattgaatgtgttatgatgatgaaaaaagaagagacaaggacgagtacatcaatttacaaaaggtcgcgcagagtgaagaaatagagaaaatcacacgaactcgaccaagctcaaggttgcctaacatgaataggaatgaaagcgcttcgatcggatccatctctcgttccttttgaaccgagcataaatagtaatgacatcagatgtagcaagatcggtcagttcatatatgagggtccttgaagaatcgtaggtcaaagacattgtaacttggacgaactggtgctaatcgaaggtagttcaacatcaaatcccactgttgagtgtgcacgtcttccaacaagaattgaaaccctctcgaagtgatttgtagtctgtctgctgccttgataagttgatttcctccatttctgcgcgtcgtgttgagcaagacgatatcagctacacatggcttgacacacgactagataaagaaatgaacacacggatcagccatgagcccgctgttggccagtaggtacaggactgaaggttttggaggtataggtgatatgttgatggatcctcctttcgacaccatgaaatgtaatatggtctgttaagaataggtaggtgtaaagaaggtagaaggtaagtctgctactcaataactggttgaagagaaaaagagacattggaatgtccttaagacactctactcgcctcccatttggaaattgcgatctgatccagctctgcagctgtctttgcatacttgtcttccttttctgataagattccaaaagattgatgcgtccctctgttgattaagaaccaacatgatgaacatataggcgcgaaggaagtaggcatcttgacacgaaataatttgacagacataccctcccgtcaatgccttccgaaggttttctttgaaagccgaagtcagagaatatttcgatcttgatgatgactctttcagtatgtgtcgatgttcaagcaaagctagtgctgccgtgtataaactgttgaggagtcgtgttataacgacgataatgatgacgatcagaagattgaatggattttcgtatcttcgccgctttgctctacttacggcagattctaagggccaagcagacagacgaaccttttggattctccttctctgatccaaagtgctaaatcatccttccggagagaaccttccatccaaaccagtgaatatacaatttgtctcgccaagggcggcaaaagcctgaaaatcgacaaacatccagctggtgtggagtatagtcttgttaacgtcagttgagactgagcagacaggtaagaggggagggaagtagtgaaagtttgagatgaagttgccatcggaaggacgaccctaaaaagtggtaaaatggatgagcaagatcgtgtaatgattcatttggcgaaggtctagtatgtagctgaaactttcgtagttctggtcacgtgtagtgtcaggaatgacgtttttccgtcttccttaatgtcctctttctctgtccttatcttgcttgatgtcgaagttcacagaaaccaacaatgaagcataaagtatcataatacagcatggtaatctagaccagccagccgtccaggcgatacggcttggtacataatccgagtccgtaaggaatggattttttaaatttgtcttttaggtatatccagaaagaattaccagtttttgagcatgtcctttgtcataggcacagactccatctcctgctcatactcgatctcgaccctcggtccagaagccttcttggccttcttcgctggcgctggaccagacttctttgtcggggcaggcgcaggggctttgcgcttgccttgtgtcggaacagtggcctccgattcagcctccgattcagacggtaaggactgtacagaatgagaatggagaatgcatcagtcgccatcagatccatagaagatatgaagaagaaactcacatcatctccgctccagtcctcaaggtcactcatatcgtcctcgtcgtcgtcctccaagtctgaatcgtcctccacgaactctcttgtgccgttctcctcatcccattcctcctcaagctcatcctcatcctcatctccactatcctcttcttcgagctcgtccatgccctcctcttcgcctaatcgatcacgctccatcaaggcctgccacacatcctcgttcacattcaacggtgcatcaccataagctttagatttcagtcgagacagcagctcggcttcaatcgaccgttctagtttggcggcggaaagcgccttggtttccctagctgcctctcgtcggtccagcttcttcttgattcccaccatggtcggcctagcgaagattatccatttgagaagaaacgagtattagtaatgagtgaggaagaagatcaaccttagagaaaacgataaacaaactcactgttgtgtagttgctagttttcgcatcttgatgaggtattgtgtaatctttgttatacgttgcttgcacttgtggatagtgaaatttggccagtaaatgagctccttctcgatctgattaatttagttgaaattcaagtgccaaatcgggtacagacgaatgacaaccaagcaaacaagggtgagcaaacaacccttctgatgatggcttgatcagagcaaagacaacaaacctgttccaaagccttggcgtagttattgcttaatttcacacgctcccacatttttgcaggtgaatgtgctcgttcgatcgtcttcatgtagaggtaagccacacctgatttgaacaggacattttgcgacaaggaagagacatgatccagacaagtgaaagggagaaaccatgaatcagctaatcgctcagggcattaagagaaaagatatgtcaaggagaccgaaacacaaagaactaaccgtccttctctcgaacagtcgcgtatcgcgagtttgctagcgggcaggactgctgactgcagaacccagttacgttgtattcatttctgcaaaaattctgagtagttgttctttgtttaaaggaagaaaaagaagaaacaaggaaggagttaatgttcaggacaagtaggaatggaagtatcgtcgccaacggtgagaatactaggtggccatgacgttggaagtgtacagagaaactcacttgactttgtaagagcagaactgtctgttgatgacctcccaaatgacttgatcagcttgcattgtgagcaagacgtgttgtataggtcgatgtgagggatgaagaaaggaagaagtgggtgagagaactgtaaagaaggtaatccaaaaaaattgagagccaaaagttttggcaagtcagcctcgtaaattctgataacccgccaaaccctcgcttccaccatcaacgtccagatctttcgatatgactgtagacaagacttgactcgacgtacccgctgaagaacaagagattagtgagccagttttctgctgaacgggtggtcaaaagtgcaaaaattcagtgttcccgggcttataggttcacctggattggacgtttctttttctttttctttttttcttttttgacaggaacagcttttgtctagaagaggagttaattcaaataattatctaagtatccgcacgcgcctcggcgcgtcagttgagacgcgtcttaatcaatcatcgattcatttctttctttcttttcgtcctacagcattcactctcacgcccgtcggcaatcatacacatccacttaccctcaacaatgggcacaccgagagtgacagagagacaggtgaaaatgaggatgagcttggaagagaaagaggcaattttggagaattttgatctcgaaggtaggttgtccgtcgtctctctcctacttctctgaagtcgttggagacgtagagtctgataacacagatctttcctccgtctttcatactttctgtcttttggaattcgttatgaataaagttgcccaccgacttgagaacttcaaaatgcttcaccagactcttcttgactcgttccttacccgacaagaaactgaa

SEQ ID NO: 1827 - DNA, 12404 bp, Xanthophyllomyces dendrorhous
aatacatcgaatacccatcgagattcgcaggctaactgtcaaggagctcggtgaaagatggtccaccggagggatgaaagacgttgtcgaaggtttagcaaggtatagattaaagaaggttcaggaagcaggtcggttgggagaagagagagagctagaagccagagaggagggaggcaaaaggtaagtcttcacttgctaatatgaatgtatgttgtctcttatttgacatcagctcatcttttcatctttgcatctgtgtgggtgtcatcatcggataggaaacgaacaacgacaacttcttctcagagcaccaccgatggacgtcgaatcaaacaacgtacgttcacgatcatgatgtctaacacaaggcagtgtttggttccgtcttcaatctttttgcatactcaatataattttgaaaacacaatcttagctcgagtgaatccatcatcaaataaatcgcctatgaaattcattcgaaaacctacaaagaccagcaaatctcatactaaaacgactcaatcggtttgtctttatcttctacttcgttctgctctcttctttcatccacttgtcgactgataaatgtttttttcaatacaacccctcggttcaccatcctcccatatagacatcgacaaatcacccttccacctcaagctcagctgtcattccgccatcttgccctaccttccaatttcaccctctgcttccagctactccactcattgctcgaacctcaggttcatacagaaaaccaagaaaagatgaaacaattgtgatgagtctaaatggtagtcctgtcttgctggacgagctattgaagagaatgagagatgaaaagtttgggtctgcgagcgatcaagatgatgatgttggcggagataattgtgaggaggaagatgatgcacaggaggaaggagaagcagtaggactgggattgcttgacgaagaggatttgttgaggaagctagaggaccaacagaatacctcgtacaacgcaactccttcctcttcgtcggaaatcatggctaagaaaagaacaaaggcgtgatgtgttgttgtgtttcgtatccgtctctctcattccactacatgtgctttacttctcttgccttctttcttcatctcccttccttcgatataacctttcataacagaacaatatatatgtacatgatttaaaatcatttgtttccctttagcaatagatgatcagcgggtcatgtagtgagacaatacccgtttggtgaacttgctagccttgacaacataaaaataacacagcatatagaaatacaaaaagctgcctagccaccttcgccgttgcgtatagagaaagctgttcaaacaggtttccaagggcaaacccttccatcccaaccgcaagtcataaggattccttcccttgttttgatgaaaccgatcaagtgatgatacaatcaggtttaatttgagcgaaggcacgcatgagattgagagactcactcaaaaaggctccaagcaagaccagcaacaaactcagtatgagcagattgagtggcaacaagaaaggtcggagacggtctgatcgtcgaccagctgaacaactcaaagtgaatgcggtacaatgaaattgatacgatctgtcattaagcattaattttcgcgataacaaaggaacaacatacttacactcgggttgtcatgtcatatcccccgctcgccaacacatcagccctccaaggactccaagcgactttcttcgccggatatacatgtccttctagtcgatgtacaggaaggctcgtcgggcctacattggatggtattactgtcgaagttggtgctgagagccgatttgcgcgcaggtcgtatgtctgaatagatgagtcagtcaaagtggttgctatgatctgttcgcgatcaattttgattccaaagcacttagcatgatttcagtgcattaaaaccagtatattgagaacaaatactgactccttctttgtatttgttccaatcaaaacttaggacttcgccaccattcatgcaccggatctcgaccactgcgcgagcccctcctgatccactgatagttccagaagtccttgtatctggtaagcgaaggtcccagagcttgaacgtgccgtcttctgatgatgatcccagaaggttgggcgaatggggagagaactgagttgcgtatacacatgcttggtctatcaaagagaaaataacatatttcaatcatcttgattctaaggaagagttgcaatgatgaggaaacgtacgagctaggatggtcactaaagatgtctgtctatctggagaccactgatttttccttcaggcaacccaagttgatgttcagaatcgaaccatttttctttccttctcaagacatcgtttatgtagcacatgatcgatgagatctactcactaatttgattgagccatcccagctacaactcgcgaagatctctttgtttagatttgaccaatcgatactcatgacctcccttgagtgctcgtgaaaattcttgattggaaagtcctatagaaaatgcaatattccgattgagagctttgcgatcagcaaataagatgctcgcgaatgagaaattgtaaagaacaagtattcacttgcaagttaagatcatagagcttgatgttcccatctcccccagcagtgactagttggttttgattgagctctgaccatgccaggtcgaatattgaatccttgttgtcataactgatgtcgagaaattcaatcacaacaaggaagcatcagcagctgcttcgatgtcagggatagatgagaggaagggctgactactgatcgatctgaaccttgcccaaaggacctagagaggatagtatgtgtagtctcccgttgcctaccagtccaaaattcgccgaacttgctaaagccaatcggtctaagagatcgagtcagagttgcattcaacaatatgatagtgatcgaggagagtcgaccggcgggatatgtatgcgatgaacgtatcagactcatacatactgggtatgaatggagaccaagcaatcccgaaattagaataaccagggatttgaagcaatggctgaagaggcatcatgattatacgaccttacgaagaggccaatacgtaaggatcgagtgcagtataaatcagagtcaagatgagtgttcgttaggagatggttcggaggagtcgggcaatgaggtattctctggcggatgctcttctccgatataaagctactttatttgatctttcgtacgccgaccatccttatcttcatctcaacagccatgtcgcacacagttaccgtagaacaatatgaatccctcattcaagctgctcttcaaggttggtgatttgatggttctggcaccaagatgcctgctgagaacgacttgtcgcgggaatatttagacaacatgtattctcttcttttctatatcgatcactttacagccagagatggatcttactcaccttactcaaagtttagagtaggtgctgccttgctcaccgctgaaggagaaaccatcaagggtgctaatgtcgaaaacgcatcgtatggtccgtcctatatctccttcatcatcttcttggctgtggccatgttatagaatcgacatcatatgtactgatgataatattgaactaatattgcccaacttaggggggacaatttgtgccgaaagatcggcgctttgcaaagctgttgtgcgtactcatgctgtctgttgttgtcactggcggctccgaccatctcttgttgtttccaaaatgccggagtttgatggagtagagactttgagctcacagatctgactattcaaccatcatctcaccctcttcgtccatcgtcaaagactgatggaaagaagaacttcttggcgatagcagttgctgcgtgagtctcttctatttcgttcactctcggtttccgaaagcttcatccaaatgtaataactatccggaatcttaatccatacagcgatgttccctcagcttctgtctcaccttgtggaatctgccgtcaatttatcagagagttttgccccttgactgtttgttctaatcttgaataggttcttctttctattccgctgtggaacgagacctaagctgaatcgacgtcgacactctacccatcttcctgatacagactccgattgtgatggtttcctcgacgtatcaaactggagattacaccaacgatcaacaggctgtaaatgaaaagaataaaacaacggtgacgatgacattagaacagttgctgccaatgagtttcgggcctgatgagctcaaaatgggtcagagatcctgaagctgtgtctgagatgggttgcaaggcagttccagttgagagagagagaagaaaagaggaaactgattggagagaccgcagcagcgaggaagagaaggaataagatagagacagagacagatgatggggttgtagagaccgttaatgcccagaaaaatgttttatacatctatactaaatacagcattcaccagaatctaaaatacatggtggaaaatagcaaagtatcaatatttaagcaacgttgttcatatagtgaaaatgtattagcattcatgcccgagtcggttcgtcccttagccttgatctattttatctctccataaattcccagccaccttggactcttgtcatgccagagaggtgttctgcgaatgctcaagaccagacctttcgacgggtaccgaagaagaatctggagaggtcgaacaaggttccaagaaaccctgcgctcgacgacgtcgattcgctcggggatttaggatggcggcaaggattaggattgtaagatccaagacgaatataccgttatagttcacctgtttttcatgaagatcaaccctggaaggaacacatcagaccaacaaacgggattcgattgatatagaagacaagaagccggaatagggacgtacggaagcaaggatgtcaaacttttccttgaaaacgagactgagagtgcaaaataaaccgcctaacatatccaactggtagacgttccgcccgtatataaattgtggcgcataagatgcaagattagatattccgtttgaaacgtcaaaaaccaagtgttgaaagaaacttcgaaccgtcataaaaatcagagacaatccgataacctctttgtacttgaagatttcataatactgaggactatcatgtatcagaaagagaatcaaaaaacacattgagtgataactttaatcattgtatatcataatgatagcgcaagcatgtaatctgaacacgtacataagtcccccaagaaggccgatgacagatatgactccaaacaatgtaagtggagcatcagttccattccgtattcctgcctgggaaccgaagggttgagagacataggagatgaaaattcagcagagaatattcaacccctcaatagacgatcgaagaagaattgagacatgactaacccttgtggcgaagacgagccctgcttgaagtccaccaaagatgagaagataaaccgtcaacaatatgattgatttcttcagagatagtttcctggggccgtaataaagacactattatggaccatcaagagacggatcggtttctggttctcagtcttacaaaagagtcatacgcgtgttgctgaaaggactaacctgaatccagcagacggcggcaaggaagccgaagagttgaggttgaacaatgatgggtatattaatattttgaacaatgcagtaaattccaaggaagattgaggcggcgctccatgtaaacctgatatcaaacatcgaattgacaaggtgaatcaaggtgacattctacataacagatttaacctgtgtgactagcgcgtacattagtatgctggaaagccccttggtgtcctttcttcgatagtttataacgatttgggggatgatctaagataagaagaaaaaaaagtaagaagattgccgcaagtgagtttggtcgaacgcaatgatagtttatcatacctgaatgcaccatagtacagtccctgatgaaacataagacggaaccacaaattcagtaagagcaaataaaacaagacttgattgaatgacataccgatagttccaaacacgttttctaatgcagggtttgcatacatgattcaataagtaaggatcgaaatgaatctgtccggaatgattcacgattgatagacaaccgtcggagagaataagacgaagagaaagcattggccttgaggtcgacggtggtattaaccgcttgatagccgagataattaggctagggttgcgacacgtgatcgaagctgtgtacgcccaagattacctagtcttcgtttttgtatcatcatctccagctttcaactttcttcttcaaaatactcgatccgatacggatgatgagcgaccaagccatgcaagagattccacctcctttaaaacgagctcgatcatcagcaacaggagctcttgtctcagactctggtgcggaaccctcagagtcaacaagcatcgaggagccaaagaagataaaggctcaaaccgaagacgaagctcaattggaagacgaaacagagttgacgacgcaaacatgggaagatctaaaggagctttgggaaaatgctatggatgagtttgaaggtttgtttattccgtgcttaagataagatctgagataatcatgtttcaactcatctatcaccttctcctcaaccaaatctaggctccgagccggcttcagcggttcctcttcttcgagggctgatttttgagtgtgatcgaatcgttcgaaactctcccgatccaaaccgaccacttcaatcttctagcgcaaattctactctcaatcaaaacgaaaacaattcagatcaagctcgatgggatctatctgttccctcgaacgtatctgtcacccaagttggatctacagggagatcatcaaatacaatcaaagaacatcccgggccacttcatcctgggcaggctctctcgaccttttccttctttcatatttatggtaggcatcgttgacatcaaatctaagtgaactctgcacatcaattcactgtatgctgctttcgtgctaaacctgaattcatttgtttatggaactttttatatccacttgacttcaggaacgacgctccttactctggccgatatattcgaccaagtgcccgatctagcagacccatcggagccatcgccagtgataatcaatgccaaatcaatcgatttctttgagaaagcacttcaaggatatcaagatgaattcgccgaatccgaacctcgttcgccaatccttgtgggtgaaggaaggatagcgtccgactggaggttagagattgcctggggccgagcattagttcgtctagctagacagaaacttgaggatggggatgaagaggaattaccgaaagaacgagttcaatctatcaacccaaacgcaaaagctggaaaggcgaaaggcttgatgaaaagcaagaagcgaacgcgagaaccagagcccgagcctgagcctgcgtctgcatctgcttcggcatttccaactgtattggccaagacaccggtttcattgttatcgcctcgacaacttctgacccaagcagccgatcattttcaactgggaatacttctcatgcctcgcccctcgccgtccgctactccttcccctgtagaaccgataaaaacaccatttagagatccagtgacatccttccagccaaccctcacctcacatcaacgtctcaagaacattctagagattgcaactagcgtaagccctcttgtcgaaaagttttccgaccagaaggaacgagttcgatgggccacttggacgggaggaatttttgatcaactcgagatggaggcttctcctcttcttgcctccttgaaggatggagcagatgagcagaaggaagattggaagtttgaagtcgctctaggtaaaggcgggctctggctaggacttggctctcgactttcagaggaattcgagacttctgtcgaagaaagtgaagagcaagatgaagcacaggcagagttgaacgaaagcagacggaaagaagcaagggaacttttgcagaaagctttggggtatttgcaacaaggccgaaagattcggcctcgaataactatcgttcaagactgtgggaaggaagaagatgaagaagatgagattggcccgttactggtggaagggtatttgacgctcagtggtttggtagattctgacgacgatgaagaaatcgaacggttggaaggtctcgctaggaacgaaggttgggttgaggatggagatgacgaggaagatggagatggagatgaacaggatgaggatgaagatgaggaagacatgtccattgattgattatcaacaaagttataatttgtttgaatagatgtttgattaaactcgatataacatctggacagactcgtgttgcttgtgtgcacaagatttttttgcgctaaccctcaactatcttgattcatcatagctggtgagcttgagagcggccatggtatatcacattcctacatccaatcatcttttcgattcttactctagctcttttctcccctgaccttgaattgcctgcttctttcgtgagagcaccatgagatgcaatccttgtcggtcgtatgtcgatttcaaaggatcgtcctctattgtctcggatgagaaggatttatgtaaaagtgtaaagaatcgcttgtccgccttcgaatcgatgcatgggcagaagtgattagtcccaaatcgatcgaaagtcttgcggatgtatgtagacgagctcacctttctacgctttttgtaagcgaggtagatgattggttgagattcttgatcgtccgtcagcagtatcagtgtacggactgtgatagaagatacgaggaccaaacattgagtgactttctttccagagagcaacgatcacattatttacgcatacctagcagaggaaaactgggctcaaagtatacgcagtccgccatgaggacgtagtcgggctttggtatgctcttgggcaacactgattctccccaatcaagcaccgaagcttgcactgtggactccaagccgttcaaagcgacgttctccctcaagagtggcatcaacggtctagaaagtcgagagaaatgtcagaacacacctttcactctctatagtatgatagaatagccgtatgtacgagcggaaaggcttactcttgatctgtagcgtatatgttcgctcttggctccttcaatcctagcaccaaagcaagaatacctgtccccgcgccgagctcaagaacatttttgccagccaagaggtcgggctgctttgacatcagatgcaaaaaatagttacacatgatctattactaggctcgtcggggaatagatagatagaggagaaccatatgtccaaagacagaatcagtactctttcaaaccagaagggagttttaagcatatacaaacctctccggctggccaaacttaaaacgagaaaacgagaacagagttaggtgatcatcaacacggtccattcacgaacaggtgaatatatcatggatgaacaaagactcaccaacaccaccacatcctggcgaggcatctattgctagcttgcatcctctttctagcccatcgaagggaacaattgttgtctgatgaagaacagtcggcctttgatcaggtcccacatcggcattgtccttgaagaagtcctcagtggacgaccgacgggacaaatttgggcttccagtgatgatttcagtcatcgatatgtatagatgtttgtggtgtctaccggataaatcgcttaagatatgtatgagtcctctccgtttttgggatgtgagtgtacgtgtgtccaggtgtccgggtgtccaaatatgagcgcgccgaagagagttgtatgctcgatggtatgtgggaagaagcgaaatcaaagaatatcagattctctacccagtccatcatctttgaccttcaattactcgcttgtgaccgatccatcgtcttcttcctctcgacaatctttctttcgtatctctttgctccttgagagaaccgatagggagtacaaggatgaattcttatgtgagtcacagtcgactactaaaccttggttattgctgctgatactcaggcctgatccaatgatcacatctgcagcccgtccactttctatcacatcatctcccactcttgtttgtggccgggttagaaacagcacctcatgccaatccagtgatcccatcagaaacagatgccacagaaactacatcagaacttgcaaattcagccgtagaaggctcagatacctcgacaacacgcccttctcgaaatcaacaatcaactgaccagtctgcagcatctgatgaacactcgttctcgttgcttcatcaaagactacgagcaacattaggagcattaggacctagtaaggtctgggaacctatccgggcaaacgaggatgaaaatcgaaagtttcgagtcataatggttgacaaggtctgttcattcttatctatctatgtgaatgagcagaccaatctaaatatcatctctggggttccggctctgtgtgcatctataaggatgtccggtttccaccttccaaaatccctttcccttcaactagcaccacgtccggtcaagtccctccccctcctcgctcaccactatctccactaacaccgtcatctcccctctatcccgacggactgatcgcacctatttgggtacgaaagcacacagatcttgtgccagcggtgtttgtattatttcttcaattgaaagagagttcagaccctgaagtgaatagagcggcagatgagcagttaatcaaggatctcatggtcagaaggaaggcgctaaacgagagaggaatcaagttgactgtcgtccttctggccagtagagagttactcggtaggttgcatcatgtgccgtgactttgtctgcctcttgtcatcaactccgttaatgagaatcatatgctgatatttgatgcctaactttaccatcagatgatacaacgctcgatcctcgtctctctcaaattcgtcgtcaatcttctttggactctcgagcgtcgctgttcgttttgactcccgtctccacacccgagcttgtcgattttgtacaatccctccaaggcgtactatacgaacctgcgctagattattatcacgcgcactcgaagcgagtcagaagaaagaggggtaaattaggaaatttgacaggggcatctggcggacttcttggtccatctgctgggacgggaggaaaattgctaagcaaagaagggtgggcggtgaggtatgaattcaaggctggagtgtttgcagaaattatgggagagttagatgcagtgagtgagtttcaaatggttctaaaatattatcttcaacttacaccagtcccaaaatgtcttggataggcccgaaaatattatctggactgccacgctatccttacccaaatgtttcactcaacgtctctcctgcctcctcgaacaaaacgatgggcggagagcaaggtgttggctgattgcgtggcagtaaaagtttgcaagttcttcttatatcagggcgatacaagcagggccctcggattcttcaggagtcacctcaaggcgttcgaagatttaagtaaaggttggggtataggtgaagaaaccttcgagttttggagctgggttgctagacagtaagtatagaagcagatttgagttgagttcttttgatcaagtattgacttatggagcggtctgtgttcgctcaaaatcaggtatcggattttcgcagagctcctggaactggcttaccaggccggtaacctcatcattcctgttgcagaatcttttgcaactccttctaatgaccaagtatcaaccaatgttctcaatccagctaccactctacaacatcctggtttctacttttatactgcagctaggtgcactgtgcggcggagagagtgttacgaaaaagctattgatgaagaaaaggacgcgctagaggtcggtctgatcggacttctgacaaagatggtcaagatattgattgcttgacttttatctttcagtccgagtctggtgccgctgctggatttgtcaacactagccctggatttgcaaacgaaaagaaaaccgatcactcggctcttatcattgaggtttgtctggtcgagcttgctcgaacttcttcgacactcgttttgttaaatttgaatacaaagttaaccttcttctgagtctatgttgccatttctagctctacacgaaatcatacgagctcctcaaaacaacgccatctgttgtggcgaccgcaagtccgaaccaaactcgaacgacactttatatagctttcctgattgccgaagcctatcatc

SEQ ID NO: 1828 - DNA, 10262 bp, Xanthophyllomyces dendrorhous
ggccaacacaaccttgcgctcagatttttcgaccgaatcagcaaactctacagaaaggaacattggactttgctaggaagtcagatgagaaaactttgggtggagtgtgcgaaagaagagtgtaagtgggggacggtcattaaattagcgattgaaggtttaggagagggagaggcaaattgggagattttgttgagagaggctttggaagtaagttcttctctcgttaaacgatgactgcgttgtaacttagcgtccattggttttttaacttaaactagaatccgggccccacgccacaagagaaatcaatcatcaatctgggagaatcctcagcgccgctccgtaagtattagacatctcaactcatagtcattgacttaagttatgactgagcacaagcgattatcttatttaacagtggaagtgtcatcgattttctatctttcgacgactctcgccaacaattcctcgccttaccaagtccatttacattgccccctcaaaaatcatctccacaatttgccgttctcctccatccgcgtagagttctccgacaaaagtatcccacccgttttggtcaagcatacagagtcggaatctaaggaagtgcagttggtatcaccagatgaacagggaagcgggggagcttctctaaggtggaacccgggtagtctactagtcatctctggaaagatcgacacgaccggtatcataggggagcttcaagtaagcggttttcaactatgaagtcttagttgagcgcccgtctaagtgtttctttgtcttcaatcgaaataggtttctacagttgtgttggaacttatgcagaatgattgggttgttgagcttcgttttgatctgggttctaacgaacccagatcagcattgaacactcgatggctcacagcgccttccccacccaaatttgtcaatatcgatggggttcatccttctttcacagtgtgagtgatgacggtgcttttctcagtcgtaagctattgggtcccagttacaatccgctgaacctttcccttttatctcataatgcgtgttttctgcgctttgtcagtgtcaagcctaagcctcatatgttggatattatgttgcatcatacatcaccggcatatatggatgagaaatacccaatctcaatagatatcacaaattcagacgatcagtcgttgaatgtgtggctggatgtcttactgtacccatcggaagatcaacgtaagtactggctcttatgcgtgatgtgaaataggcgaaaagtttttcacgctattctatcactacttttagtcaataccatcactctggatgaatcatattccagttcgatcatcaagcaagtatccctcggctctctttcccccacatcgtccatttccaagactctcttcctccatttggacgggataccaggtgatcgcatactcgacttttcaatccagtctcgtccgacctcttctatcaaatccctctcgttagaagcatcttcaacaccaaactcagaccaggaacatgatgttctcgaaaagccatcagaaattatccgtacaattagcattccctgtgtgcatgccatctcggcatcgttcacaatgagaaggaacccaccgcgcaaaccacttcctgggttgttggacacagcccatttgaatggcgaggatgtgttcgaatcggtagaagaatgttggctcagttctaaattggagatggttgagagtgaggaaatcgtgatcgagaatatagaattcaaacaaggggtttgtcttcttccgctattgcacagggttcagaagcctgtctgaacaccgacctgctctcctcttttgtttttaattttgggttactttatataggatcgacgaaggtgcagaaatgtcttctcttcattaagttcttctcaagaaagtatccccggaaaaggtgcggttcaactctcttccttaagacaagcttgaaactgatcagccttacgaaacaaataaaacaaacagtttggaaacaagggcatgtgttttcagtactttcttccttcgatctggcgctccctgccagtttggatacaaacctcgaaacggatagcggtgaatcgcctggctggttcgacatcacctggcgaaggaaagccacgtccactcaaacaagcaaagcagcgcacaccttggtacctcttcccgcgatatctgtctcgcctcatctatcgacccctatctctattccatcatcgacatcccacctttcatgcaccctatctgtctcgaattctgaccttcgactgctccagccggctttgatcaatctgacaattcataatcaatctccttcatatgcacctgcaaacctccagatacaagtagactcatcggatgccttcgcgtggtcgggccctcgacaggctgccttgcccatcttactagctggtcagagtacgattgtcaggatgaaggcttcaccgcttcggacaggctgggtcaaattgcccagggtgagggtgtgggaagtcgttcagtcggctgaggagggtgaggaggcagagacggagatcaacccggttcgtgtagataggcagggaatgtatggcgacggatcgagtataactgagaacggcggcggagaagacggaagggcagaaggttggaaggtattcgtactgcctgtttgaagaggcttgataatgttcttgataagacgtcgcttgttgcacgttaacataattggtcccttgctcttaacttctttttctcccttcaactcaaaacgcgaacacagaggaatacctcttcgccaggctagtcgataaagatataaatagacaatatctcaatacagctacacggatctactctcaatttctgaccgatcctgctctttttgttttagaccaggccttgttcttgataaacgcgtatttaacagcaagacttggtctcggtcttgcctccacagcaagattccgaagactctgcagacttgctcttcatgttgcaaccagcacaaacacatttttccggagggcactataaacaacagtgacgcgtgatgttagcagttgcaagagagacgaccggatcatgataagggcggctcacagtgcatttcaaaccgtctccttggcaaccacacgaggtggtatctctcttggtcatgtcacatccggaacaaatacactgtccagggacgcactgagaaagtagagagggatggtcaagctattggtcaactgcctttgatatatatgaaaaaccggtgatgaacgcacagtgcaactttgctcggatcctccacaagcgcaagtcgtcttgacttccttcttggtcatatcacagttagcacaggcgcaactgtcggtagggcactgagacggggaagtcgggtcgagagattaattaacatgagcgttcaggacagaggtgtatcgagtacagaggatggaaggtattaaaaatactgacagtgcaggctttggggtctccgccgcaagcacaaacactgggcttggtagaacagcttaggtgtatgaatttgggggagagagggtaaatagaagatgatactcggtcagaagttgtaaacacaagctcggtcctcccctgaccactccacagtgaagagaaaggaagctacgagcaggccattttggttctgtttttgtggttgagtggatgaaaagggaagaggatggatataagtgtaagtatgtggaggacggaagataacaagagaacgagccacagaggttgacgaggctatcttttattcaattcatcggccagctcatctgtaaaagcccccgcccatgtttggccagatacgccaagggttcacccacatttgcccagactgtttcattcgcatatagcctcaccttcttgagacttttaaatgagtctgctttatcaaacaccacaccaagaaagacagattgaattccgccgttagaagaaaaaagatttggttgtgctgacttggaaatttcgatcgtactgacttccaactttgtccgagatgttcctttgttgacattgcgctgatgatgcgttcagaaatcatctcgtactaacggtgcctatgacctacttgcccctgtcgttaatgtcgttgttgttgttattgtttgcccgtcgcatctacagagaataggcaagaggtcaaaagagaatcaactctaacctgggttttcagttgctcagcacgttctcctcccttacttcaccagatcttatcgtagcgccaccccctcgtatgcccgaaacaccacgccgaacccggcaacctactgacgagcctatgacccctcgacgggcccatcaaccctccttcgatctgggatatggaacacctcgctccccacgcgatccccttcggttccctgcacaatcagctaggcggaatcggacggcttcaggtatgagtgatgtagcactcttggactctcaggagaaagatcctcatcatcacaatcgatcccatatgattgagaacgatcgggaacggttggtatactccagagaagaggagtactcgtctccttttcatcaaaggcaaccacaacagcgcggtgctggtatgggcctcctgccggagtttaggtatgatcaagctcaatatggtgaatctggaagaaaccttggtagtatgccttatccaaggactcccgcgggacctggaagcgaatggtccaggagacagttgatcccaaagaggggaacaacgagaaagattcgtctgatcgaagggagaaactttgtttgcgagtatgcggttccgacggctatccgaagtgcggtggaaggaaagtatctgcaaggtacgtccccgtgctcgaacaagttcttatatcgtcgtcatatacgattgctgaatgtacttcattttcaaatccctaccttcatgtcatcggccttgtgataactagagggcaaagtgacagagttttcgtgagttctgttacaacttcgaaacattggatcattgactaaatacatatgtcttggtgatctttccttcttgaagacacatgagatatacgggtaggcgtgcttctgatcactctttgacgctgctgtcactaacgtcgagctttgtctgcttcttgcatttagcggctacctgcgaccccgacgactttaccaatgccaatggctggtctctgcgaacgtctaattaccgtcgtgaaactgagctgctcattgcagtcacctcttgtaaggtcatttgcgctgagcaaaagttgttcaccttgtgaacattaaccgactgattctgtacattcttgctttgatatacagacaatgagtccaaagagctctattctcgaacacttcacaacattatgctcaatgtccgggacatttgtcgatctaaaacatccaagtactggcgtaccccttcagagaccgggatcgaagcaggatttatcaaacccacttggcaaaagatcacagtctgtctggtttgcgatggtataggacccatggacaaagaagttctcgatctcttggctactgtcggagtttaccaggatgggattatgaagaaggaagtcgacggtagagaaaccgtcgcgcacatattcgaggtcggtggtcttcctgcacactggctcatacaatgtaggaaatgggcagacacagaatttgctgatcatataacacttcgacgtaattcgtttttcctaacagtacacgactcaactctcggttgactccaagccggcgctgaccttaccccgtgaagatgatcccaataaccttgttcctgtccaaataatcctgatcttgaagcagaagaatgcgaagaagatcaacagccatcgttggctttttaacggagttggacgcatgttgcaggtatgtcttctctaaagccatccaaattaggtctttttaaaaaaaaggatattatgcgtactcaccagtcgtatcaacggaacccattagcccgaaatttgtgtgctattggacgcagggacaaaaccagggcataaagctatctaccaccgtacgttcacatccttacgtctgcatcggaaatcatgaggattatcgcatctgatttttcatgttttccttggtattcactagtctgggaagcatttcatgtgggtttcattcttgtctccaatacttgtacgtggtcgaaactttgttgttaattttcaactcaacctctcagaacaacgccaatctaggtggagcatgtggagaaatccatgccatgttgaaaggaggcaagaagcttttgaatcctcttggtgcgttcatattatcttcttttgaaatcagttgcagatcgacaaattgacatctacccttgtttctctgattcttaagttgccgctcagaattttgagtacaagatgtcaaatatcttggacaaaccgttcgagagtgtttttggatagtaagccgtctgttcatatacacgttcatgaaagtaatttatgcccatcttctttcggtttcacttgtttcaagtgtgagcgttcttcctggagcatttagcgcttaccgtttccgcgcaatccaagggagacctttggaacaatatttccatggagatcataccagtttgtcgacctttctttctacatccggctatcgtgacgcaaataatcttacccttccttatgttcgaaaatagtggccgagagacttggcaagaagggtaccaacgggatggggattttcacgtgagtcgatatctattcacccacataatttagaatatcgctcatacgatccaatacgttgtcttctacgaaccaaagcaagaacatgtttctggctgaggacagaatcctttgtttcgagctagtggcaaaggtatgttccttcaacttttattttttgatgttttctggtatcaatccaacgatgttgaattgtgaacctatatcatttttaggcccgtgacaaatggaccttagcatatgtgaaggctagtaaagcggagactgatgttcctgaggaaacggcggaactcatctcgcagagaagacgatggttgaatggttcttttgcagcttccatcgtgagtcatacccatgcctcatcccttgtgatatgttcgactctgatgtttattctgtctttcgctccgtagtattctctctatcatttcttcagactctatcggtccggacacaatatcatcaggtgcgatgatgttcttacacattgatatgttcatgaggctcatgatatcaccgttctttctcttcagattgtttttctttcacattcaggctctggtgcgtcctttcaacgtatgattctgtgtccttttgatgaaggttgttgacataaccagatattgaatatacagtataatgtataccagcttatctttagttggttcgcgctggccaacgtttggcttacattctccatcattgtcagtctggtacctactctgagcccaggaccgatctatctctttggaacccctgcagtggtgagtttggatcagttcattactgccaagcttggcattctgctaactgcataacacccgcggtttctaccggatattcttgttccatcacaacaagacaatttgggtcaacaatgggttgcaatggctctatctgtcgcttctgatgcttcaagtaagtcaaagacgacatttttctctctatgtgtttgacatcaagcgctgatatctttgtttctccaaatgtgcattgttcagtttgtgttggcgctcggaaaccgtcctaaaggcgaacgattcttatacgtgatgacattgacgttagttacaatcttgattctcgtactttttgcccattcaatgcttattgctatctagacctatgtttgcgcatctatttatcaggatattcgccatcttgtcagcctatctcatcgcctgttctgtaatcctctccgtcaaagcgtttcaggtgcgtacattatcaattctacattcaagcccaagcggtaaccgagatcgattggttttgccgttattgaatatgacttcatagggagtattcttaaatcctgatctgccaggcttggcccagagatttgagtctctattcaatgcgacgaacggagtactgttagctgctctagcttcaaacttcggaatctatctatttgcgtctgtcctattcgtgggtattgtcttgctggttgcttgatttcgaatacatgactgatggagttttgctttgtcgtgctgtgatatgggttttatcactctagggggatccttggcatatgttgacgaggtatgcgcccaaggcaccggaagctcatgttgcctctcatcagctgggcatatgttgataatcgttctttcggtcttgcgatctagtttcccacagtacatgctcatcgcgcctagtctgaccaatgttttgaacgtatatgcattctgtaagtaactcaaatggactggtcgagtttcattcttttcctgagtctgtttcatccttgaatcatatttaggcaacttgcacgatgtgagttggggaacgaaaggtaagttcatagatggttctagctccgatagtcaagaagctacgggactgacgctacatcggacattcggataggttccgacaaggacgatactctgccttcgatctcatccacccacgaaaaggggcagtccgagccagttgtcgaggatattgagaaggcaagttcatttgacaaacaatgagcgcccagtgtctgccccgtctgataacaagtctgcatgcacattatcatacaggatcaagcggatatcgaccaggccttcaaggatacggtttccagagctatctcgaaatctctgccagaaacagttcacgagaagcctacacctgatgtcagtttctgtatctcttatctttcgttaccatattttatcgagtatgctcaattgctgtttatgctttgttgcttacaggattctaataaaacattccggactagattggtctgtttatggatgttcaccaacgccgctctcgcgcttgtcattcaaaacctaaatggactagacacaaccgatgctcttgtcctccattgcatcaactcaaatgactcaaataacttgcagtcaccttccatggcggattgtgtctcaatggcaatcaacgaaaacgaaatgcacctggtgaaaaagcaaaacgtgtacttcaagtttattctttggtcaacagtgagtgcctcatcgcgtaacctgtctgatagtgtcggacaatcatgtgatgtatctgactcaacaacttattcagttcggtctttcctttgcgaggtttatgggtgtaagcatgcgcatgatcgactcgttgatatatttaacgagtcaaacgctgattatctttgtttaacgcttatatgccttttttatgattgaaaacagtgcctcgcgtactttatatggcgtaatatgactcgatgctgccgtcgctcgtagatacatcggtgattcaacgcataagtcattaactctcttttctttctttaccttacaaatgttgtttcgattattctcaacttcgtctatgtagtttttctctcgttttgtcatgtcctaatattcccacatttactgaggaatctgtatacccaagacaggttcggtagtttctaaagatgtatcattttggcaaattccccagataagataaacataaactgatcgctctaatgttaaatgaaagaaagtcgatggatgacagataggaaagactaatgctgctgctccaaaggatgtatgattgctcccagctgatagagaagaatgatcagaagaagaaagtgacgccagaacattgttaaactactacttccccagacgcaaactccatatgaaagaaaaacgaaccttggtgacaacgcgaggcattgtaagcttctgatgcgtcttcctggtagcccactctgttcccacagactgtgccaaacttgcttcgtattgggcggcactaagagatcagaaagagaggatatcaggatacgaaaccacacgacaagagagcaagaacaacgagtcttaaaaaccaaccttgtgtaaggatacggtaggtcttttgtctggaatttggaagctttcttgtctttccgttcgctgatgatgacattggacttgttgaaatctttccgctgtctttgctcgatcccttcatgttttcgaatgaccttcttctggttcctttgcttcttgacacccgttcctccccaagcgccctaatgcaaaaacaggaaaaggtcaattggaaatgctctcacgcgatccgagattcaaag

SEQ ID NO: 1829 - DNA, 11183 bp, Xanthophyllomyces dendrorhous
gatataatatcagacaagaaaaacacatacccatccagggagagtgatgtcttcttccattggggcatctcgagcttcttctcgtcgcttttcggcagcgaactcctgatgataggatcaaattgaaaagtgcagaacggggtatggtcagacacattatggaacaaggaaccggagctggagatgaagaaacgacaaagaacaaacctcgactacgttatctccagcaaatgcctgggcgacaaggtccctctgtctgatggccaatggaccctgcatctcgtggtcctcgatatcactatcgctctctatttcgttttgagcctggtcttgttttgccttcttgccttttctacgtttctccgtggcagaggcaggaggggcggcgccttggctgcttgtcgtttccgacttcttgagtgagacgtgcgacggatcgatttctaccgcagcatcctctctttctctctgacgagcctcctcagacttggacaaggacttcttcatagctttcgcgctcttctccgcgccttcagcttctcgaccgaccaagttgttcttcttcctggagattttcttgcccgacgaagaagcggtgagccaagggttttcttcttgaacagtctcaccatgagaagcagaagtaacagtagccttattagcaggctctatatcgtcttcagcggaagtctcgaaggcagaataggcagtggtattgtcaaacttcttagtcggagtggaatcctgcaagattattcagtgaattgtttggaaatccagtcagtgctcacgattagcgatcgttcaatatgttcaaacaagatgacctacattgacgacagcagtgttgaaaaccatacgtcctttattacttccaacaaaagacggtccggcctggcccgaactgccatccccttcgtctcccgaaatctcctcatccgactccttaagcttgcccatctcccgcttaaagtcatctaactcctgattggtttggctctgagctctagccctagcatctgccatgaacttcatgtcgaacaagcccgacttcttggagtggctctttgctccctgagcgccttcgacaccttcctcttcctcgagtctggcaagctcctcaagcgctctgccccgaatctcctcgatcccctctccttcttctccctctgaagaatcgtactcgtccgagtcagatccgtctcctcgcccttgaatcctcctctttaacttatcaccctgttctaattgctcattcagctctcttctttgatcgacatcaagatcgtccgcttttccgagcatgctcttcgcccatttgccggtgttcttgtgcctaagcgtggccctctcgatcgctcgttctcgctcccttttgatcatctcttcttcttcatcaacctcaggacccagaccagcatcctccaacttctgcgcgtttctctccttctccttcttggcaatcttccggaaagcctttgacttgattttagagactcgcttcgcttttgcttcagctcggaagttgagttcacgcattcgtcgaagttcggctcttcgggcagctacctcttcaatggtaagattcgtcatggcaagttcttcggtcttgttcaaatccttctcggacatgttggcagaggcgataagggaggcgacggctgattcgaagtcatttgttggctgtaaaatataataccgttgagtgaggcatagcacaaaatattgtcaacaaaaataccatgattgataacaacacagctacaaacgtgagaaacaggaagcacacaccttgaacttagacgaaagagttgcactgcttgcttccgatttcttctggccctgaagagggaaactgagatgctctgcttccttgattctcttcatactagggccccacttctggacttcttcctttgtggcctcatacgcggccactcggtcaagcttgtcctgggctcgagtagcaagaggagcggcaacggcggtggaggaggatgacgtggatttgctggattgaagtagacgcttagcggtcgaagaggggagaggctggagtagagactgaagagtaagctttccacctgtgttttatggattaaatttcggttctatcagaaaacgagccagacactggttatgaataaactctgtggcgtaagaaacaacacataccgtcctgagcaagaggtgcaccaaattcaccctcctttcgaccttgctcggctcgatctttgagcacccgtctttttgtcttaggcgccacatcttcttcgtctgactcctcagcctttctcttcccagaattaagattggaaatgaaggactcgagccggatagctccatcttcgtccaagctcatctcaccctcgtcctcgtcctcatcttcttggtcttcctcagagtcatcatcatcgtcttcctcagagtcatcatcttccatatcttccagttcagtgttcttgtccctgctgtcgtcttcatcatcgtcgtcgctcgctggtccactcaggaaggtactgagatcgacgaaaccctcaggaccagcttcgtccgagtcaaaatctacctcctcctcggaatcttgagatgatgtttgctcgaaaacagaggcttgtcgagccccaatggcagaagaagtgggatactcgtcagaagaagattcggccaggtcaatgtcgagatcctcatcatcggaatcaggctgtggaatcgaccgtttggtcttattatccacaagtcaaatcaaggtttcacagtcagtaatggtctttgtcgggatccgctacaagaaacaagatccaatcttgaaacgcaactattgttttctgaatctcataggaagaaatacaggaaactcagaatttagacgtaccttcttcagaactttctttccttttacgttcttcttcatgaatgcctctccaaattcagcgtctccttcaaacgcatcgtccgactcaatttcctcatcatcctcgtcatccacaactcctttcccctctccactgacaaactttctaattctctctttcatagcctcctcatcatcctctgcattctcatcatcttcgtcgacctcatcccttcgttgggctcgttgggctctacctgaaccagcctcatccaacgtcaagtcggactcgacattcgaccgtttatgtttcatttgagcataatcgaagacctctaaaggatcggcatctgcgtgcggattcctacgggcttgacgggcggcataacctgcttcagctttggaagcggctgatcctcctccaccactttttggtttggatgtggaagcggatgaggcggagaacactgctcgaggcttgttccccgtttgattcgatctagatttccccatattgatgacaggttattttttggaccagacctatgctagcttatcttgtccagatgtttcctaagaagaaagagagaaagagtgtcgtctggcttctgttgatgaagaccggagggaaggaggtaggaaaggaaaggagtgagaattgaattatggcaggttgcgggtcgaaacttcaaaaaatactgtgtgggggccccgcggctgtgctcccaataggccatgcctcattttacccccttgcttgctagctagcaacgacaaagagtttgctcaatgtgatgcgttcatgtagcgcttcaatagcaatcacacgatataagagaaagattttatcgaagataggtatggtaaaagtacatgtctttacacaggagtcgagagggatattatactactacattgtgaagtgggcatcttctaactatcccttgaaggagcaggatgattctaaccgatcgacaaacaaacgggtgactaagtagcctgaaagagggtggaaggggatcgaaagcagaactgtcttggctatgatagcttcctctccatccgtgagaaatacctcggcaagtcgatccgcatacagtggagtaataagacaataccctctacacccctcttatttactactctgtttgtatcctcctacgaagagccgaacaaaaatggtcataaaaaaaagtcctctatcagaatgcttgactcaatcaggagccgactgaagaggaccacgaatagggataaaagacgctcacctttcttgacgtccagaaccatctttccgcagatagcacatagtccctttttgtacgcgcaattttgacaatagatagccatgttctacacatcgaagataagggaaatatagagtcgaaccaaaagccgtcaaacgagtgctctcaggtaaacatttcaagaccgaacggtgctatgggttaaactcacttgagcaacagatgacttgcagtccttacatttattgctgtacgttgaatacggacttaagagacggtcgatttcaaccgtaaattcaacggacgatacaacaatcagttctcacttcaacgtttcggaaaagatatcgaagaagtagaggtgaaagaggtgtgactgacgagaaacgtttggacgataaaagtttgttttcgccaatttttctgttggatgaggatgaagctaccgtctaaaacaccagaacaccgttaaatgtttcagaccatacttgcaaaatcgataaatttcaatcgtgctatgaaagagagaaagataaagagaagcacagaatgcagaatagtaggaaagtgaaacatacaggatctggagcggcaagcctgctcgtctttttctcacatttcgcacaaaccatggttttacactcaaaaaagagccgttatacaaagacgtaaacctgtatacgaagacacctggaataataacggtcagacaaagatggtggttgtgatgttggtaatgacggaactgaataatcggttggtgattgataaaaagcagatatgagtatgaagaagggtattgaatgtaaccctaactctgagttataaatgctatcctggtcaacatttactctcagtccgtcggccattagtgtatgaggccgctcaaatctggcgttccacagacaagattcataatgccggtctatgagaaaaacatgcgatgagatacttgattcatcaattaagcaaggtcatcaggtagaagtacacaagcacgatcacaaaagaaaggaagagtcagaagagtgtagatatgaaattctcgaaccgagaaccgtgaatatggaattggagaaggagagggattctttgagggatatgaaaaggacaagcatacaaaagactagatgaatctacgcacgtgatatgttatgaaaagagcgaagtgtaacagatatagttcagactgtcgatttgggaagaaagcagataagaggagatgatagaggaacagaaagaagagagaagaccggaaagaagaaaaggcgaccaaagagagagcggaggactgaaggatgaagacgaagggaacgaacgtgatagacgagattaaacaccaaaaactacgaagatgagcaacatcaagataattatctttgtgtttagcatgccgagaaagataagaccttaagaagacttgccagcccaagcgtaagggtcatcataactctttgtcacgctcgtgaactcgccgaacgggttatgctctgcttctaacggggctggtagacctgaagcatctactagctcaggtggggagggaaatcctggcgtgccaggggtgatgggatgaccggcaacgcctcgaatgagctgagactgatgatgtagaaggcagggcatgggcaatgatagtggaaacgaaaaggcgagttagaagcagagacattcttatgaaggggagtcgtcaaggaacgagaacgagaacaagaacatacaggagcgactggcccatgctcttcaaaatctagcgacttgctgtctcgtatatgccggaaattgacagcgtccacgccatttgacgtcgcagggacaatctttcaaatcgtgcgcccaaaaaaaaggtcagctagttgttggattacgagacagagtataatgatggaggttgagataagactgaaacgaacaggtggagtcatatttcgaagtagtccccagtttagaggcatgaaccacttgtgcccctttacctcgctggctcctgattgagagccaagtcgacgaatctcttctttgcaaagtaatttgcgaatggcggacttgcaattcctgttgaaaccaaggacaacgtccgcgatggttcatcagttatatagttggaagaatcgatgtaaccaaacggccaaaacttacgcagacacgtttggatgttccggaaagttgacctcgtgttttagcacgtttgaaaaggttgcgtttcggttctggcctttgaacggagtagttgcgaactgccagtatacgcaagaaaagttgttgttagagccaaagtgtgtgaatatgaacgaaagaggatcataaacacatacgatcatctcatagaccaaaattcctaatgtccaccaatctacagctgaggtatgtccagttccttttattacttcaggagcaatgtactcttttgatgacgaattagaagagaaaggaggaaaagaaataggagatcagacaactgatgacagtccctgcaacggtctacttagcttctagcaagacaagcgcaccttctgtcccgacgaatgaatttgttcggaagtcggcgatacaagaacgagtatctaccataggcatctatagatatcatgacagagaaaaagaggtagcacaattcaggttagccattaagacttcgtttagtatatgtgcagagaaaaagctgactaagagaacatacacctgtagaagcactcgtccgtatcaatgcaggggcacctcctggctcgcccgattgtttcgacaagtcaaaatctgaaagcatgatgtgaccagactggtggagcagaatgtctgagtatcccataggagggatcatcagcggacattcgcggaacaacctacttagtgagaagagaggaaagagaggtcgacatactctctggcttgagatctctgtaaatgaatcccatcaaatgcagatattctagtgcagctatgacctctgccgcataaaatctggcgtcctcctccggtaggcattttccaggtctcgtttgaagggctcggaagaattcgccgcccatacaatactccatgcagaaatataagtaatcctcagactgaaatgagtgaaacagtgtcacgatgaacggatggttcgaggtggccaggatttcttgttcggccagagcccgtttgatcttgtttcgcttgatcatctccttcttggacaggactattcaaaagacaagtttgtataggtccacggttgaatgtcgattagcgaaacgcgcaacgcatgtatcaatcatcgaaagtcaaactgcaagcgtacctttcattgcaaacaagttacctgactttttttctcgtaccagatacacctttccgacgtctcctttacctagcaacttaatcttctggaaagagctaggtccaacctcaacctgatcggacgacaatatagataaccacgagcacgcatatataattagtcttgcgtttcgctgatgaccaacatgctaaatttcaaaaataactcgtagatgacttaccgaacgaagtttgatcgagttggaactataagtccgtctgaaagctagtttctgagggctttccggtatgtcggcaattcctagattcttctgaggggcgaatggcttcgatttggaccctgatctcaaccttgacggggaagacgatgacttttccagggactcggcctcattcgatgatgagaggtttgattgcttcccaccagagcttgagccgttggcctggacatgttccgtgaacgaagccgataagaacgtgttctttgatgttggaatctgggtcgcaggctgcttgctctgactcgatccaagcccgttgcttccaaagagtttagtatttggggccgaggccactcgacggatccaccgagtcgttgctgatcctccagaggatgacgatgacggttccggtggtggaggtggtggatgaggaaacggatgagctcctgtctcgacagagattgacgatgatgaaggcgtggagactagtctgatctgtgagctccccttctctccgttggttgagtaatccccgtttggtttcagcaaggaaccaagcccggtcgaagaagatttcccaagacctttgtacttatcagtcttggaagacgacgaaagcttcgaccacgatgacttcataggcgacggggaggatggacccgaagtacagcctccgctcatctgaggtgaggatgatgaattagagttggatggccgagtgtcctctgaggcagtgaaggaggacgaggaattagcttccagatgaattggttcgggatccccagtcaggatgaatggagacgaggagggattcaaagcgaaagctccactgggagatctcaacctagcctgattgacttgagaggaagaccgactggatggaagagagtgttcatcactgtaggatttggtccagctaggatcttccaagctattcactccactgttgctcgtgccggtcggagctcctgagttcgagttagatgaggccgagcgagatttggaggagaacttgaacatctttgtccattttgttcctgagttggacttttgagacattggagacgaagccgaggaactcatgagaaagatcgagtcgtcgtgtttaggcagatgtcagggcacggtcagattggagggttggcagtctattttcgagatgcaatgaaagatcagagacttcgagtgtctgtctgatctagttcgttgtgattgaggaagagcgaggaaaaagagggcgaaggagggaaaggacggagatgagaacggccagagggcgaacaaagagtattaagcgagagagaagccaagagtgtgagagataggtttcaagatagcatgtactgcctgaacgacactacagattccttgcttgaggtaaattaagagtttccaaagaacttaccaagctcaaaaggttcgtgaagtttgtgatctggatatgtatttacggaccacagacccgaaatgaacgttcaagggaagcacgccaactgagcgagatggcctgtgagagagaaatatcaaaatggtaagcacgataccaagcagttgagtgaagtcgagcgacgaacacgtctggctcacagacaagattgagaaaaggtctgatagcgtactcgcaaggaggtataaagtgtaccggggtgaaaagctgacagaacgaagcgagattgaggaagacgatcggaaagccttacgatgtaaacagcgcgaacgatatgactacgaaagattgtgatacgtactctaataatttcctatcgaatacagaatcgcaaactacaacaaatattgagattgattggaaggattatacgattcaaataggagggcattcttattcagtgtagtcacaaggtacacagtttgaacgcttcctattagccgacaagcttcgtcacttaaattcatcatgttttgttcagcttgtgtcgttttcttcatatctgcctctcaacctaactcagcaacatataggcaactcctttctcatcttctgtgtctatatctcttgttctttcgctctcgtttcgggccgtcgtcttaagatgaagcaatcgacagcaatactgctctcgtccgttcggcgtaggcttgtgcagatacctacagcagctctaaccttgcctaagagaagtgtgatcacccttccccaaccgactacgtccgatgtcgcattccctacacccccattgaacacactccatccggaactccttcatgcgtcccagattcaccctccctctgaatcatcgtcatcacccagctcttcctcttcctttcagacatcttcctcgagtggtccgttcatagacatctcgtcaaatgcgtctccaaactcttcttctccaccgccgtcttcccattcgaatcatccgtacgcaggccagcatgtccagcccacatcagccccggctttggttgagcctttaaatctgccgaggccaccgcacagtccccctagatcgaaagagttccaccctcacccgttcgatacccattcgatcgtgaagcatttggaaaagtctacgatagaatccggtgtagcgagagaacttatgttggcaacaagagcgttggtgattgcaaggactgagaaggcgagggatcagttgatgagcaaagaggatatggagaacgtatgtttttgaatggcgatgtttatcctcaaccactttttgtatagtaactgatcatctacttttgctttctctcttccctgactgacagcaagcttatctcttcagagcggcgttgtcagagctcaggacagttctctctctacggacgaggaatgaagaagctaccaggcgatctttgaccatgattactgaacgggaggtcgaatcattggatgttagaatcaaggaatctatggaacagctgaaacacgagtaagtctatactctcgtttctttcaattttttttctccaagaagctcttcatgaatcaacccggtctgaaacatcgaatgacttttttccaattcgttgaatctgcaaatcagtatcgagattgaattagaaaaccgaaaagcagacactagggtagaacaaaaggcatatgagattgcgattgaggtgaattttgttagactgccctagatatatacgaggtgctaatcttgccatgattgttttataaattcttttgttcgtatcacaacactcaggaactgaacaacaagtttactatttcgttgggagaccttcgaacagatatcgaacaatacaaatgggacaccactcggaaaggaatcgttggcattgcgatattcgtcctcttcatcgttggatctaccacgttgttgactgaatttccaccaacaactcctcccgctcctgctccaccgccactgtcaacatcgtcgtcatcattccagtcagttggctatgctccctcatcttcggcatatccttcaataagcggcagcacaaattcatacggagatcattctaacaatggaaagagactcggtccctggccaggagctgtatttggtgaagcggatgaggatgggacagggagagaatgtatgggtggtgtccagggaagcgcgtagggctgtgtgtgtgtgtgtg

SEQ ID NO: 1830 - DNA, 16362 bp, Xanthophyllomyces dendrorhous
tgtgtgtgtgtgtgtgtgtaaagagacagggccaaatatattgtagcttgtataactctctcggtcatcatcttgatatctttcgtgaacccatctgtatcgtgtatgttcaggctgagcaaaaagacgaccgcccgcccaacatgaatagaaaaagatgtctagatcgacactatgacgaaacgactgcttacgtaagccatcagcgagaatgatgttcctttttttcttccattcctctttgctttcatcggaacgactatcctcttttccttccttgctcaactgtttggttcataagtcaacaagccaacgaaccaacaagaaagccagtctctagctctctttgcctttctctctttttctttttctttttctttctctgatcggacttcttcatagtcaacagtgtatcgttcaatctttgtgagtgtcctacgtgagaagcggttttgtaaccgtccaggacggctatttttgacagaacaaaagatggctcatctctttacattctgtgtatcgttctatctgtccggcagtctcgacatttggaagaccactgtatcctacaaacttttcattgtactacaaagtatcctttcatccttttcagtccttgttcttttctcctacaactgttttggacctggacattggcccgtcagtcgccatcacatcaacacatctttcgaaaacatcttcgttcctcatcaggaagcatttctccgatctatcgtgtccctaattgatctctgatcaggttcttcagcatgccaagattgccaccttctcaactccctccgccgtctcctctccggactcacgtttcatacacgtccacttcgtcagattccttcaatgcgaccacgcctaatatcagtactcccgaacccagctcgccaagaacagaatggaagccatcgcataaggcgacgctgtccgcttcatcaacttcttccaacacctcgtcttcaaaccccagtgctaatggaggtcttggtgcgactagtagtggagctcgaggaactggagcagcatctcgaccttcgtcccctggagggacgggtttgaatggtcaagccggcgtgttcacaccttcgccggctgctgctgctgctgctgctgctgctgctcgatccgccccatcacagaccactcctggaatagctaaggagattaataacaagactccagctgcctcagtcgttattccctgtagtggaagggctactcctgggataggaggtattgcttatggtgcagtctggggagctaatggcaacggacagaatgacgtctggggtgtatctggaggcagtagggttggaggctgggagggcatcatcggagagggaggggccttgcctcttccttcgcccggagttggtcttggtgtacagcaagacattcatgtcgacaacgagctagataagcttcttcgagatagtcctttgatcaaggttagtccgtctgaaaaaggttcttttcatcttgaggaccagctcacacgctcatcaacgtcacgattcttgtcgtcttttttttgttggtttcatagaacttgactcagaggattactcagaccgaagcatctgtcctatctttgtccgggcaactcgtcaacttgaatacttctctgacgtctcttcttcccaaccggccgacttcctcaaactcttcgacttctcaatcgtattccgttcattcgaactcggtacaggctaatgccagccgttcgccagtacctcctggactctctcttccctccaactctggtactgctgacatcaacggcaacaacaatagtgtccgagatcgacaaacagagatgtcgcccgatgcgattcgattgctcgccagtcaggtcatgacgctctctacttcggtcagccagcttcaagctctcgttgcgctccagcaacagacatctaaaggaacaacggtgacccctcaaatggatcttccctcgccgatgcctaatcagtatcgccgggagcaagtgcctttcaacctgacgttgcctgattccaagacggtcacgcctacaggaggaccgactcctgcgcttacatcaggagtatcctccccttcggcgcatcacaccccctccccgtttttcgtcgcgcctggcatgaccggtggaacggcagctccgctctcacctgcgttccctctgccttcgcctggtggaggaccaggaacgcctgccggtatgtctctagctgccgccacccaatggatcaatgcgccaggatccaggccaggaagcgctctctccggtcggccagatatggctagaagtttctcgagtccatacaccggtactagcggtggagtaggtacaaatacaggagacaagccgccgacgcccggagcgactgggttgcgaaggccagtaataaacttgagtagagtggatagttacgaggctagtcaaatttatcaattcattgtctgaagatcataccaactgaaacgcatatatctaacgttgataaaccttgcatgttaggaaatacagacctcaaacgaaagtggttggcctgctccgcctccgggtcctgtcactcctggagggtccaacatgggtcctggtacagctcacaacgttaccaagtgggaccaagtcggtcttgttccagaattattgagagctgttctcaaatatgggtaagtccagtcactcctcagactatcttatggtgtccatgtgtaagatatgagctgacgtcttctttcactgcatcttgatagaattggacctcccaacaaggttcaacagagggctttgcctttccttcttcgaggagcggatatcattgctcaagcccccccgactcaggaaaggatcattgcttagtgagcttgcttcagacatggatttattctgctttattgaggtgttcctcatccatctatgtgcttatctttaccagtgtcgtgcccggaatcaatgcctgcttatcccatcctgtcagtgggccctacaagggccctcaagtagtgatcatcaccactactgttgatcaggcgacacaggcctataaactgttcgttattttctttgtttgagttcaaatgtgcgcagaaagatgacaccaggtggcttgtgcacgaaaatgtaataagcgttcgagacctagccacccctctcggtcttcgatcttcgctctgtgtcggatcttcgtccgccaacaattccaacggaggctggatcgacgagcagcgaatgctggctccttcaattgtggttggtacgccggccaagatctctgagctgttcacttcctctagagctttgagcggagagctcgtcaggttcttggtggtaagttggattatctctctttcctttgttttaaatttccttgcttatgaaatccgtatactccttatctagattgatgaggttgaccaacttatcgctcgaaacctttatgagtttgtcgtaagtcgatttttctttttgtgagcgatgctgatcatacatgcatctcaagtattctatcttaactgttctttgtaaacgacagatcgaggtcgtcaagaaacttcccctgccccgatctcgaggactggcgggtgcagttcccgggggtggagccctgatgtctccttccatcctttctccctacgataccggagcttcctcgcctttcaaccccgcttccagtacccagttcccaggtacttctcgtcggttcccaggcaacaacccagccggagctattggatcggtacatatgccaggacccgtggaaggagtaaataacaacggtgtcgaacgtcagacttgcctgttctcaaatacggttccacaggacgtgttaaacttcagtaacgcgattcaggttcgagagcccgtccgagtgcttgtcagaagagatggtggaggcggaggaggaggaggtggaggtggccaaggcgcttcgtccatcacgtcagcgaatattgacctggcaacctcttcggtgggtggcgcggccgccggtggtctcaaacatctctacctgtacctggctttcacgacgcatggtccttccagagctagtgccgaaacaggagcgattggatcgggtcgtgcgacaggaacgggcagcgaggccaaccaggccaaggagtggaaattggatgctttggcggatctgctggatgacgaaaccatcttaccagcgattgtgtttgttggtagtgaagctgctatggactctgtcgtgtacaaattgtccaaccgtggcgttgaggctctattcttggtaagtaaaccatatatttagtgagccaggtttgccacaggcgacttactgattgagcttttttcttctcgattgcttctggatctcgacagcatcccgatatgggcactcaggcccgatcggctctcttgacaaagttccgaaacccttccactaacggtcgaagtaaagtgttggtcatctttgacctgactgtcaaggccagtgatgtcggagtggtgcgtctggtgatcaattatgacctgcctagatctgtcgagggatacgctcaacggtatgtctttccgtcgaacttcttgttcctcacacgttttctagttgcaacggctaacatatagttgttcgctctctatgacgacgttcggccaacagagtatcccctgctcagacaatctctcatagccgaccaggcgtagtcgtcaatttgattcaagccaatggaggcgatgtagaaatgctccgaagcatcgagtgcgcgtacaaattcaaatgttctgaggtgagactagctgatttcttgatatggatgtattgtcgaggatttgcttaccaacctacgtttgaattatctttgagtaaataggttcccgtcaatttgcgagaagttttctagtgtcatgttcattgcatcagagtttcgattgagattcttgttatcttggtcctcttgctcctgtacttttgatcgctctttcttaccaaaagagattgtgtcttctttttctttttctttcttgttctttctaaagtacaacattcaaaagtcgatcagaggcaggaatgcctgtcgatcgtggttatggacctcgctatatcactactttcaattccttgctcttttttttcttttctttttctttccattcatcaccaccatcttccattcgacgtcggttctgtatctctatcaaactcattatcacaacgtggtacgccaatattggagagtacacgagcacatttgatagagagaaggagatggacaaactgcggaaagattagatcaagatgagatttcataagtcttctcatccctatcaatcattcgttgcctcctcatataattttttggtccccactccatcatgtcaatcaacccaggcctcgatcggatcaccctcctactctctcggtttcctccgctcactattcccgtcatccacctcgctggaacgaacggcaaaggatcagtatctgctcttctagactctactcttcttaccggaggctaccaaaccggtcgattcaactctcctcatttgatctctgccgaagattgcattcggttaaacggacaaccttgtcagagaacggtgtatgataaagtcagagaggaagtcaaacgtgtggataaagagattgaatcaggagcaagtttgttcgaggtcttgactgtcacggctctgcaaatattcgaacgataccgagacgcattggaaggaacaaagttggacgtactggtaatcgaatgtgggatggggggtactcaagatgcaaccaatgtctttcctgccgagctcgtcttagcttgcgttctgacgtctgttgatttagatcatcaagctttccttgggaatacgatagaagctatcgcgaggacgaaggcagggattgttaaggagaaaggcgtgctggtagttggtttacagactcaccaagaggatgtggggaggatagtcaagtccttgggaaaggaacgggaggcggacatcgtctgggccaatagagcattcatcggtatggaggagagagaggagctaaagagtgtatccggtcaggtagtaatcacacctttaccacgctcttcctctttctcctcgctgtcatcatcatcatcatcggcggcggcagcggcctcaaccttatcatcccaactatctcttctcaaagcagcgtgctcaacttcatcaagcatagacgataataacaatgtccaagcactcgaatccttcatctcgacgtattcatccaatcccgttcctatcttaatcagccagttacccctcccaggttcccatcaacgagacaatctatctctcgctctttctgtcttggacaccctccgttcgcatcgaaaaccattgtcgataattccttcattcaagtccagattgacggacgaggtcatcaagactggaataagagaaacagtttgggaagggcgttgctcatgggtccccttagaggatctaccgactcatctctcttctcttcttacggttcacgaaggaaaacgaatcttggtggatggagcgcataatcatgcgtcggccacccttcttcgatcctacatagattcccttcactgttcctcctcttcaaccgcgccaattcatccgacaacgtttatcatctctctttctcattcacctccgaaaaccccacatgagacgctctctccgctcatccgttcaggtgatagagtagcactcgtcaactttacaacgcctattgaagggatgccgtgggttagaccttgccctctagacgaggtagctgatgtaggaagaggtcttgtaggtccgactggagatgtttgggtgacaactgaatcaaacgggttagagagggctgttcaatgggcggtagaaggcgcgaaggatggattgattgtggtctgtgggagtttatatttggtggcagatctttataggcttgtcagagggttgtaaaagcttcgagtcgagtcaacctatagattcaatagattgttactgcctgtctaaaatctatctggtcattcataagagtacatatctgtcaaatccaaactcggatgccgtcaaaactaattactccacctctcctcagttcaagccagtcttgatcgctctatacctctctttccttccctcatcgacaacctctaatcgatccaaccaaccttctgcgtcagatttcaaacgaacgcgttcttcgacatctgtagaactggaatggatcagaatcgaagcataatagaccaatgtatccatcggccattttgcctctggttcaagatcgtgtaaatctcgaagaagtgtcatctctcggcgaatgatgtctggttcgttgtttgcttgattgagtgagaagtaatcgagattgtcaaaacacgagaaagagtattgatagaaaggaattaaagaaatccagaacagaacaaatttttggagaaagagaacaagaacaaacttttggagatcaggaaccggtggtagagccaggatgactggtccgctgggtccgtccataacgcttggttcaccaggtcaaactctattcatacacgaacaggacagaaagatcattggagttagacacgcacaatcgaacacttaggtctagatgtacaaagaggaaactcaccagcagccatctctttttcaccgccaacaaacggtcctgagcccatgaactttgtgcgctgatgccaagccgaaaagttcgagaaatttgcttcgatcttcttctttgtgtatgcaagttcggaatctctagagtgagggacgacagagtctggtgggagaaatgagagtgctaggcgccgataattccaggcatgatctgttgttcattcactcaatcagcgaaaagatcagtcataattgataacatcggctgaaccaaagcaaggacgaacaatttcgagcgtccatggacaacatcttttcaaccaacatcaactctcgctcccaagcctctctacgccatgtaatatcctcctttccatcttccgagcctccaggtccagaggggatattatctagacaccaccttcgatgagtccagatccaatatactttgggaaacgatttgagaaagacagttgtcatgttcaaatcggacagcagtaagttgtggacggtcacttgtgttctttatgaacaagagtggagaaggatgaatgatgaacgcatgatctgagcgcgcgacttgaagagacagagagaagagagaccaacgaacgaattgggaaacagtccacgtagcaagatctttcgacgatagttccacgcggtgtacagttctggattgagctgcaaggccttcgtcgtgagatcaaacgagatttgatcgtatacatcattctggttctgatagagatgtatggattctggtgagtgagtaaacaagaatcacgagtgcatgggatgagacatgctgaacttactctttcgaggagatcgtcgacgaccgaacggtagtctctgatcttagtctgctccttctgacgctgatcctgggagagatctgtttgctttttctgacgtctgactccgtgctacatattgtcctgtatcagcctcaggagtcaagatctcgacatctgagaaggacataccatggtgggtgatggtcgatgttgcctcacgtctctgacactgctgatgggaaatcgaaggaagctgcggaatttcttgggacggccgagttttctcttgctggcattttcccttcttttcacccatcccacatagcatacaagcatctatcccatctacatccatggtgcgttctgtagactcaagccggtggaattacatgctgacctctcacttttgtttgaaatcagtccgcctcatcgtctgccactcgaccggtcaaccctgccgcccaatcttctggcgtcgttcgacctcacggagctaacgccgtccggtaaggttctctttcccttccttcatcttcgtatcttggccctgtactatgctgagtacctcttgcttaaccgttcccataaacctagacgacgagcggctcctgctcagaagcccaactctacaagagctgcaggcgctggaggaagctcgcagacgatgctcaggctttacactggtgatggcgaaggcggattgaaagtgtatgtgtgatctatctgtttgtttcaaatcctctttctcgaggtttctcttgtcctgttgtccataaagccatcaagagcatagagagcgctgattagtagaggttgaacctcaggacgagaaggtacatggacatcagtagctaattcccttaatcatcacgtcctttacatacacagtgatccattcatcatcatcgtcctctccatcgccttgatcttctcgtacgtacatttctcgattatatttcctgcttgatacacaaagtattgacgatgaagccctttcttctctcctatgactggtctcttatgcaatagtgtggtctcgctacacatcatcagcaagatcgtcagggcgttcaccaaataaagcacatctagctcggactgttcttgcatttccttagctcggttctattattcctctccttcctttctcgtgcttctctatcctcctccccattctactcttttatatttgcctagtcttgaaaatcacaacatgagttgtataccccctcttagtgatcactattccggccacgcgtgccgtaggacgtgtagctttgctttagaaacctcatgtgagcgacttcatttgacgttacagaccgacttagtccagccacagcacacgaatagcaagggaagaacgagaccatgcatctcaagtgaaacgtagaagaaaaacaagggatataatggatcatatccggccgaatcgatcgatcaaccctccgctttcccctcggtcatcttcagaatcatcctccgaatattcgtcgctcgacgagccatcgtcgtcttcagaagcatcgtcctcatctgaattgtcatactcactctcgtccatctctccttcgacctgaatcacttcttcgacttgcattccttcttttccaatgacgacattttcgtcctcgtcgtcttcagattcggcttcctcagacgacgtctcctcgctgatcgagtcggttcagggttatataagttcagttatgctattcagtattcagatcgttaaagagaagagaatggaaaagtgaacgaacctttcgctctgactagcatagaacttttctagatccgtcgttttcttctctttctccttctgtcctcctttttctctcacccctcctgccatcgctgacgccattgctttcgcgcctccagctccaagtcctgctttcataccaacgactttcgaacctttgtcttcatcatattccactccgtacccgtaaccacctcctcctccttcttgaatggtggcgcggccattgaaggacggcttgactccagaagtctcccaagagaccacctctcggagagagggatcaactcctctttcttgccagcttggcgtgggctggtaggatgggaggtactgaggttgggtgagaagggatagagtatttatttctgtgttggtcgttaaagagccttcagaatctgatcgagatgaaggcaagaaatcagtgacaaagatctaagtgcagatgaggatgagaagaaagaggaggaagaacaaactttgcgaaaggtcctgttcatgaacagaagagcctgccactcggcctccgcccaagacgagagccacctgttccctcctgagaatgacaccgcctctaccttccccttcatcatcctgatcttcgtcctgctttgttcccgcctcttttccagcgagggtcagaccacggacgagtgatttgaggaaccgacttctatcacgaacatcatacgagccgtcataccgagctagagaaaacagatgtgaggagagaagctcgacctgattttgcagagccgagggtgccgataggaggagaagaagtttggaagagagtgtgagaagtgccagtttgacttcttcggactgagagttgttcccacaaggatgaatcagtcacctggacaaagataaaggagaatagaccgaggatgagatgtatggcacgaacctcatcgatgaaacccttcacaccaatcctcagtacttctgcgcccaatcgtccatcagaacctagatgttcaccgaccagtccgacaacacaagcccttgcctttggattccggatatcatccaatctactagctaatcgagccaccaggtctaacgatgacgatgagggagaggacaagatgagacctttgagtacaagaatcgaactggtgatcgtggattctagatcgtttccaccacaagaagaagacatgaatcaagtgacatattagccaaagctttaggcaaaatgaaagaatgagaaagaacactatcctacctcttttcttcttcaacaacctgagaagatgatgggtagctttctccctgatttcaggcgtatgttgtgcgcagtatccgatagcctcgatcgcagcttgagagatcttatcgtctgtatccctctcgtaatgctaaagatatatacacaaaacatacgtcgtgtcaggagatctgatagttttttcttttgtcagatatagaagtattggtcccgaaaatacaagacgtaccaagaactcttcaagaagttcagctacgttctccgaggaagccagctctttcaggatgtcgatcctcagaatcacggcttttctactctcgtccctacctgttcccaaaaacgccttccacttgccttccccaggctcatcatcctcgaacatatccttcctttctttgactagaacttgacacgtcttgaggatcgcaatccgagtgccttcagactcggtagttgccaatactcggagtagaggaggggcgaggtgaggaagaggcgaaggtgaggatggagataggatgtggtgtaaatttatcaacgagaggagaacagcaggggaagtcgaatggacaagagggagagaagcttgaaagagaagcaagagatcttcgtccggctcagagtcggaatcgtcctgatcgttctgtgcgttccccagagagatgtagctcagctcatgactatatactcaagatctgccgatcgccttgtaagaaagaatatcatcgagagtaacgaaccttgggtttctctagcataatcctcgcgtatcttccaagcacattcatcatcacgacctgaccccactcatctgcttcgacaagcatgccacaaagtcttctataatgaggatggagcaactcgggttgaagcggacataaactctgaaaggctacaaggatggaaccgatggcgatgggagaccgctcttgaagaagtatctgcatgatcggaaggagagtatggtgatgtgatgcgtcggttctatttggtccaaaaggacagggtcaagaattttgcaaaacatggttcaatgagcatatcccaaaagcttgtcaaagcaagaaaacaagtgtgcccaggactcactcgtataactttggaatggccaatgccgccgcctttcgcacatacggattcgtatctcctgctccctttctgattgccatcgtgactacgctaccgatcataggtaccgatattccactaaggacacgaagggccatacatctgatcaaaggattcgggtcgttcaggtctttttggaaagtgttgatcgagaggagggcgaggtcaggctcgagctcggcgtgacgaaggatatatatgtagacgagtttccgaagctcgagagagggcgatgacacttgtttgacaacgaccgggaagaatgatgagaccggtcggcctttggagatgagctgatgtttcggacaaagagatgatgatagtgagaagcgtcgatctcggaggaaaagagaagaagatgacgaacagcaatgagtctcttcattcccatgatcttttcccgctcatggctgctctctaaaagcttggtgatctccaaagttcgatcatcgtttgtctcgtatagatctttggaggatccgttgaaagtcaagtctctggctgattcctagagatgatgaatatggccaacgaagcgagttggaacggttcatccaggatggtcagttgactgacgtttttcggtctagtccacgtgtagcaatagagacagatccgaacagacctgaatattctcgcttatccgctgactgagacgattgagagaatccatgatgaccagagaaggtagaagagatgatggaggtggtgaaagtgacggaagtgatgatcgacagaagggtaaggaaagaataagcggtagtaaccatcaaccgacgacacgttcatactcttcttgtgtctctagtttgcttcatctttctttatcaattctagctctgactgcagtggttaggcaggaccatgtcgttcgtaaagcgcaaagaatatgttgaaatagacggtggctactgcttggtatcatacggcagagtctttcagcagagacgcttcaactctctacaatgagtttctattatgatccgttcatctttatacaaggcgcctgtacattcgacagaacacgcatggtgatatgtactcatgttcaatttacatttgcccagacaccttccactccccattgcgctcgggcattagcagtcattacatgaatgaccacacccacgcccgtatcaatcaaggcccactctgaggatgcttcatttttggagggacggggagtttttgtcggaacgttagatgtaccctggagagtgatggggttggtagcaagctgataaagcgatagatcgaaggtgatgattcaaaagaacaacattccgggacgcatgcaatcagcaatggacgacaaattatcgaatcagcaacaggacgggagaagcaaaagagagttagcaaacgaacatacccattctctgatagccaattccgacctcctaacgctacccactccttttccctcgacctcgcagaccacaacccagctccaccagccaccaacattgagtgctcccaaccctgggccaccatcccttggtcctctctttctctttccgtttgtaggaggatgatctatgatgggaatcgattgtttggctggccgacttgtctctatgaaggtcggccctgaatcgatcagaagaggcatcttccagagatagttgtacatgtcgacaagggtttccggcaaatcaggcggtggaggagggacctccttcgtttctggaaaagcgatacgaggaggaggcggaagaaacgatgggcgagtcacaggagctgaagaagaagatttcggaatgaaccatgcgtaaggagctctgggcgtatctattatcgacgagaacgaaagaggatcggaagggtctccagaggcagtttcaggagtgagcctagaagaaggtaggcgccgagtaatccttgggaaggtcgatgcgatcgaactcgagaaccaacgggttggtgctgatctccttatcatatgagcagggctccgtgcggcagcgaacatgtgtgtgagtgcgtgtgtatctatatatgtgagtgaatgagtcgttgctgtttatggtcttgctggtggtggatgatcgttgaggatcagaggaatgcgaggtttttctaatggttcattagaaaactccacaatattctctagtctcttttgtagtcatctctcaaacccatcagccgtccaaagctctttcgtcattctctccatcaaccatcaaccaccagcttcgtccacatctttaagtttcgtgtcgatctctcacgatgtctcttcttcaggcttgcatctctaaaatgtctaccattctggtcgagcattcaaattcagatcgagatttctcggccgctgttcagagcatcttggataagattccacccaacaactccaagttaacctgttcgttcgagcctccctaggttttcctatttttctttccttgccttctcttcagcaatagttagtggttcaacagatcagccaattgaatgttacactctcttctggtatcagacgtatgggaacagtacctcatccactacatctctgagaatggtgtggtctacttggtcatggctgatgatagtgtcggaaggttagtggaacgtcatcaaccgcaaaatataaatccagttcctcaaactgatccggattgaattatcccttgctctttttcgctagacgaatgccttttgctttcttagctgatcttcaacgacaggtaacttccttaccgagctaccaaaggttctcaaaacaggagtctgacgtgatctcattcccgcactatcaccacctcatcgattcttctttcagttcacctcaagctcttattctgaatctctcaactcggccaaccactacagcctaggagagtttgaacctacacttgccaaggtccgtcttttgctttgactctttcatgtttcacttcggaccatcgggtgtcgtatccctgacgtgttatgtgcgaaactttcaaccttgaccgagtttagttgatgaagcagtactcgactgagcctccgccggatgcattgaagcaggcccaagctgatctaggcaacgtcaaggacatcatggtcagtctgtatcctggttccttctcttgctctttcaaattcctaggatccactgacgtcatatgtgtgagatgttttgtaggtgaacaacattgatgctgtaagaagcaatattttcttcttcatgatttcactggctttgcgttggtcttcttgatctgaactcatcatcatcctttgcgctccctgatttatcagatcctttcgagaggagaacgaatagagctccttgttgacaagacagataccatggctactcaagcttgggcgttcaagaggagtgcacgaggagtgcgaagaaagatgtggtggaagaacacaaaggtatgttgagtcaagtccgagacagacagaacatgcgggaacaaccgctgatgtacttttttctcttggtgtacagatcatgatactctcgagctttgtcgttgttgtgagttggcctcgttgcttatatcgatctgtcttagagccgaaatctgacaatgagccacacccttttcctcttgacgaaaacttcgttcagttccttatttatctcctggtggcccaattctgtgggctaagcctgactagatgtggtggaacccgatctggaagcgatccctaatttcttggtatctcttccttgactctaccgatactctatcctatctcacctgtcctcctcaagtcattttcctttttctcttgattcgataattactggactgcctctacttttatcgctagtgtcttgtatcgtcctttggcgtatatatatatatatgtatatgtgtgtgtgtgtgtgtgcaca

SEQ ID NO: 1831 - DNA, 26083 bp, Xanthophyllomyces dendrorhous
tgtgtgtgtgtgtgcacagatatgtgttcgcgtactgtgatttattgtgtgatagacaagaacagtctgccgaaaagatcacgtgtgccggaataacctcggacggaagttattcgcccatcaagtatcgaccgatgtttaaaaggcagatcaggcaaacttcatcttatctcgcacttatatccagatagctatcgcttacacttctcttcagtctcgccctccgttgtacgacatacatacagttcgttatgcctctcaacatccatccgcttgataaaggctggtcattcgctcaactccgagagggttcagcttcggacttggccggtgatggtgatctcaagtcaaaaatcgtcggagaatttctagaggtggacagcgtgccgacgtctgttcaggccgagttaatcaggatggggaggctattggatccttacaagtttgtgttcccttcttgaatttacaaatggtctcctttgtatgttggtgagactgataggtcgctgtgattcttgaaacgcaatactagaggaatggcagaatggaacgcgcaatgtacgcatcctttggatggctcatatgatctctcacgtccccttgaccaaacctgatgtgtctcatttcctcatatttcgaagggatcggagaagccgaatgggtgttcaaaacaacgttccaactaacagctgtggatctggcagtagataatttagatcttgtgctcaaaggtctcgatacgttttgtcaagtcttcctcgttcgttccctctttaactactttccctggaacttaatgcttccgtgcgctccaggattttctcttacttgaaacggccttattcattcgagcttatcagaaccacacatcaatccttaaatccactaacatgtttatctcccaccgaatccctgtgaaatccttacttcgcaaaggatccaacgagatttctctcgtattcgataacgcctggtcccgagggaaagtcgaagaagctgcccatggcggaaagagagcagtctggaatggtgattcatctagactatatgttcgaaaggctggctaccactacgagtgggactggggacccaggttgatgaccgttggaccttggaaaccgatcttcttggagagttatggagagaggatcgaggacgtcagagtagactcccatgtcggagagggcttggatgtttcggttgatattaccgtcaagtatgtcttcttgttctctttctctatacaaaatcattcgggttgaaacaacaatattaacttaattttttctcattgcgcacttatcatcatttttttgcccgctggtcgatgtggaattaggacggaaggcaacaaaccagagctactcattattctcttaagaaacgaccagggcaagattgtcaaatctgaacaggtccctgtcggaactgacaaaatctcatggaagtttagaaaaggcgagattgaactttggtgaggtcattctatcctctttgcatcgtaatttcttcgcgtttcattcttcgatacaaacattaaacgagattgctcgttggactggtcatatgaatgatcaggtaccctgtcggatatggaaaacaaactaggtataccgtagaggtcaacctcatcggatcagtgcggttcttgttactttttgaccctaccaacatacagcgtaagactgagcgggttccaaactttggtttcaaaagaaaacttctgtaccctcggatactcgaatcactagaatcggatttaggaggagcttgcttgttgaagaaccacttgaaggtcaacctgggacttcattcttgttcgaagtgaacaacgtccggatctttatcggcggtcagtctctataattttatctcgattcaggcagtgggtcattgggagggttaaataacgaaatacaaaattgtgtcactcataatcaggtgcaaactggatcccggccgacaacttcttgacaaacatctcggatgagaggtaccggcaatggctacaactcttggtagacgcgaacatgaatatgatccgagtttggggaggggggatttatggtaggcgcttcattcttcttgtaaaagccttctgggattgcctaacgaaataagtctttctcatttgtagagcccgatgtattctacgatacgtgtgatgatcttggaattcttgtttggcaagacttcctgtttggttgtgggttgtaccctgcgcacgatgagttcgcggagagcgtcagagtcgaagcggagcaagcagtgatccggctaagagaccatccctctctcattgtttgggtaagaatagttttcctgaaaccacatgaggaaacccctagccaggtctcacgagctcttctcttggctgttccattgttgtcatataggctggtaacaacgaggactacgcgattgcggaggagaaaggaatctcgtatgccgaagaacctgaagatcttcggaaagacactctcttcccggctcgatacctttatgaacgtgttctcccaaaagctgtcagccggttctcatccaatacggcttacagaagaggttgcccttggggaggcgctttacagtccgatcagactgtaggtgatactcatatgtggaacatgtggcatgggaagcaggagcccttctctaaattggaaggtcttgcgagtaggtttgtttcagaatttggaatggaaggtaagttcgatcagggtcttctctttatctgggtgatagtagcatttacgacaaaagaaagatcgtgagaactgatcatcgacgagggaacctccatgcatatctcaggcgctcctaacatccgtaggttgcattccgaacagtggcttggacctagcgcagagatctagaccttacttacttcgtcgtacttgtgctaattatctttcagggacggtcgactactggttggatggccgtaccgatcaacgattcccccaatcaaggtctgttgttctttatcaccacaaaatataagaaatcttgcctacatctgttgatctctaattcatgttgtgttggggtttcttttagaattaacgatcagcacaacaaagcagacggctttgagcgccgaattgcttgttatctgattgagaactacaggatgaacacatacgacatggaagagtacgttgctcggtcctctcttattgtcctctatttcttacgtataagcatctgactcacttcaatattaatttcttggttgcattagttacgtgtattatacccaagtgatgcagtcagaggcgcttgcaaccgcctatcgtgtctggagaagaaattggaaagggtacatctaatcatattttctgtgacttggccactacccaggtgatctgacttcgatcccccttttgttgattgtagacgaggcaaggagtatacctctggggctctagtttggcagctaaatgattgctggtttgtgtctaatttcttcttgtttttattcttcgtctttattcttcagttgatatgatcgttctaataatacacattgattgtgctctcgtgaataggccgacaacatcgtgggccatcgtcgactatttcctccggcctaaacccgcttacttcacaatcaagcgagagttggcgccttacagtgagccattcttatccttttctccctcaagagagtacttagtttgatctgttttctcgtcaattgactctttgatgatgcgttgcagctgtggggactgctagagaggagattactacgtttgcagacaaaatcactagcgcaaaccgggagattaagcaacatactgagatatgtatgtcttctcctgaattatgttctctcgttatctctttgaagtgatcatttactcatctatcaatcttggttggatattcctaaggggggaccaactcaacgcttgagtccaagaacataacactcgaaatccaagcgttcgacttaacaggaaatcttatccattcctcaactcaatcagccactctgtcgcccaactcttcaaccgagctttatcgaggggttgttcctggccagaaaatccgaagatctcagggtgaagaagctgaggtcatcattgtcggcgccaagatatttgatgacgacaagaatgtgctggctcggttctgtcagttgatcctttcccaaaaaaacatttcttattcttctgcgattgctgaccagactgacccggattttttcttctttgtttcattcttgggcgcctttgacccaaataggtgactggccggtaccgtataaatacatcgtctacccagacagttataacccggttcagataaagtcccatgaatcctctatctccgtatccacctccttgcctgtcaaaggagtcgtgttcgatgttgattctgagaaggagggtgaagctgaagtcagttggggtgatcaagcgcttgatttgcttcctggagatgagatcactgttgaggctaagggattgaacggaagaaaggtaaacgtcagattcatcggtgaccgatcttgaattcttatttgtccgccatattcttgtggtctgtaattccgcttcttaaatctactgttcgttgtatgtatctgtgtaaaattcttgttcctagttcgtttgtctctgattgttattcaaaacacatgctatgctttcgttctacgggtctttttatctcgattcaactgattcagacgaaaagcaatcatgatcctcacacaaatgtacaaaccaacatgaaaaatcgcaagccaagatcaaatctagtgagaggtataaggctcgaccttgtacatgccacctgctgaagagtcaaccttgatatcctcctctccactgtaaaataataaaggagaaaggcgcttgcagttaggcaccagaagattaaagattgagatgagagataagaagatactagatggaaaacgtactaaatcctcttggtctcgaacatctacggttgtgcaaggaagaaagaacataactggtcagacctcttccctgaaacagagagagaagtcagtgttgatttgaaaaaagacttacggtcgtcgatacggggatctcgaacccagaagtagcgtccgataggttgatcttgattcccttctctccagctacaggcgtcttagtgggagcagcagccttcttcaccttcttctcgccttcggcggcggcagcggcagccttcttagcagcctccttagccttctttccagatccagcggctcctcctccagaaacaaccttggtggttttgtccttggccgccttagccaataccgccttgttctccacactagccgctcttccatcaggaatcaagatgaacgacctgggggaaccatcagagccgtcggaatcacagatgtagtatccctttcgctcgaactgaatcgtatctcccttccggacgttgtcgaccacgtttcgatcggccaaggcggattctttaaactcggtgatagtcgaaacaaagtcgtcgaccttgtcgtcctcctcaagcttcttcttgttaatcaggtaatcgtagtcgatcaatgtgacgggcaaaagctcgttggtggaagacgaggcagagagccaagtcaccttcttcttggtcttcttgaaatcaccctcgagatggagctccatcttgagaccggtgacgacaccctcgggagagacggtcttcgatcggacaaaggcatttccccagtccatcaaggtcacctcctcgttgtcatcgaaggaggcggcatcagtctgctcgactaaaatgctggaagagtagacggtgctcttgtttccaagatcagcattcttcttatgctttgggacaggcttgacctgctcctcagcaggtccaccaacgatctcaaccttgacgaggtccttctcaaccagagcccagtatcgaggaacaacagggtcgatcgtcttcttgttaattgtccagattccgtcccattcgagagtcatgttggactgggaagcaccctgggagatgatgtactctttgagggcatcaacggtcaaccctcttcgtcgaattcctcgaacagtggggaaccgaggatcatcccatcctccgacgtgcccctcgttgacgaaccagtgaagctttcgcttagagagaagggtgtacacaaagttcagccgagagaaatcccagatgtggggctttcgcagcttgagagcgtcaatgaaccagaagtattgcgggtttcggtctcggtactcgtttgttcggagcgcgtgggttacaccctccaaagaatcgactacaggacaggcaaaatcgtacgtcgggtaagacaggtacttggttccagttcggtgatggggctgaacaacacatcggtagatgacggtatctctcatagccttattcgggtcatccacactcatcttggctcggaggcaccacttctgaccctcctcagtacccttagtcatctcgtcgaacttggccaagttctcctcgacagaaaggtttcgtcgggcagaggcaattccgtgcattcgctcgtctcgcatctaaagaacaagacaccaaacaaccatgggaaacatggcgcgcaatcataacatgatttagattgagacagaaaacatcgctggtaaagacccgaagaatgttgaaagaggaagaaaactctcctcacctgaagctgaggcgtatcatcacagtaggcattgccttctttgatcaactggatagcgagactgtgaagcaaatcgaagtgatcggatgtgtgggaaacggagtcgaacttgatgcctagaagctcaagatcaaccttaatggagtcttcgaactctgactagagacgtcagccgaccagataacgagattacagactagtcagttcatgatcggatgtctagaacagaatctgttttttgcatatcttagtcgagagagacaaaccttctccttcatgggattagtatcgtcaaatcggagaatcatctttccgttgtacttgtcagcgaagaatcgattaaggagagcagccttggagtgtccaatgtggaggtagccactgggctcaggagctatgatgaaccaaacattggcgttttagataaacataaagaccgcaagaagtgatgtatcatgaagtgacctccaatgacttgataagaagttacggagaagattggaggaatgactcacggaatcgagtaacgacctgtccgtcgaacgcatcgggcaaatccaacgagatatctgccttcttagccgtaccctgtgttttcgtgatacatgtacccatttccgatcgaatgtgaagatgtcaagatgtcagctaaggatcttcactctgcttgaattcttaagagatacatcgagacgaaccttatcagccttggcctccgacaatgctcccacgcccgacaacgttgaaggcaactgatcaacgtagttgaaccacctgccaaggtggacgtggaggttcttcctgatgattccaatagcgggcaagttggacttgatagatccgtagacttcgaagtcttttgcgcttaattgagcccctccgaagaaggtcctgtacgtcatttaggcgcagatatattcggttcaatttcactcaagacgaaagagataacgacaagacgaatgtgtgagactaacctgagagcaagccagtcatcgagggtatcgaaaatcttggtgacttgaacaaatggaacggtagatgtcaaaggggtaggaaggacagggaaagcagtctaccaagaggaatatgatgataggaaagagcccagtccatagaaaaaaggatggaagaaaacagaagaacgatttcaagttgagttcgcttttagcaagtgtttttttacctgctagtctccattttcaccggcttccgtcgaaagcgtaatgatagaacgaacctcctttccagcaaaagctccagccagggcatcgagcacctgagcggaaccttcgacctgctttccgtcaaacgagagctttccatctcgctcccattcgatcttgacgtctccttgaaggtccttctgggtgttcaagtagaatgctccagccagagcgccaaacgggaaaggagaggcggtctgcgagagtgtgagagaatgtgtgctcataatagttgtatgcagatcgtgtaaagacaacggagggggtggtaggtgtaggaatggtgaggtcgtgaggtcgtgagccggtaaaaaggcgccaatcttttttgctctgtcgttaccatgacaacgctttttcttgcagcactcttcaccaatcgatcagagataatgatgtttctagaggagcttctgcgctgtatttagactgaacaacttccgtctgatcgtatgtagtatgatgagaaggaagaggaaatactatctacgagatgatgtctacaatccgcccatagcgcctccagacaaatcagcgctcatgaatcagagtgctcgtctgtccctcctgatcattccgccagtcatctgtgacgaccggcgtcggccgagttctgaatcaatcaagctcatccctatgatgaactcttgcctgttgagagatccttgcttattcaggtcggttgattccctgttttatgcaagcgcaaacacgtagaattgtccttagctaatgcgacgattacgagaacgtggaaggagaaaagagagaagtacacttaccagattctctgcagtgtttctttttctaatcggctcttttcccatatacccttgactaccgcacctactagtctcccttctctttctctctccgccagtttctcatcttccgtcttttggtctgtattgaccacctcaggccgcctccacccttgttgttcgctattcctcctttccagttgtgctctcattttcccaaccttttggagagcaatcagcttagtgaacagcttgttgtacctctcctttgacacttcttctcttcctctttcttcctttgagcttggcacactcatatcggtagttgaaaacggggtcgaggatttatagtaggtggctcgaggcccacgctgtgtcttgtcgggagaactacaaggtgacgacaagatcgatgggagggctcctgattgtgatgagtcttgcttgggagaggaggacaaaggaaggggtggtggtggtggggcgcgtctgctaacggatgacgatgtactagttgacgaagtcgaaacagattccgaaggtttcaacggaagagccgtcggcagtgtcggcttccgagcaggtagtggcggcggctgagacaaattcgatattacggatctcacagaagatggggaactaacaggggattgtatcggtggcggtggcttcctgtaggaagatgggacaggacggaatgtaggttgttcatctcggagctttatcgactggagctcagctgtcggtggctccttgaagctatctgtcgtggaagatcgaggtgggagagatggtttcctgtccggcaaggaaggaggagaatctttgacaacgggacgtgcaacgagcggtggctggacagcacgcgagatgaaagattcagaagtgaccctctcgacctgaacagaaggtcgtgttatcgtagacgtagcacttttgaggttgacaggcttaggagctaaagccggtggtttcgggcggcttatacctgatactggtagcggaacactggatttagacgtctcgggcgaagatttggagggaagtggaattgaactgccggaaggcgaggcaggtagattgaaacgctgagccaaaggcgacagctgatcagccgagtatagtgagaggacttctgagggccctagtcgaggcgacgattttgtacttaaccgagcaccgacttgctgcccatttaatgtcatcttgacaggcgacctcgacctgtctgatgcgttgtcttgagggtttgaagaagtcgcgctagtggttcgtttgataggagaaggtttttctcgaccgttcaaactgtctgttggccgatcgtttgacttcccaaaaatgtccgcaccaggttgtagggctgtagcatttgagctggcgaaggaaccagtgctggaagcccgatggcgagctgcggcctggacagatccttgtgtcaacgcctgtagagagatattcggctgacttgatgtaggagctggagaagaaggcaaactagaagacggagtagcctgagcagctggttggttggactcaaaagctgctattcgatttttgattgatcccatggagaagattgaagatcccgagagagagagagaagagaaagagtagccagagctcgtaggaaaacagtgatcagggtggtattttggagatgtacaagatatcaagctagtttgagatgatatatccatattcacacacgggtaagatatgaagaacagacatcagccaagtctgtatacgaccatgaggaaggagagaggacaactaggtatgagaagagaaaggcgagcaaggaagagaccgctcaaacgcttacttgcttgcaagcccacggcgcaaagaggtaaactatcctactagccggtaaacacacccagatgcaaagatttatctgacagaccagagaatctatgctaaacaactacacgagtcgagaccggacgactgtccagagaaaggaatacaagaggatgtgatggtcggaggtgggtggtgtgttgtgcgttcgcgtcgtcagttacaaacgggtaaccccgtacgcgtgttccttctgatcagaaaccatcatcatctgcaacctcgtctgtacgggtagcccatgagtgtcatcaaccagaacccctctctttcgtctcctccacaaatgcctaagcatacaccaagacctaaacagaccccgaagatccggaaacctaatcagagcaagacccttcgtggccgaccgacggatccaccgcatactcggctatcaaagactttggcttacttacttcgacatggtgccgagaaggaaggcctaggaattagaccggacggttatctcccggtcaatgaacttgtttgtctctccgtatttctagcttggctcggctccagatagccgtgtgtgtagataagctaatatatagatatctatttgggtcttaccttcttggccggtcttacttatggtccaaaccaaagggtagattgcgcatcctgcgctcgccttgaacggtgttacgttcgagtccatccgacagattgtcttggacgacgtgaagactcgatatgctctaatcttcgctaaaatctatcctcatcggcggaggcgacgacgccggtaccactagaggagagggatccattggccgacgggcaggatgggcgttggtggatccgagcgaaccaaggatattcattagaaatgaaagagttagagaaagacatgcgaattgtcactactgtcgaccaggccggactagccgttcatgggacggacgagaaactctggaatgctatctgtgcgtctgttccgttttgacgtcgacatgtttggaatgcacgtatgtgtggatattgagcttatatgcgtcgaatgttttggataatcagacgaacaaggtctttccaagataacccggcagcatattcacttggcgctcgccttgccttcccaaagtctccttcgacgatttcatcagaggcaggttcgaatcaggagagctcggatcccggcttaggatctggtccagtgcaaaagatcacttctggaattcgtccttcggcaaatctttacatctatatagatgtacctcttctcctatctggtgagctttcttgttcttgtaattaaccttggtagaagagtgtgacgcaaagaattggtcaaatggactgattgtcttggattgaccgcttccagaaaacgttcctctattcctttcggacaacaatgtcttgctaactcctggagaccctgtcacaccagggattctacctagaaaatattttctccgggccgtccggaggaatggggaaattgtatgggaacgacctaaatgataatgatttgtgtttgtgtagattctttcaagcagaggagtttgtccaggtcagctgtatctcgacctgatggcaaagcaaccaaacggctgagatatgaacgaaattaagatgtacagcgtcacgagttctttgcttatatgttttcatagtcttaacgtaatcgagattgaaatatagtaagaaaatcattgaatagaaatacatcattaagcctatgatcattcgcaatacaatacaatataatacaatacaatacaacggaagaacatgtcagcattctttctaaaaccaagcaggatttgacaatgttgagagcgaagatagggtaggtgaatcagaaaagtcgaatatcgtcaacgctccgcccagtctataaaccagagacccctttcggagcaactggagaccgaacggaactcgaagaagaggtgccagagagcaggtcgcagaagagcaacactcgttatttaaaacagaggtgatttggggatgttgggcttgaaaattgaagacttacgttaagacatggcgaagagattgaaggggatggaagatgtgcaagtatgagaaaagactttcagcccacagccaaagtatatacttgattatataatcaatcagggccgatttgtaacacgtacaagcctcaggctgggtgagagtaaccctaaatgatggtaattgatacttggtccttttggatttgaatgccctcagaccacgaatcttcagatcccatgagctacagatttagtttgtgttagacgcgtgagctatgcaggtgattagatggctataggatgattcaatacacgggcgcaaggggatagagttgaaagatcaccatgacagagcataaggacaataagaacgttaacaaaggatccaggcttacgagactattctatggatgagaaaggatgcccatgttgtgtatgactctcaaactacagagttactgaacagagtcagtgtgcccatgattcaaaccacacggaagagccacaagcaagaagagatcactggatgtgttaggagcgcatgcgctgtgtgactacatacttgcaagacgagtaggagtaggagttatggcagatgattggtgagtccctggttacagacatgtagcgccgtggttacatccccaatgcctatataaactcgctctgcctccgacaaggaatcctcttttttcttcaactgttcagcaacacttaataacttggctatctgttgctttgtctgatgatctccttgaccactcatgactgtctctatgttacgctactcctttttctctttgattttgctctcagactttgtagaacagagatgtgaacacatcgcgcaacatactgcacctagccctgcatcaggagaagaacgaaggggcgagaatgctagggtttgacgctgtttcactgaggctgacgctgagactggcacaaactaaacccatgacccatgggatcttggtggttcgtgatctgagggcacccaagtccaaaaggatcatgtatcgaccaccatcggttgcggttgctttctagtagccaaagccatatattgtgatatatgctcccttcgtcgaagtcaatccggtccggcgtagtccgacctggatgtatggaggtcttatttcgcccgacactctttgttctcccatcgttaacggtatttccatcgtcggcagaccatgcagtaggtcagcatgttttgactgattggctgtgttcttccccaagatagagccaacaagtcacaaggtcgaagagcctgatttgtacaaactgcctagaatgaaaccccctattcacaccctccgaacccggatcctgagtcatgtcgggtacccaaccctgctgattgtaccataggaaatctgtgcagatgacgtcacgtgttgtttagggccggcggcccaatctgaaaagtatataatatgattttagctgccatgacgcgattggatcttcagcaactcaccgccacttgccacggttcattttttccctcctcctggtcaacccacaggcccgttcaccttctcgtattttctaatcgaaaattcccattattgtttctccccgcccttttctcttcgtgagtatccttttcgaaaataaaaccctatcctctccacttccacaatccactctttgtccctttcggatcttcgttccaaccgacaggcctactttctgtaaaaagaaagttttggtttagtcgggaggcgtgaaaaaggagagcttggcaaaatcagttttggtgtgaaagagagaccagaatttaccgtatcgaatcgcttgattcattttagatattccaaattcttggctcgcctcgtcgccacttgctggacccaaactcgtgtgacccctttttcttgccctccccgtctcttctgagagaggacctggtcaacttgaacgtcgtatctattctacccctacttgaaccctgttggaccatcatatctaaaggttaaactacaatccacaaacaaaaaaatattttcgaactaggctgctacaagaataacctctggtggagaaccaacacatggaattcgattgaataccggaagcggacggtttctgttcgccgaggaggcaaggaatcgagtgggagcaaggcttttgtctcattcctccttcagcttgagggtcaattacgcactctcaagcaaaccggatctcttggttgagattcggtctttttttatcctttataactttatgtgtcacttggccttgccttgggtccataacgcgataaagcagcatttttcgtctgaaacgcccatattttgttaatattatgagatattccgcccttgaatagcctgaacaagtgtcatcatacggtaccttgtcatctcgagtatgcgtctcaaacgtcttgttcccctcatctctcccgaacttcatcggttgatatctctacttgcccagatcgagatcacacaatctcagactctcgtgttcaccccttccgatgagatccttagccttctcggacctatcatctccaatcttgctacagaggatgatcatttgtcaagcatatcactcacatcgattgagcaactcaaagatgaggtgaccaaggttgaaacgcctgaatttatcagaggcgaccgagcgctagaccaggagaaaatggacaaggctggcagaacgagccgatgggtcgggattggggtcaagccagtagatgagctgatgggggtgatcagttcagaaggacaggagaggtgggatggagtgggtatagtggaagtttctggaacggatggagttggaaagagtgtgagtgtttgtctcactcactctgagaaagacatacagtatgcttacgatggagatcatgttttccctctcttttcccctctcttgctctttgtgatgtgatgtgtgtatgagtaccaaagttgttctcacttcatctcgtgttaaatcacctggttcgacatccaaaatcggaagctctgtgggtagataccgaccgatcattcgaagcctctcgagcgctcaacgtactttctcacaagttccctggaatcgtacgtgcttatgggtttcctcttctgtgtttggctaagggtatatgaaccgaatgtctctcgtcagacaagttgactactagttgtctggtcctctaaacaacgctttcgtatgaccggtagagctccactcgggtcttgggcaggttgcaggtcaaaccgattttcgggttaccttcgttcatccaggccctttctgatctagagaaaccatatcagtcggttgatagagaaggccagtcgtcgacgtcgacaaagcccaagggaagattcacattgttggtggtcgattcgttgacgaaattgtacggagatctagtcatttccgctggatcagccggttcgaagctacttttcttattcttgttcatacagcaaggaaatctcactatctgagatcagacaggcgtagcttattgataacgttttgaaacctcttggtggaacttcgtaggtctagcggctctagtgtcgcacatgcaccgtctttccgccatctctcatcgtcaggggataacatctatcgtaagctttacagtagaacatactcatgcgcacagattactcattctctctttcttatctgatcgctataacatctcgtgttcagttgataaatgactcgatccgagtcccatctcaatcgcatacaccctcgtctaactcagcgatgaataatcaaataccagctcttgggacggagttcacctatctgacggacatggcgctctggttggagaccaccaaattcactcatttctcgagtacggagagagaggtgataattcagatcatgaagaatcgagtgggggtacgtcactttgtcctttctgctcataatctatctaaagcatctgagtgttcgttcgttaatgcacttttaatacactgaacggaactttgaatacagcctgcgagaagatcaacgtccattaaaacggtcggtcacatcttgctctgtttcaaacaactatatttaacctttcaacacatattccgttctgactttttctgtgtctatgtaggacggaaccgtcatcttgggcttacaggacaggcctcgatcctctgtttgatgatcttgcgcgaggcaagaaactacctctaacttggatttcgggcatatcaacttatgtgctctgaaatctacacaaactgtattttatcactatcgtgtgatgtgtaccatgatatatacaatattgttatgttgggagattgatgtctaagatagttagggttaaagggcattcctacagtccccgagatcctgcccaattgagttagtgctcagctggtcttgatcatcatccttacccgcactcactcacaccgcccatctcccggcatacactgatagctctaatctcacctctgcttctgctccagtcaaacataatatagctctgttgacccgtcctgttgctacccgtaagtagactatgggcttgggacgggttatttatctatctgtctatctatctactctcgtgactctactgataaggccggacggtgtccggtcgacgatacgagcatggggaggagatgttgggtcctgtgagaccttctatcggcccgtctcagtagagaaaagatgtagagatctaagcgaagaagggatcagatgtctctttcgcttacggaaatttcatggatcatgaggatctaagaatgacagagaccgtttccccttttatcgaaccctaccaatgtcgttcctctcgccaccgattgttaatctggctggattataaagtaggaattgacgagaagaatgctaagaagctcctttcttcctttcttggtactttcatcacgctctcgatccgtattgaaggctatcaatcctcgagacggcttcttaaagcaggtgtttcaggccacttaccgctcggcgctcgaggtaggtaaatcacgcctttagtattgagtttgcatacgctcagcgtaaagggccagtgtctttatatctcgcttgtgttctctctttcttcacgcacagcgcatctatatctcttgatcgaattgttgcgtatcattacattcagaacttgatcaaacttattcactatgatatcctcccgaccctcgacaccacctctcgttcttcctcttgccagtcatttacccgcagtcctcgactgtgatcgattggaaccgagaggacttctctcggacacgctatcggacgtgtcttccattcactcttctgatctcactagtgatgatgaagatcgtgccgatcttgttcgttttggtgatgatctagccggatctacctggactgaccttgggccgaacacagcgacaacagactttctgtctcatgccttctcctctggagcttcatcggctgctggggacgagtttgaacctgactctactcctggctcgtcctcagagagcggcagaggagatggcagtctgactgacgacgaagatgatcatattgacaacgaccggacgttttctggattgggagagtcttttgccgatctggaacccagtattccctcagcttcaagtctttctacctcggtagccaccacaactatttctgatctcactgatcgacaacattctaatctgtccctttactcgaaattctctaacgcatgtgatatcgaaccgcctacctctgttcctgatatgagatctagtgtcgagacgacttccttccgacgtcctgtcaaggaacccgtttccagtcactttcagcttgcctatcctgatcctactagtgtttcatccacattctcttcgcctggctcgtcatccaccttgtccaagtcgaagcatgaatgctttccttcatctttcagccaagctccctcttttcgagagactgggaccggaggacttggttcttcccactctcgatcggcggcagggaaacaagctacatcttcgtttgccccagcctcggctatgatcgtacctactactgtaaaggagaggctaacagagtctcattcgaaacaagaaatggatggacagtcctctaggctgacaaacagttcgtactcgaccgaccgttggactgtttttgatactccctcgatgtctaggtctttgcaaagctttccttcgctcgttcaatcaacggtcaacttgccggccgatgtctctcatccgatccgaattcttcttgtaggatcatctggtccttccaaccaacgtcaaactatcgttcagaagctccttcgacttgtttatatcatcctcccagagacagccgcatccgacccgattgtattgaaggagtttgacgtcctggggagatctgagagtacaaggactatcagtgatcttcgagaacctttcaagagagagaggaaaacgtcatctttgggaggtaggcagccagagtcaattgaccgtttgacagggcccaaaggatcgctggttattgaggttgtggatctaactatcaatgaagacgatgattgggtatgttactcctctgaccaaaattctagttgcgcctgctgaatggggtttcttctttctataatgttaggtctcagcaagcgaagacgtccgagcgcacttgagatctcttcgaacctcgccgtcaattacaacacttgtgacgaatcttgttgatcctagtcaacggcacagatcgaacttggagctttcttccattctctcctcctctgatcgcacgaacatgcacaccattgtccttccagtcgagatctccgcctccttcaatcctggagcagatctgagtcgtgacaatctcatagccaagtcgaaggcaaacacagaaaatcgtgtttggaggtacgaagactttgtaggactttcgggggagaaagatgctttggaagtctggaaggggctctcattggaaagcttgacgaccgaaactgtgtcgttggctaggggccagacggaacaggaggccgaagagtatatgttcagactgtctgtcgattggaagaggttgcgagcctgtgttcgccgatagtaagtggaattgtgtctttgctgttattcgattcgtgatttgagctgacggacgatccactttcacattctgtgatagcgtcatcgcggtatcttctctcgcaacggctttgctcatgctactagcttgtctagactatgctctcgaagcctttgaacaaacttctttgaaccccgccatcaacgtcactcggtcatttattaaggaagcatctatccctctgtctgtttctccgatgacggctagagtccaacgtttttctccaaaccttgtttggactacctccgtccaatcagccgtggcaaccccagtttatagagctgcttctgcttctgcttctgctcgaggggctgtaccatccgagacacggaatttgatcacttcagaagctgccttacgagaggagagtggttctctggtcacgaaactgacaaccatcaaagtaccttccgagataagtgtttggtcagtcaaggatcggagtgtgatggcttggaagactcgtgttgggcttccttcgtctcttcctagacgaggggacttttgtgtcaaccgatccgtcccttcgttccagcatgtacctttgaatcagtcttcttcggttaagcagcaggtttggaaactttccgaatatgtgcatccaactgtctttgctcttcctacaagcctgcctgattccttccctctgcgtcggttgactttggacgccgagatgttcaatcctgtgatcgtttccgtccagaaagcttactgccagactaagaacgttgttcacgctcttgtcgcgaggtcaaacccatccgctcaatctgcttataacaccttacataatcttcgagacactgttttggatctgatctggccaccttcaccaatagttcatgaactagttgaatatgcggtgaacaaggtgaatcagatcttggtagaggtttggatgagggccgatcgctcacttcggcggggaaagatgatgacccgggatgcgttcgaggaatggaaacagcgaaaggaggctagaagggcgaagaaaccgtgggcgaggatcaaggctattctggctcggcgtggttgagcccatgcctcagtctaatggttttgtcaattcgataatcatggtaagcacgtttgttttccctatccctattctttactcctaagtaggtagagtcccatgatatcatgaggacaggtgtttttatcatgttttggaatttcattttcattcttccttcttgcccttttgtccctttgcccctatagaatatgggatcgcgcgacaatgtgttttagattagggacgttggttcaatccctggtcttggactttcttcctggcttttattgatctctccctctttctcttcggtgctgtagcctgggcttgacgtttctatttctacctctatttctatctccacttttctcgatcacgactcccttctaggctctatctcatttccttatgtatcgctcccttctctctgtttcatgtctttctgtgcgcgcgtcgtttctcttctcttgtatccagctctctttcattagctcggtcttgttttctcattttctaggttatgaattttcatggggttcttgagtcctataatcttgttcctcgtctctttctttttctcgctcgtgattctccatttttttgtgggtttgtccccctctaacgaaaggctttgaggagaaaacaagcaggattgtctgatgacttgaatcatatgataccaacaacaaaatgtcatggtcgacaggggagagaaagagaaggggaatgtacgacaacgataaaaatcacgaccctcgtggagacatcgaatcctttccgactccccccctcctcttgtcccgtcctcccgttcgagaaaaggaaggcggagaaaggaagagagaagattagagaggatctgagcgtcgaaggcggaccagaacgtttcgaccgagctatcctctttgaggactcggataaatgaatcttcgacggaataggaaataggggacgatccgggatttgcagatctgcatggtcgcatgattgcgaggatcgtccctcatgtgtgattccttttgtcggcgtttgagagcagagagacagtagagaagagacagaaagaaatgtgcgaagggagaagagaagagaagaaagaagaatggaagaagaaacttatcctagccatcttccttcaccgaacaaaagaatatggcatgaggtcagatcgatcaagacaagttagtcggttgctctcccatgtaatcttcttaagcgctgtatcatttgcacagagacaagtgtattctttcatatctgcttcctcccaatcgaatcaggaccaacaagatccgggatcttaaggaaatcagcaccactccctctttttagcacaaaaggcagaagaaagaaacagtatacgtacataagatcctcctctgagccccattcctgggactctttttacttctttctacatgttagtttccgatatcgatgctgaccatcttgatatcatcatatggtttgtcccctttatccgtcctcacatcctcaatggcgtgtatcacatcaagacctaatgtcgctcttccaaacacactttgagatatcgattaaaaagagtgttttccaatagaaagatcaggacaaaaagacagtcagatcgagttctgatagctttgaaacggcaaagatagggacaaacgtgtgtttgtcgtcaagccatggggtgggcaccgtcgtgatgaagaattgagatccattcgtcttcggcccggctggttggaaacgggtaaatatcaacaatgaagacagagtcgagttgaaaacgatgagtttgagggcttaccattagccatgctcaacgtatacggccttttaggagaacaaacaaaacgcaaacgttatcaatgttccattttcttgtggtttcatatgtgaaaagaggagcgctcacctatcatgtcttaaactaggatcgaattcatcctcgaattcactaccccagattgattctccacctgttccatcacctaatggatctcccgattgaagcatctatcgccaaccaatttattcgtagaagagaaacatgagcgattattcctagtctgattgacgatatgagctgttcttattggagactaggggaaaaggaggtcgtacaaatttcttgatgattcgatggaagataattccattgtagtatccttcctttgcgtgagtgctggaaaagagaagcaatcccaaattgtgcaaccgttgcatcagtgtctacatttcaaatacaaaagaaagagagagacgaaaaaaaagaagagtacgaaccagaagttctcaactgctttaggagcctgatcagggaaaagtttgaagtgctgatccatccagaccgatcggaatggtccccattctaatgtcagtttaatacaaaagtcaaagagaagacccgaagacgcacgatatctcccttggtggtatgaattacagccgaggttccaagttggcctccgatcttgacgggttgtgccattgcgacggattgttcttctcttgtaggtcgttcgttgaacacatctcgatcgccaccctttgtatccctgttgaatcgacgtaaaaatataggtcaaaaaagccggtacagggatatataaagagagaaaatgacttactcgggctcggtctgtgagaagagatagaacctggatcgtttgtatgcagtacaaaaaagagtaggatctcgagactctcgttcagcaagcaacgggttggccgaagcagccatagcctgatatacaaaatgcacgaaaggtagccgatttcattttgtttagcaaaacacgagatgtgaacagcactcaccaggaaggaaaagaaaaacaaaacagtacttacgattgtggccagaccttttttggagggtgcaccttgataaagagcaaggttcatccacctggatgtttcatctttacccaacactctgacgaccctgttggaaaccgtgttaacaactgtttgcacaacaccatgccatcagcttgtgatcagaagctatggaatttgaacgcgttcgagagataaacaaagaaaaggccggaaatacctttgatacccaacatggttggatagagcaagaatcccccactttcgtcccaagcacaacttccaacccccaatccgatcttttctaactctctgtctgcggcgagacgtctaccaaactccatgtcatccattcggaacacggctgtccctgcctgttgcatttcctggatggcctgaagagactcgtcgtactgtctcgtctttttaccagaaaggaagttgaagatccggacttgccgatccggaagggaaagtgtcgaaaactgagtttgttgtggggagaacacgatagaagtcggcagactctttgccttcttgaactcgtatagatcggtactactcttaaattcccacaagcctttgactccagtcggaagctcccacggctcactcggctgccaatactcgataaagccaccttcgtctgcagagatgactgtatcgtatcgatcgttgtactaagacctcgaacagagcggtgtaagcgtgcatacgactattgatctgtccttatcgatatctgatagacttacgaccatgaggtggactgggtgcctgtgtagtttatcaagagtatagagcggcttgccatcgccacgaccgtcgtagatccgaatggtacttgtaccctgctctgaactgcacaaatgaatgtaaaggccgaacaatcagttacgttcctatacttttggaaagatatggaggaaaaacgcgaagaaaagatacgtacatggcgagaagagtttgtgcggtcccagattggtgaatccagcaacacgtctttggctcaaaatctagcttgagcatattgatcatatctatacagagtaccaggccgctcgtgagtcttcttaggtctagattataagcaaaggtaaaaccccaagtgtacgaagaggttcttaccaaagttgacaacatcaaacaccttgcatccgtccgagccgacagtcgcgaagaccgttccatcgctacttccactaacggccaagaccggacccagatgagctctgtaatgtttgacaaattcgattccctccgcctgtttcttccatagtttgagatgaccatccatagaggtggtgagtacaaagtcggttctagatggtgcgatagagggcaaggtcacgaagagtgtgtacaaagggacgaagaaaagacgcgacaagttttagcccttgagatctggtgtgtagaaagtgctgcgaaagaacgacggactttgtgacggtgacggtattaatgacatcccgatgcatgaaagacttataatatctgtctgccgagggaagatgatccaagaacaacttctcgtgggcgaggactagaaatgccggattccatagcatttcaatcagctttccgtcggtaagtgtctttcaaacaagcagggaacgaaggaagcgagaggagacaagaatggattggtctgatcacttaccctttcgtttctttcgcttcttctgctctccaggaggttgaggtccgtcttcagcatcatcgtctccgggagcttcaggcattggtcctgttgatcaacagagagaagagtacaataagaagaaaaggacgtagggtagacgaaagaaggaaggtcgaaacagcttaccgatatcatcttcatcgctctcaggctctgcgtcaagcacagctagcgagcctggttctcctcccgagacaggaggagtcgtatctctaggcctcttggtagcatgggtaggtgggggagaggcagacatgaccgactggatgctggtgatgatgatggtgagtgccggaaagtcgactatcagttcgttcggagagatctattgaagcagtggtaatttggactagccgacttatttaattaattcaaatatgctcataaattcaaatatttccatagctggcataccatctgtatcgtctaacgaacagtgcggctacggttggcgcaatagtggtgatagcaggagcggcgacatcgagagtagcagcaatgatagcaacagtggtaggaggaacgtcggtgctagctaccgtctatagtgtggtcctcctattacctttggagttgtgtctttgcgttgcttttgattgactatccaaacaagagacgatcatgatcatggaatacatccccattattaacattgtcacaaacaggttcccagggataccggtagaaattctcaaattcttgatctctctatatatatattgtttgcttgtctctttcttagggcatcatccggaacaacagacatatgtatacaacacacacacacacatacacacacacagaggcagacacgtagacaaacacagacagacctgcaaaaccagccagcaagaaaagacacaacgcacagtcagctcagtccttgctcacaccatcagattcaccaacgatcaagaaagagtatgctccacacggaagcatatcaggtagaagggtctcagacatccaagga

SEQ ID NO: 1832 - DNA, 31603 bp, Xanthophyllomyces dendrorhous
ataaaaaatggtcagccaagaaggtttaagacaaaatttcaacactcaatttagcaagcattgcaaggcattgtctgtgcaatgacagccaatgcgtgcccgacaagagaacgaggacgatggaaggaaaggaaggaaagcgaccttgacctttgacggtcgtcgctttttgtacgattttttactgctcacattttttccagagccttctgatgattgagtcacgtgtagttcacgtgatcgagctggctgtgctggctcatcctggagggacatatccgatgatccagatctggctgttctaggatcaagaagaaagatccaaccttcaccagattcagccatcctcattatgtcttttcttcgtgttttatctccagtaagaatcacagttagctcaccgctgttctcgtcaggcttcagagctggttcacgtagaagtctgagttcgagcgtaccgcgcaggatggtgatcccgatggtcatcgacagcacagtacgtctctactgtaactagatcatagatcttggatcctagcaacggatgactcttactcttctcttccgccttttgttatgtttactggactacaaccgtagggaagagatgagagatcaatggatctattttctcggttgctcaaggaaagagtcatgtttgttggagatgcaagtgccatgtctcctttttctctattgggatcacgttattccagctggcttttcttgaaagtctttacaacacagtgttctcttgctgatcaatcttcgtctgtcctacaacatattaatctcaaaatcaggtagacgaacaatctacaagtttaatcaccaatcaattattataccttgaggcagtagacgctgagacaccgatacagatgtacataaataggttaggaactcacttcatcctgatcactcgaaatacgctgttgtcgacttgaagtttttcatactcatacatatgatgctttagctatggaggaagcctgacagacgtcctatccatatatgacacagttagtatcatcttacgatcgctcagtccccgacggacttcctgtctgatctcctccgctcggtgaactcgtttatcaatcccttcagatggaattcgtatctcctcctatacatacagtctgtattggccaagcttcatcttctgcttctttgttattagcagcaggtatgtctaatcattgtcagtgatggctttggtcagtatcttactgactatatatacatatatacacccatttatggccttttcaacaggcgctaaaggacaccgggcgatcttgccaaacgcgagtgtgatgatgcatcgtccgtatctgtcttgtcaaagttgattcggccatgtcgtatgaacgatctgacgttctatatcaacgccttcctctttcgtttgggtgtcgccttatgatccaaatttagagccttatggtggacgacaaggccaacaatctgatatcgccatcgccgccaaagagactctgcgtcagagagatttgcttgagtccctctatcagaaacactgcatcaaggagggggagagcgccgaggaatgcaagcttcggttcagtgcgtcattacttttgtttccctctttgtgctattctctttgtttctctcctgatcgtatgcagaccattcattcggctaacctttttctctcatgaattccccctcttgtgttgataatcatgttgtaggaaccgcacttgaaagagatttttatctgacaccgatagaggcaaaagattttgggattgtcgatcgggtgcaacttccaaaagagaagtcaaccgagaccaaggcttaattctagtcgccaacgcatcatccctatataatgttgtacttgttaagatcaatagaacgaaatcatgcttgcaaaagaagaaagagaatcaaacgggctatcagaatgagaggtgggctgaaacggagtatcgactgcgcgtgcacatagtgaacgtttggtgtttcctcatttttcgtttcctcccagtaacacacatacctacaatctttgatctaccagacatgctttcaaagatcagcagcccgccgtgagaccctaactgcatctagctccgcatgctcatattttacactgaattctagataactgatgtgtcttctttctcctcgacttgttttaggaggtttatctcgccagaggatcactctgctctaacgtcctctactccggaatctttcgcatccatcccgcccatcatccgacataagcaggagaatgtgaccgtcaactttagtcccgagtgggaaggctatggctcgagaactactggaactatttacatcactgaggagtcagttcctcgctgttttgctcttttgttgaggcaaatcgactgaatgttgatcacgacttgaacattttccctctatataaagagcactctcattcattccttcagattcgtcaaccaccaagaccgggttttctctcctataccctgtgatcactctccatgcgatctctagagatgccgagcaaggatcttgcgtatactgtcagattgatgaatcgtcgaccgcgtcggattcagtccctgtgccagagggtataaaggagagcgagaagaaggtcgacgacggacattaccatccagaagatgaaggagaagaagatacgccaatgagagaactgagaatttatgtggatgaacctagttgtacgtctctcaacttcttttctgccatttagatcgaccctttgagagtgcttcagcccactgacgattcctgctcatcgtataaatgtagtggaacccatcttcttgtctctttctcactgtgcttctttgcacccgtcgatttttgataccgtcgatggaatgtcggatgatgaagggatctactctgatccgtctacattcgagcctttcactggtagggaggatgaagagctaagcgaagtgggaaaagtgaggagcgattttgtaaacccgcaagctaggtttcaaccttactgaaacgtttgatcgggtcttctggttttctccatgttcttctacctgctcctctattcttctccctgcccggactttgtttccctccccgtttctctttcttcttcttcttcttcttcttcttcttctttctctcaacatcgattcgtcaataaacattactgtggcctggtactacacatttgcccttcaaaaggctgctctcgcggtaagtcaactctctatgtctatgttaagaaggcataaagtggaactttagactgattgaactcgtttctcttcattctggatcagcatcttgaatccatcatcgtgtggccaacgcccgctacaacggcctcggacgaagcgacggaggacgctgaagagacctcggatgaatctaaagtccaatcatcgtagattggatgtaacgtttgaatcgattttcgaatctgagctgagttgagcgctggatgtaggaagcaatgcattgatatgtttatgtgcgcataagagaaacaaaaagaaacatgagaaaaaggccgcagcagagcgggcgggtacaacatcttactccttccactcatcattatcgtcactactaccaccatcatcaccaccatcatcaccaccatcatcaccaccaccatcaccaacgccgccctgtaatcaatacccaatatcatgtctcaagacgcagcatcaatcctgcttcgagcgcatctgaacagcataactcaatccttacaagctcttgagtcactctccttaatccctccatcagatgcctccctcatccgttcgaaactcccttcatccgaagcactggcgaacgctaacactggaaagcaagatcaatacaaccggtcttcttatggaggttcagcagggcttcagccgtcctctatctcaagtcccggtggtagtatgctagatgtgtcggtcggcaacggatataattctggaggaatccatagagcgccaccacctatcccgggtgacagctccgagagggtagaggctgtggccgcttgggattattcagggaatgtaagtggtccgcaagccctcgctttcggttctttctcattgccgcttccttcttcttcttcttcttcttcttctctctcttgctcaagctgatgtcttgttgtgcttttgtctggcggtgaacggattgtggtgcggatgaaaaaaggccgctgacgatttaagctttcgcaaggacgaccggatcatcgttgtcgacgagttgaacgtacgtctccttgttttacatcccttcctctatccaccaactaagacacgagaactgacatttgatctctgaaaactcggctattttctctcttggggttacgtgtgaatatgtgtgggactgtgttggggtatatgtgaaacatatcagccggactggtggaaaggacgtctagcgaacgactactcctcgaatccgaggattggcttgtttccttcttcctacgtcaacaaattgtccgtcgtctgactctcttttcatttctgtccacgttcgcctcgtcattgagttgttctgactttgcttgtattgtctatctctgagaatagaccttcaaacaacaactgggctaataaacaccaacctccttctcaacctcaacaacaaatgcaaccctattacgctcctccgcctccttctcagatgcagtcataccaacctccacctccgccacagaaccaacaagttcaacaagtccaacaagcaggtcaagtcggaccaccggtcgctccaaaaccgagtaggtttggtggaatgggtcaggtcctggctacttctgcagttggtggtgttggattcggagctggttccggttagttctttgccttccctctttcctccgacagggttctgagtggtgagcttgctttccctttcatgcaagtactgatactcttatctttgtttttgtggataccatttcgtcagctattggaggaggcatcatcaatgccattttttgatatattcttccgtttatctgtgactcgattatttatgttcttattaattcattccccctttcctcctgtcctgtcgataacaactcaagccctgtatctttctgcctcactcctagctctcagcatcccccttgcgcgctcatacgacaaagcccgagatgggtagaacataggaagggggaggaaaaagagatacatatcaccagatgctacccatcaagctgattgttccttctgcgccctatagaagatcgcaaacgacgatagggttcagtttttttctctcattgaaagcgcgcgtcgttgcagaagaaaaaggaaagaaagaagagacgcaacgaaccccgacggaatcgtggccacctttcagtgtctccacccaagtgacagccacgccatcagaatgacttctgtagaaccatttgacgacaccccaaccctcaaccaccctttcttctactcgatctttgatgattctccccctctctttaaacttctcggtatgaacttccatctgggcgacacccagcccactggggatcacgttcaacagttccattcctaaatcagcgtggagtacggcatgaaagatatctgaagaatgaatcgatggaatctctgtatcatcttgggcatgtacgatcaagatctttgtagggtttgaacgaggaagactggcgagggctgagagagtagggaactgggtctgaaggaatcgaggggacgtcaaagtgtcttgaacgagtgggagcgcgcgaagaggggataaaagaggtaagaatcggaagagagtgtatgttttgagaagggacgggatagacgagtatggagacaacatggtcaacatccgtgggtgaatacctagaagggtagtttgatcagtgatgtttttttttcctttttttcgaaggaggatctccaaagaacgaaggaggacaaaccttcttcagcgagttgagcaacaagcaacgccccaacacccgtccccaaactctggccgacgataccgacctgatctggtctccctccattcctattgatcacccattcaaaggcagctctagcatccaatacaagacctcgttcggatgggacaccagtagagttagcgaatccacgataatcgatcgcgaggacgttcatgtcgagcgtattggagagagaggagatcaagttaactcggaacggcgctgctctattcccggcctatgatttgaaacaagataaatcgttaccactcatgaacaaagacaaacggacacgaggggaagggagataacgtacgttgccgtgaagaaagatgagagtcggtcgagtctggagcgcatgatcataggtgtcttcatcgaaagccttagaaggtgggtactgttctacgttctctatgtagaacgtcctaggtctatatcacaatgaagaaacaggtgaacagggggctgtttcagcgctacagatctagagtacacaagacgagatggaaataagcatacagaagatgccaagcaccgatagattcgccgtctgatgtttcgacctggatgtttcgcgccttaaatggagcgagcccgtaccgttcaggagagtcatacctggcaaagaacgggtacgggacgttgttcataaagataacgctgtgaaccaagtaggttaaaatcaagatcagtccaggcgaacaaacggaagagcagaagaagtcgccttactttcgttgtaacacggggatcagtagagcaagtaagaagcagacataagctgctcctccgatcgttagcaatcgatgagctcttgcgaagaagcctggcttggacgctccatctttagcgtcgtccttttccttagtgttttctttcaatttgtcattcgttgagctgccagcggaagctgtggatgcgatcagcaagtcagcgttgtcggtttgagcatgcgtgatggctagatggttgcaaccacaaggggaatatatgaaatcaacaagacatccccatctgatctatacaattcaatatagatgatcaaaacagcattgcctacccagctctggattggccagattaccctcgaccggttggtcgtctgccattgttcgatgttgtctggctagatgggagtgaggagagaaaacaagcgagcaggaaaaacaaacggaatcacttaaacaggtcaccatcaagcctctcaatcttgagctccttaaggaccatctctattcatctcatctcatgctcttggtgatcgcagagatatcatagtatcgtctgtgatgatagagacgagaagagtgtgagaacaagagcaaacggtctccgcttgttcttacactttctcgccgcgtctttttcactcactacaaattctttcctcttcaaccatcatcaccaacgtccgcatcctatccgtccatcttcttatctttgccattgtcctcatccagactagttctgagaaaggcccactatggcaacgctccagtcgacagccggctcgaccaccccacctccgaagtttgttgtgccgaagcgatcacctccgacatcgcctcaatcgtaccgaccgccgtttcctccagaccgctcctctacattctcttcctcttccggctcgtcatcccactcgtcctcatcaaggcatactgaagttcctcatccagtcacacagtcttctacctttccatctcctctattgaattctgaagttagaggacccaagggttacaccccgctcaatgacccgcctctttcggcaaaggccaaaggaaagaaacgggcgaccgtggatggttggatcgatctcgagagaggcgttggatcagacgaccctcgttaccggcacgatcacctagaagaagatgaatcacaaccgtcaatagagcaggaggaatctgaagaaatgaatgctcgaggttgggatccagttggccaggattatactagtagacaaacagaccagagttaccctcccccgttatcagaagcggagcaggaagagaagagaattgccgatgtatgtttttcttttctttgcatatcaattttgctcccttatagtggatagagaacaatgtgtctctcttctctttctcctttatagccaaaaaaacctgacctttcgtatatcctcttctctcgaacagaacttggcaatgtggaaagaacgagagctctctcgccgtcgggcagctcgagaatccaagatgctacgctcttcaggatccatcaacagaggtagccttagtgatagctcttttacggacagcctttcattctctactggactccggctcggttctcggtcgggtagtatatctcggaacagcaggtggagtttctggggcggggcgggagcatctataaaagagaatccggaagtacgttcttctttctctttttgtttttctctgtctgcttatccttttctgatcaagcaaacctcattgttctagtcaaatcaaacaatccctcacgcatacacacatccccatcctggatcccatccggagcctaacctgaactccaatgcgcgttctcagccgaccctcaaaactccgatgtcacccacttcacctgggccaatctcgccagattttgagtataggggtcaacaatggatgggtggcgccggcagtgatgggcaagatcaagtacaaggaagaacaagaccgatgagaacgttgggattttgggagagttggtgtgggacaggaagggacgaagcaccaggtgagattggtgaggatgatggggatgaccaggtcggaaagacgaacccgttcgaataaacaaacccggtaggggccttcttcttagtttatttaattctccgctctagagcttcctctcaggctcttctctttcttctcttctctcgtgcttttccacttgatgtcctgttcttgaggacttctgtctcgcttagttgtgaacgagattttcaagcaaatcatatctccatacacacatatacacgcgcgtccgcgtagtatcccttccattccttcaattcttttctttctctctttgtgtcatcgctcgaactataccatccatccatccatccatcatctcgtttccacgcactctgctatacatccacgttttctcttttttgttctctttcttaactctttcctttcatttttttttgtttctgttggccatgttgatattctattttacgttcatgttgtctgtttctccctccttttttctccttcacactttgtaagagaggttatgtagccctgaagttggcatggaatgtcttcttctcccttttcaagcatattgtgatcacaatccatctcttcaaaagatatacaacaggaagtgtgcggacaaattttcgctcttctggccaatccgtttggtcgaatttgacctatttgagataaagaatcagggttcggagggttcttcgctctcattctcaccaacgaatctggtaggtgtcagaggtattaatcagattggtgtagacgtcttatatcgatcctgcctctttctccttcttctccttcttgcttttcttctctttcttctctttcttttccttcttctcgaccttctcgaccttcacatcatccccggtcttttcaacccttggtttcttggactttctctctccttctcttttgtcttctttctcggcaggagcagtcgtggtgttatccttagatgccttgacctttttggattttttgggtttctcttctccatctttcgccttgacggcgctggcgtcaatgctggtggtagtagtagcagtgagggtcgcatcggtagtggaagaaggctcggcgggcttgacggcatcggaagatgaatttttagcagctcgctttgcgagtctctccgctttggccttggctgctttctcttgggatcgttttttctgttttattttgattgatacatgtgttggaaccaatgattcagtatatcagagatattcgtttggacggagagagacagaaggagactcttactagctctgcagctttctctgctttagccttctttgaatcctccctctctgcgcccatcttttcaattcgatcggtgatcgtcgacatgatagagacactgtccattccttggatatcttctgtcaacaggaatgtcttgaacctagccagtgatcttgtgtgaggcttccgagagaaaaagaatgagaaatttaagagatcagaataatcctggaattataatctaagctcgaatcggggcacgcgtccattcaggttcccgaaaacaaagagaacagagacagacctttgatttcaggtgagtctctccaatgaagtcgctcttcaatactttgttagggcacagaatacataacttccagttgtttgttccaggaattgggtaaagtgggtcttgagcgactttgtccggcggtgggataagaggtaatgctattttgttgatatcgttttgaatttacgagaggagtgagtgaaaagaaatcagcttgagattgattcaagcttagatttgattaaaaccacgggaaagacatacgttccgaatcagactctaaatattcatatgggaatagagatcaagaatatggaaagttaggccaaatactcctttctatatgagagcaaacgaagaatgaaatagaacaaaccttcatcctcatcattctcatcctcttcctcatcctcgtcttcatcgcccgacatatcctcgccttcaccggatttctcctcattgtcagactcttcctccccctcatcatcatcactgtcattgtcactatcactatcactttcacttccgctctctccactgacttcatcagctcccccatcgagtcccagcatggccttaatctcgttcaatcctgaagcttcatcttcctcttctctctccctcttcttgtttaatcgtttgaacatcctgcaggtctgtctgtgtaggtccggtcggtgcttagcctgtcggacgaacgagctgataagattttggtttgaatccaaaaaagaatcccaaggtaagcgaaaacacgtgacatatagctgtgtattcttgcctgctacgatttccgatatcaatcaacatgtacacacatgcgtatacgcgcataaacacacaacattgaaggacgatgttgtctggttggggatgaggtaatccgatagataggatgagagttgaagactgtcattagagtacagtagagttccatcggagaaacgggataccttatacggcgcgtcctagttctcatcgtcatcattctcatgtgcaagccaactgatatcttgctgggtgtcattaatcttaaaaaatctagatatctagcgagaagataaaggagaatgaaaggaagaaaagtagaagttatggatcccgcgcaagagaataggatctctaaatctatacgatcggtttaaagaatgagaatgttgtcgacagcctctcggaccttgacatagactgcgtccttggtatctatagccgggatctgatcaggaagaaatggagagaaggatagcacgaaacggtcagaaatagttcattagagcttcttccttgacggtcatctaatagcatgtaaagcagagagaatggatgaacagtagagagaagacatacttcgtagactttgcccttctctcggtagtaatccaccacgggcattgatgtctcaatgaaagttcctattgttggtgcaaaccaaaggtcgaatttgaatgaaataatctcaaccctaccacaatgagagatgacccccttggggggaattggaacgttacttacggaatcgcttgacaatactctccttgttgtcatcagctctgccactggtctttcctctctccatcaatcgctcaagcatgacttcctccgtacacgaaaagaacatgaccgccttagaaacacagacagactcgtcaaacttgatggcctggtccatctttcgagggaatccgtcaaccaagaatcgaggcttcgagttagggtctgagtccgtatatgtaaggtgagatagatcaaaaggagattcactgctcagtatcatcaaaccgataagaaagaaggtggatccagccaaacgaggaacgtactagcccaatcggcaggaggatcctgcaaagcggccgtcatcgcgttaagtaagagctggttaagtgattccaagaaaacacgcaccatcacaagttcttttcagacaacgaacagtatcctgacaggcatagcaaataaaagagaacgaaccttgacagtgacctccatagggaccacctggccttctctgatatactctcggatcatgtcaccatactgagatccgggtcgatcctgttcggctcgaaggagatcaccagctagtttttgatcagccggtcaatcggaagtcgggtcaatgaagagatcaaattggattaagacgaagaaagagcaaaggagagagatatgaacaaaccagagagatgaacaaagtgataatcccgaacgaggttggcgcactgcgttcccttgcctgagtatagaaacccacgaaggagaaacaagtcccaatcgagaaaatacaaagaaagagaagattcagttacaagtatagagatacaccaagactgtgtcgggccatattctcgaggtgtttgacgatacaagcgatgaatacgtcggatggacttctgcctggataagaaatgagggaaggcaaaggaatatatgccgaagagagaagaacgagatgatacgtaccgacaccgggtcctccgaggacaaagatcacaataacctctgactggtcgaaagccggggtctctgaagtcgttggagccatgttggttggtaggtgtgtatgtatgtgtgtgtgagagagagagttaatggagttaataggtgaaagtggtaaaaaccagagcccgaacagaatacatggaatgaaacttgtttccttttcttgcttgtctcactctggaaatttcatcatcgtctcctgtcttctagccaaaccccgcttctctgcccagcatctatcgactcccgaagaactaaacttgagcagatattcatcaaaaccacatgtagatcgataacgggtatcaaaactctcgcccaaatttgaagagacaaggaagaaggagaaggaactaagaaggaaaacaatagacgacaaatggagacatgaagaaaatataaaataagaaaggtagattggagatgatatatattcctccttctctgtatttatctaattatgtttgcaacattgttccagaaaagattaagaaagagagagaggagaagaagaaacttctcaaggaaaagcgtctgatctacgcggcagcctttcgaggctgtcgcttcctgtagtggatggtatgagggtgcttaggaagaacgatcatcgactcatagtcggtagcgggaacaccaccctccaacttgagctccatgttctgcacaaacgcagccagaatagttgaaagttgaacgtaagcaaacgattctccgatgcatcggtgtcgaccagctccaaaaggctggtagggagattcagtccccttgctgatcgctccgaatccgtaatcgaccttatccccagcgttgttctcgtactgctctcccgccttggcagccactccactcttatcggtccatcgggccgggtcccacttgctggcgttctcccagattcgagcatccatctgtgcaactccaggagaagcaagaacatagtaaccctgtggaggaaaaaagccgtgcaacagggcacatgcatcataaatatgccaaccaacttgtcaatacattgaattcgtagcagaacataccttagggatcacgtattgaccagactcggaaggggcagaaagcgcttggggaacggagatatcagagataacctttcggaaaactattgaatatcaaggcggcaacagaaatggtaattagcctgtaaaacatgcaaataagaaacctcaagaacaaaaaaggcacgaactggaatgaataggcgcatgaatccggagggtctctctaatgcaggaatccataaccttaagattcttaatgtcatcatattcgagcatccggaacgatccgtccggctgtccaagaaccgcaacttgctcgtcgtacagccgttggtagacctctgggtttgcggcaagctcaagaagtgtccaggatgaagtggcagaggaggtgtgctgaccggccataagaagagcaatcctagatatatcagttttcccagatatgtttgtcagcgaacttccaaacatactagttagagtggcctgagtgatgagaagagatactgacatgatatgagcaatctctcgatcgctaagaggtcggccgtccttgtaagtttggttctggagagaagcaatcatatcgtgttcgtgctaatgccaccattccatcagttccaaacgaatgggacaagaacaagaacaagaacaagaacaagaacaagaacaagaacaagaacaagatctccgtcaggaccaaaagaacttaaccacctggctctgcaaagaggaatctcaaaactcacgtcactctctccgtttcgcctgccttcaatgatacccaagtagaagtcactcatttccttctgggcttgatctcgcttccagtagctcggaaggggcaagtaagggaacaaaaagttaatcggggtaaatcccctatcaaggttctcatacttttgagcgaacgacttgtcaagtcccgctcggacctcctttccttgcagggttctagaagctgtgaggatcgtcagctcgccaagtgtcttgagggcagggaaggaactccactccttggatccatctttgaatgccttgaagctgtcatcggtcttgagcatagtgtcaaactcttcaaagatcattgggatgtatgccttgaggttctcgagcgaaagaccaaacttgacaaatttcttttgttccataaagacgtgattcgggcaatcgtatacgacatccttgccaaacacaggagtagtgagatgcttttggtgtggaagccaaccagaatgaggattcgagtgtgttagatacatgtggagaagaacgaaaagagaaccggcaaactcacagtataggcctcctcggcgctaacttggctaagctttccaccgagaatcatatcatttccctaaagatcaagaagactaaagtcaggtcgggaattcgactgtctctttcgattgaatacaggctagaggaaatgctaaccttaggtcccaaagcgacggttaccttccttccaatgaggatgaatgtgaacagatcgccgtgctaacaggacagaggaagacggacgacgaggtaagtttcactcctaatacattgaaaagaaaccacggagtcaactaaccttctctcggcaatcaaagtagaatttgtaagggtccatcccatacgctacaagtcaagatggcaacagaagctccatcagatggtcagttcgccattggtgagagaaatgaaggcaagacacgttgagaaatcgcgcgtacaaacggcggaaccgagccagggcacatagtggaatacaacaggtggcaagctagggtcctttggccagaactgttaagttgtatgggatgtgtcatccacgggtaagaccaagaaaccgcggttgaagggaaagaaaataaacgaatgacttgaggtatcagcgatcactcctttgatgggaacttttacagatggtattgagtctctactgtcatcttctgtcttgcttttttccatctctctgtttcattcttccttgtcttcgtttctcttcagtagagaggaaagatacacagactccacaagaacgtcttcacttggaaaaagcataccttcctgcagacaagacacgtacacaagagacaaggggaaaacacttccaaaagaaaaaaaaatgggggggggataaaagaaagacgtacgagctggtaagagacattgatgaggacagccaagatagggaatccaaagatagcagccaatacaagaatcggagtggaaggaagttgttctctaggaatcaactgagcgagctgtgtaaagatcgattgggacgacgacataatcagaaagatcgagtctaacagaaggaaccagagcggagagaaaacgacgagcaaaggcgaagaggaagagagagtccggtattgggagaaagagaggtgatctctcttaaaaagatccaagcgttcgtaatcttctggtcgatgctggaaaggatcaacagaaggacgaaaggaagaaggaaagaaggagttgaacggaagaaatcgaatgtttgtcgttggccgacaaatcgttcgatatttttttccacttgtatttcattttacttatctagcctttagtatgaatcgctctgcttctaacacacatgcatctatgctctttcgggtacaactttagaacgtcaagaatcctgctacgtgtcattctcaggcagacacgtccttgtatacatcgaacctcctaccgaaaggctcagaattagagcgagagagaacggagaaagaaaaaaaaaggagaaaaaaaaaagaaaaaaaagacgcgtatcagtcagcagaatgagagcacgttccaactgtagcccgtgcaaacaacgaaacaaagccctacctctggacagtcacaggaataccctttcgggcggtgatcaggacttctgggtcgatcaacgcatgcacaatcgattccttctcgtccgtcgtcgccagctggagacccatcgggtcgtacacgctcgtgtgaccccactttcatgacaacagtaaaagaagacgataaaaaactcagcacacaggaacttggtcgcagaaataagaatgaacagaaacatacggcctggtaggcgctcaggtcggagcttcgagccggcgaacacatcgatacaaacacctggttgtcaactgcccgtgctcgttggaggagttcccaatggagagggccggtggtcatgtctaggagatcacaaacaagagattaagagcacacatgtgagtcttaaccgattggattcgagtacaagttcctgagtgactggagaggataaagcatcttactgaacgcagcaggatagatcaatgcaacgcaacctaattccacagcaaagcgatagcgaacacggtcgatcgatcagtcatcaagacgtcacacaatgtggacaggacaaagtctcaccttgacgagcggcgatggctgccatttctgggaactgatttcagattggacagatgatacgtaagcaaacccaagacatcaagaacaacccgaaagtcgatggctcttgcccgagttagaatcaagcatgatagaaagacatactcgaatatcatagcaactgttcgtttttcagatagcacatacacaacaacagaatcatatcagcgaggcattcttgaaagaagcgaaaagagagagaaacccccgaagagaaagagtaaggacttacatcccaagtccaatcttaccgaacgctgtgtgtcccatgatttgattcgttctctcgtgttaactctgatttgggacagacggatgcacaaaaaatcctaagagaagagaagacatacgggtttcaaagctagtaatatctcttccacccgtcagactatcgctctccttgaatgtcatcttccccgggatgtcgatatcaaacagatgaacctttcggtgaatagcgacaagctcgcccgaaggatcatagaccgtacatgtgttgtaaacggaatctgtctctgggtcgatttctggaatagagcctggcgaagaggataaatggttttgtataggatgttatcatcagcacaatcaccagcaccaatgatcgacaggactccattttcggcaagaaaagagaagactcaccaccgataagccagaccccagcctccttcgccacggctgaaagcatactcacactctcgcccccctcggctgtcttctctgttgtcaaagcagagtttatggaacctattttggggattcgttcggcatatttcctaaagacgggaactgcataaggcgagttgaagacttcctttttacccaattaaatcaagttatgtttttcgttgtgcatgtaatttaggttggaacacttccatcagtcgagaattcgaagaagtagagttgagcgaaactaagaacaaaagaaacaaacaggtagaacaactagatggttcttgatgccccccccggctttggcggctttgaggaccatctcctttgcatgggccaagttcgcctgtttgttcgctccagttccgcccaactgaataagtgacaatctgaaaggagaagctttgatggatgccatttctttggtaagtttgtcctgttattcttttctaattttctgtagtagtcaaagatgaggagaagatgaggagataagcgatgagagataggagatcgaaaacgcctaaagtcgatgagtcatatcagactggaaaccctttggatgtctttcgttttgtttttttcctcgtgactgaatatccaactcttcatcaggccagatgagggtccatatgttcatgagtcagggatctagatggtagaatatgattgtatatggatctagtacacaatccaagcgctccatcagcgcaacccaaaaagagaactatgaacccggaagaggaagaggaatgaagcgagatttgagtaaagcaaaaggacaaacgaggaggatgatgtaacatatacccgagattgaaaaagctggttggaaagcagagacaacaagagtaacaagcaaggaagcaaaaagaaataacgagcggataacgaaactagcgatgacagacagcagaagcgagtagcagaaggaaagaaaaaaaaagttgttgggagaagaggcgagtagtatgtaacaaaggtggcgctctcctagatacagtataccggaatgtgttctataacagaagaaagtacgaagggcaagagagaaaatgccgagaaaactcgaagagtgacgatcggaacaatcgcctctagcttcagagttgtctcttcggctgtagagcaagaatcaaacgatctactttctcttcacagcggcctcctgagcttggccgcgctccactgtctcttcctgattcgtcgctgcatggcagtttcggtgtcctcgtcaactgtacgcttggaactgttgcaggccttgatagccgaatcagggcagtacgagtatgatccgctcttgttgcaggttccaacgctgctaccggagatccagtactggcaaaggtaaggaatgagggcaaagaaagggttgctggtgatacagagagggatgaaccgaatgggagcaggttagagtccaaagaccatgttggtagaaaggggtccagttctacaaaccgaaacatactttgagtggtaaacgcaagcgagataggtctctccactgagagaggcctagtacgtggtggaaactgagaagccggagtatgaagggcaggagtctgggagataaataaacaagacaacagatattagattgatgtacaagttgagcaagaaagcagtatgaggagacgcagaggggcagatgaaaaaattgaacgaaaaaaacatacagctgcagacctgctgggaagtcttagccgcactcgtggttcgctcaacgatcttggtgggaacggccgagacaaaggtgaggaagaaagaaagcacaaaggccgagaagagggtagacttgaagagcatttctgatagtgtactggttgaagtagggaaagtctttatgagggagtgaaagggagagcttgtgccgtttgcgagggagcggaaggtgaagaagagacggaaggacgaagatgcaaggttgaaaagagaacggggaagcaaagccaaagaagcaaacggacacaagggaggattaaaaggatgaggactctggagaaaagaaaagacatcgtactcctggtttgttggactcaatctttataggaatgctggaaggaggatttcctgattaaaaaaaaaccccgaaaaacattttcgccagagggcccgataggccagagtgtcggagtagggcatggtaagaagggattggatgaagaggaggtcgagggaagcattaagatcggatggaaggatattcaccgaatttcgtcacgctatttgttccagaggttgatgcggaagagtgagagatgagaagaggcacgaaatggaaggatcccgggaaacacctataggagactacacatagatctgcagctactagagcaagcccatcagccaggttcactctcggtccgaccttcccgatttgttcgggatagtaaacagagccgattaatccattctatcagatagaccatcgtggtcgctagaaacgatgatcgagagtgaggataacgcaacgtctggggaaaatatttatgatggcaaaattcgtaaagacaactgcgtcaaagccttctgttcctatgatattcgccagtacgccgtgaccggcgagaagcggagatcgggaacgcagcctgaatcgcttagtggggcggatataaaaagtctatcgggcttttctggagatctcggggctcaactgaggttttccaagcccgagacatatcgcttcccgcggtcggaattcaccgacggaagcttctttcataggcctgaaggtgatatatcaaccgtggctggtggtcaatggcatttaattatttaattcctcaaggtttgagccccattgactaacagacggatgctctttaccctctgctctcttcgctagaaggatcgatcgccctataaacaatgaataaatttctaccgggcagtccggtccgtttggtctgttctgtaaaccccttcaattgttctgttccctgtctcgtacacccactcttttactacgcggtctctctaacattcaaaggatagagagtagaccaacatgacaaattggaaatcccgttgaatctagattttctctctcctcttctccctttcacttggaggacgacgtctttttgatcttttgtttcttgagctttttcggaatcttgtctttgcgcttctctctcgtttcctccttcagcgcctttttcctttcctgttcgtcattcagaccgttgtaatatagatgcggaagtgataggatgatcagctcagtgtcttctagcccgagacgcttctaaatacagatcagtccgaaacagggactaacctttttagtcgccttgtcctcatggcgatggccccggggtcccttcttctggaatccatcctcgccctcgtcctcgtcctcgtcctcgtcctcgtcgctcgcgctcgcgtcttggccttcttcgctatctccctcttcatcttctccctcctcttgaataccaacgataccgacacctccgctgcgggcgtatattaggttctttccctcacccctgttgacctgatcgacgtctcgttcgggatcatatacctccgagagtgatcgcggaatatatgacgagttgaaaatcgcctcatcctgtgctttatcgatctctgactgtgtcctcggtaggcttggcgggacaggtgacttgacagatgacgaaggttgatcgatcgatgtcgtcgccaaggaagcttccagagaggcaggaatcgatgaggatccacccgcatcctccacagcctcgatagaaccggcttgagcgtcttgttcgatccactttcgaaggacttcttcccaactctccagctcaagatcttgctcgttttctttcttcccctctccgttgtccccaccctgctgtggtggttgttctccctctccggtcgttgctgctgttcctcctcctccccgtcgtcttcgtttggcatcaacggccccagtcagtcgctcgttggtgatgaactcgaacgtccgtctcagacccatcacgtgaacctctcctccggatcgtttcttgaaaaagtcgatcacgttccggatgtctgatcggagaaagtcgtatgcgtgcggatgatcatgttcgaccgattgggagacgtcgatgatgtacagatgatcgtgatggaacctgggtgaacgggtgggcaggcaggcaggcaggcaaagttgtgtcagtcatccgtcttgggaggtcatgtaataattctttgcaaagacaagagaatgagatgaggaggaggaggaggaggaggagagacgtacaatatattgtattcggatagatcggcatggactagtttacatcgctgccacatcactcgcatcaccatcaatagttcagcatacaagtctgccaactttgatgtctccatcgccggcgcatccttcaatcttggtgaaggcctagtcgtaaagacaaggcgagaggaaagacgcagcggaacgacataagcaggatgtcttgagtatgaggccaaataaagggagggaaaggggggaaagagaggaaacgaaaaagacctcaccatccgtcatcatttccaaggaactccatcgccaacacgttttctctaacttcgataggcgtcgggcatcggatttgctcgttctccaacctctttagattacgcatctctttctctgcccatactgatgtagttttgcacaaagaaagagtagaaaagatgtgaacgtgaataagaccgggtacggcttcggcacaagaggagagagaagagagggacacttacgtctgaccatctttctagggtttccttttccgtacccacctcggaatcgatgctcaccagtgacgtatttgtctctgtctttgaacacaaggatcgaggtcttgtagatcttgagcgcgatatggtccggcaagggcgtcgggttcgggttctgaggagtcggggccggagggttcggaggaggtagtgcgtggtagacgtttgcctgtgttgatacaaatgaggatgcacatacacatgcggacatcgggaaagagaaccgcgtaagcctcaaacgggaacacgaagcaagacagacggagagaacgcacctcttttccggtggaaacacaaccctcgacgatcccaacgacacccctgttgatcatctttaccaagaccaatctggtccgttgatcgagcacctgttcgaccgtggctcgatcgctcttatccttctggttcgctctctcggaagctgcttttcggttgatcgaaggtcccggttggtacggtgccacattgatcaacctggccaccctcgacatttcagtctttgtacttccaccatctgtgggttcacccgtgctggtggcaccggggttgactcgaggtttgggtgttgtccgcttggtcggcctgttcagcgcaggaagaggaacggaagatgacgcaggtgccatcgaagtttttgagtttgggtttgacccggaagaagcggcagcggcagaggtgacagagtgatattgtctcagtcggttgtactgctttgagaagtctatcgaaggttgcacccgtgggaacggacggtcagtctaaaatagatccagacgttggttcctttctttttgataacaaaccagggaggggaaggggaagggaaagagaaagagaggacttgcttcgttcggctccatcccaatcttcatcgttcacctcacccattctcacgtactcatccccactcccttcatcgtcatactcatactcatcccaagcttcctcctcctcctcctcttcttcttcctcttcttcgtgatcatcgttagtttcctcaaagactacgcctcttaaggctccggatgcaagcccgggaagatccttgggttgatgaccgtcctcgtcgatgaatgccgttccaggaactcgaggagctgcgtattcttgtcggacaccagacggatcatccggcgcgtcgtcgaactgatcggacggagagaccatctgtgagagaaaaggtggatgtctacgtttgagtcagaacagggagagagggagaaaacgagaagggtgaaatcagaatcgagcctggttcaaaatacgggaacagtagaaagtctgtgtggcacctctactttggatgtgttcgggttgtggattagctggttttcaaactgctgacgctttcgttgactgtggagattgtgatatcccaaattttgaaattaaccctaacagatcaagcaaagagtttgaatcacactcaagtccgctggaccgaccctgatgaaaacgctgggactacaaatttggaccaaattgttgtagtatctttttcaagatttgtatattgctttcttatttgcctggggtgttttctcatcgtacacatcaattttgaaagaatcatttgataataagacagtaaagaaagagaacacggacaagcgagctagacgaaagaagaaaacatcaagagttagctctcactcgcgctttgttctcaacgtcgaccacaaccaagaacaagaacggagagagggaccatagaaacgaagggttcgaaaagagatgaacgctccgctggccgttcttaagagcataaagcgtttcagcatctccaaaccgttaggccggattactctgcgataaattgtgttatttttcttcgtccctgcgaacatctcttttctctccgttctttctttttgtctgttctgtccttctctctcgttcttgttccggttgctattcacgggatgtgcttgtgtgatctgaagaatgaaaaggtgacactaacctaatacataatatgatggtagagtacaaaggaaaaaggcgacaactacaaggtcggaaagtgcacaacagaacgaaagacaaacaaaagtcagtattcgtgtggacagacagaacgtattgaaggagggttatagattgatgggtagatcagaagcgcatcttttggcaagtgctagtcgagtcatcaaagcgtgagggttgagttcaggctcgttatgactggggcgacatgttgtcatcaggtcggacagtggagtatgtgtgtatgtgtgtttggtgtatttgggagacgcaaggccgtcgaagcaagtgaaaagacgaaagactaaccgatcagagaggatgtgtatggagagaaggaaggaaagagagaagagagagcgaaaaaatcaaggggaatttatagcaaggacttgcttacgtaattggtaaattttgggcagcccaaactccgacccttctcctgttagggttatccaggtttgtgcacacccagtccctcatctttcaccagtttgatcctccgacgcttttggacagacacactcacccttggacgcaccgacagcaaaccgaacacacaacacgcaacatgtctggagatggaaaattgtttgacgacctgttcgtggtttcgtccgttgacaagggaggcaagaagtttgaccggggtccgtttgttccctatgcgtgtgtaccgttgggtatgtctgtgtttgctgaccgacattccttttctctctttgacgtgatctgtgtatcgtgactgtctgtctgtcttgcgatattaccggacggcctggtccaacctaaaaatcgacactgtgcattgatcttatatgatctctgggctctcttttggtgatgatgacgatgatgatgattgggggcaaaacaaatgcagtgtcaagaatagaagcctcttcgtccgcactgtcgatgaacctgacgctggacatcaactctgaagtgttcccgttgagcgtgggcgaccggatcatgctgctcctcagctcgacactcttccctgacgaggccgacaaggcggaggacgagacggacggacaggcaggcgaatcaaagagggaggcttggagaggtggtgaggaggggctcgcggctgatttcgattatgttacgtacggcaagatctacaagtttgaagacgtcgctggcccggaaaaagacgcgtacgtaggagggggagggggtttcttcttttgttcttccttctccgtccccttacgatagaaacgatactgattggaacgggattgttctttcctcccatcgttctctccgctctcattccacgttccgaacgtgtcaaacagaacggtctacatctcgttcggtggtctcctcatggcgctcagagggagctacaggcatttgagtaatatcgtcgttggtgagaacgcgtactgtttgattaggaaatgagcgtttctctttgttctgttcttttttttcttactttctcttctcgggcgggaagacgtaagagaatacgggaagggtttgtttccggatagggcaagacagaaggaggaggagaagagggaaatgacaagtaaaaggaagagaaaaaagagaaacaaaaaaaagagaaaaaaaaaagagagggaaaggagaaagaaagacagatacagtgacaaggaaggatcatcaatcgggagagctctaacgtttcttgtagacacaagctttcaacacggtttctccttctctgaggacatcatcccaggtgagggatccctcgttggaccaggtgggaagaccggaccgggtgaacgagagcgagatgaaatgagtgtttgtctcgtcctgtgtgtgagtgtgtgtgtgtgagagagaaaaagattgttagtatgaaaaaaacaaaaacaaaaaaaaacaaaaccacaagtaaacacatcgtcaagaacgaccgagagaagaataaagagagactgacagttcgagtcaggtcaaacccaaaggaagaaaccatcttgacgaacgcttcgaccgaagacatccttgatttcacttctgcgatctccaatcggcctctagaaggagacgaagaaagcaagcaagcaagcaggagaaggggttaggctaggactgcatacacacaagagaacaagacaagacaagacaaaacaaaataaagaaaaagacaagaacgaggaaggacgaacccgtctttgaggacccgggcgatctgtctgatcccgttcacccagtttctgcccatcagacttaacgagcaaacggcggcgtcgacgacttcggctcctttcgagcggccttccggtccttcgcctcccggaagatcgatcgtctcacaaaagtcgcctctgatcacccactcgtcgggaacgagatcgtaggagagcactttgaagcctgagggaacgagcgactttgctagctcggcatcaccacaaccgagatcgatgatgagcgaacccggggccagggtcgatcggagggaggacgtgatgacggagactggcgattggggccatgtttgagtctgggatcggaatccttggtggtactaaggggagaagagagagagaaaaaaaaagaaaaagaaagaagattggctggataagaagaaggagagaaagaaaaggcgaaagaagaggcaagagagatagacgtacatcagagaaaatctcgggatcggacttcatcatttccagagcggaagccgagctggtcgtgtatagctgttcgttgatccatctgaatcaggcagcagcgcaaagagagagaccgatatgagcgtgcgccggtcagttctctggattgttttgcgaacgcgtttgatatgagagaataaagaaaagaaaagaaaagaaaagaaagagaaggatgtggacgaaacctgaatcgggcgccagcgagcttcttcttcatctttgcctgcatgggagtgagaccatgaaacttgtcgccactcaagagtccttcgtcctctagagggatgacaacggtgttgaggtcgtcgaccgtggcggttgacggcgccggttggttcacggacggatctgcctggaccgattcggccgagggggcgacggcgacgaggatcgaggcgagtgccgggtcgaccgtcttgggtttctttccctttttcgactttttcaacggaggctccgacgtggagtcagcagaaggggcagcggccgaggtaggagcggaggcagggttaggagcaggggcagaggcaggggcgcgggcagaagtcgagggagggatggccttttggttcttggaagggctctgcgcgctagtagcatcttggccggccttttggttctttttctggttctggttctggttcttgtttttgttctggttcttttttgatgctgctccgggagcagctggtttggattcacctgcctttccggcctttttcggttctacctttgctttgtttccggcgttcttgtttgctcgttctgtagtaaagggggttagagacagaagcaagatcagagggagggagagagagagagatatgactgtgaagggaaggggggaaggagattgacagcgcaccttctttctccaagtttgccatcagcttgtctagattgacggtggccatctcgaacgatgcttctcctccggcaacggcggcggcggcggcggcagacggtcgtttccgtttgttgcctgaaggattattgtttgcggggagagagctgttggcgtttgagggaaatttcccccatcctggggtttcgaacgacatgccgatggagtgggtgtgggtgtgctaaaggagagagagagagatagagagagagatagagagagagagagagcagctagatgagtctgtgtgggaagagggcgacgggggaggtttctcaaattattcagtcttgagggcggggatgaaatcatcgggtggttacgcgaggagcacagcttgggcgtgttaccaacccggcctccgcccccttacagagagagagagagagtgagtgtgagtgtgagtgtgagtgtgagtgtgtgcattagagagagtgcgtgtgtatgtacaagaagacgcacagtagagggaatacgttagagagacatagagagagagggagagagagagagagagaggatgcactggagaggatgtactagaaacaatgtgtcgttagggaatgcattaggaatgatgtgtcagggaaagcaacagagagaatgtattacagaaggtccaacagagaaggtccaacagagagagagagagtgagagagagagagtagactgcaaggactagcaggagtgtgctagggaagatgtgctagggaagatgcgctagggaggatgcgctagagggagtgtatttaagaatgcaatacaccacgctacactacaccacgctacactacaccacgctacactacaccacgctacactacaccacgctacactacaccacgctacactacactacgatagaatagaatagaatagaatagaatacagtctgatagagtaggatgcactacgatgcgctagaatacattacaatacaacacactacaacacactacaacacactacaatacactacaatacacttcactggccacactcgctcactcgctcactagatggagtgggaggggggtgaatgacacatgcacagccacattgacacgcagtcatgcatctcaaagcagtgctcgtaaccttcgtatttcagcccaccccgctctctctctcatctgccgcctgtacgctttgacctcgaactgcgcacaccacgtgacctcattcttttggttacccccccgccccctgacaccaccaggatggccttcattctttacggttctttccgcttccatttttttctttttctttttctttttctttttcctccctcctcctttcccgccgctcgctctttcactctcatctttcaccctcaccccacccgtacgttcaccgttcttgtgtgttctcttggtcttggtcttggttctggttcgatcgttgctctaacaacacagtctgatcttgcttctctcgttgctccatccaatcggtcaatctcacagctcccgtcccatctctttttcttttcccatcacaaatatgtctcaagccgttcccccctcctggaaggtatgatctcatctctcttgtgttttttttggtttctcttttttcctcttcccttctccgtccccaacactaaccaacattataccctcccacccatctacacccacacacactcacacaggacgttggcaagtcctcctccgatctcctcagccgagactaccccctcgccggaaccgctctcgaggttcgaaccaaggcgccctccggtgtgtccttcaaggtcgccggcttcaaggactcccagtccaacgccatcaacggtgatctcgagggtcgatgggctgactacaagcgaggactcgccgtcacccaggtttgtcatcttctttgctcgtgttgtgtccatctctttttcttttttcctttctttctcttgttccatccttttttttttttctctttttttttttctccttctccttctccaatctcaaaagaaaaaaaaaaggtgtgattctcggaaatagtcgggatcgatggaaacgactcgagtagaacacaaaccaatcatcctagatggccagtctatcttggatctctgttctctgttctttgtccctctctgttttgcttctcttcttttccttctgcctctctctcacacgcccagatctctgaccacccacctacccacgttcacaaaaatcacaccaggtctggaacacctccaacttgctccgaacccaggtcgagctcgagaaccagctcgccaagggcctcaagctcgacttgaccaccacgttgaacccggcaaagaacgccaagggtgccgtcgtcggtgccgtctacaagacccccggcgttcacgcccgagccgtcgtcgacctcttcaagggcccgaccttcaccgccgacaccgtcgtctcccgagacggcttcctcgccggagctgaggccacctacgacgtcacctccggtgccgtcaccaggtatgccggtgccgtcggctacaccgcccccgagtacgccgccaccgtccacgccctcggaaacctctcgatctactctgcctccatcttccaccgagtctcccccgagaccgaggtcggagccaaggccgtctacgacatcaagtctgccggcgtcaacctcgaggtcggaaccaagacgtgagtctctttcttttttcctgctcttctcttgcctagtcttgctttgcatccctcttcttaccaacgctccttgctcaccgccgttgaaaccttccttttctcctttctagctacctcgacccctcctcgttcgtcaaggccaaggtcaacaacgccggtgtcctcgctctctcctacacccagggtctccgacccggagtgaaggccgccttcggtttggccctcgacacccagcgactctccgccccagtcgcctcctcccctgcccacaaggtcggagcttccttctctttcgacctctaagttttcagtcgtcagactgtgctttctttgacgaacggacacctcgttctctcttccacctgaattcgatgtgacccatctgggttctctccgtttcgtccatccgtccttggtttcctcctttgattctttctcttctttgtctattcttgtccccatcccccctttttttttctcgcctccacttccacctcctcgcttcccccttttttgtgtatcacatcggttcgcttggattctatggttctttgtgtgtttttccatctttggaagttcatagacgcaaacaataaacaacaaaacaagatacaacaaagagagaaagataaacgcaaaaagaaaacagaaagaaagacgagagatgttgcgctcgacgagaattccgtgttggcctatttttctctttcccccccccccc

SEQ ID NO: 1833 - DNA, 16239 bp, Xanthophyllomyces dendrorhous
cccccccccccctttttttcctctctttgccttgatttgcctcgcgagagctagagcttgtgtgtgttgatccggacggctgcttctctcccccgtctccatcgggactcgcagcaagcccaagatctagaggaagaacgcatagaattcttgaaagacgtcgtttggtcgtatgcgaatgctgtgtcctccgtttgcgtcacggatgatgaggttcgtttctctttcgttcggtctgatcctcccttgctctgcatattctctttctgtgtagatcatggcatggcatggggactgatagatcgccttcgatacttctttccatccttattaggcttgtgagagattaagagtcgctttagaagcggtggatcctcagctagagaccgagacattcctcaggaattatgccaccggaccattcatcccaggttcgtcctcccccccccttccccttgacgtgcgctcttcgttcgatacctatcggagactgaccgttcctgccgttcttccctcctttcaaccaacagacccctcgcggtacatcgactactcggccggagaactcgatccgacagaacggacgtacagactcgccagctttactcgacagtccgcccggccgatcgcccctgttgggggcgaccggacggaatcccccctcccgccgccgcctgtcgaggctgatgaggaggccgatcggggtgttgatgagtcgaacctgcccgactcgtgggcgcctccggtcgctcctcttgccactcgacaacaacaacaacagcagcagcagcaaccatcttaccagcatcagcagcagcagcaacaggaggctgttcgacagccttccgctccttccgctcgagctccttctcctaatcctcaggtggtcgctcagaaatcgttcgctgcctctcaacctacccagtcgtattccaacgagatcccaaaaccatcggctccttctcaacctcctaccactgctttgcaaaatctctcgatcggtaatagtaacaacaatgacgacagcagcagcagcaaccactacggaaaccaatatggtgctcctgttgccgctcctttgatccctgctcaactccaatcacccacccagaatcaaccgccagccaaggaggaaagctcggtgaacttggatgaagatccgatcgcaaaagcgctggcagatctgcaagccaaacggatgtctcgagccggaagttaccgatcgagacattccgccgttgcatcccctatatccgctcaacaccagacgttggcttctgcgtccaccgatggacacccatcatcgacgacgacgaccgctcatcgacaaggttccaccagttcgagctacgcaccttcccatcagacccaccgacagactccaagcctgatcccaccccaaccgggctcgacctcggccgcgctggctcagtcgcaagcagagttcgaagcgcgggcaaacagacgacagtcgagagactactcccaggccgcttcctccatcgtcggtgcccatccgtcttcccgaccgtcgtcgcccaacgacatggcttcccaaggacgagcgccctcgccagcgctgatgcaagcgccgtcgacgacgtcaaactcaaccatgccggtggaagaagtcctgtcaagatactcccagtcgttccccggcgagggcgcccagcaaccccgttcgaggtccagagcaggctcggtttcctcccagaaatcgaggacctccaccatgtccagaccggtcttcggcgccggcgatggttcggtcaggagtcccagtccggcaagagaggggttcgccggtatcggtgcaccggccgtgacgttgtcttctttggaccctagagctccttcccctgctttcagtcagaaccaaaccgggtggcaacagcagtcgtaccatcaacaacaaccggcatacggacaacctcctcatagacaaccctcgcctgctccttcgagacaatcgtaccagcaaccgacgtatcaccaacaaggagcggtctctgccagacagccttctcccgcgcccagccaactctacagtcaacaacaacaacaacaacaacaacaacaacaacaacaacagcagccaccagctaggcaaccgtcgcctgctccttcgcacctctcgatggctccacccagacaaccttcacccgccccatcgaggacgtccgttcaacatcagcagcagcagcagcaaccatcgtattcacaacctactcgaacaagcacaatgaactcgacgagttcgatccctcctcctctgtccactcagccacctgctgtagcacatcctccgacgaacaacgcgtatgggtatcccacctacggtggatatcccacaaccaccggatctactcccgccgccgccgccgccgctgctgctgccgctcctcaacagatgtacggcgcgcctccgttccagggatattaccccgctgctaaccagccgtacggcgctccacaacctcagatgtacggttcggccgtaggccaaccatctcaacctcagctgcaactgcaacaacagcaaggtcagaacggagggtatcctgtcggacaatcgacttatggatccgttggatcttccactcaagctggctacaacccctctggtcagccttcataccaacaacaacaacaacaacaacaacaacagccttcttcttcttctcttcttcaacaacaacagcagcagcaacagcagcgagctcctagtccggcgatcaacaacggtaacccttcgcccgtaggaggctcgttcgaacagatgacagacgaagggaaaccagtgatcctctacgtcaaagcgctctatgactaccaagccaccatcgacgaggagtttgacttccagaccggcgacatcatcgccgtcaccgacatgcccgacgacggttggtggtccggtgagttattggacgagacgaggagaaggccaggaaggaacgtctttccctcgaactttgttgccatgtgagtttacgttctttctttcgttctttctttctttctttcgttctttccctcccctttacctacgagttcatggagggttcttgttttttattttatttttttaaatcttttccttcattcctttgtgaacgtcaaactcatttactgatacttcacgccgggccctggttcacgttgacgttcttgacaggttctaaaccgagaccctgatcgaatacgatagatctatacccttgtttccttgtctcgccttcctctttatccatgtctcccaatgatgctcgtcttctccttcttccgctttgagcaaatttctagagagacaacgaaggagcaaggagagagacaacggctgaaaggaaaagaaagagagagagagagaatgaacgaatcacggagaagagatttgttttttttaataggaccaagagaaacgaacgtcgcaagatacagcgataggacgagaaacaagaaagaaaaaaaagccgaaggaaagtgagaggtatagattacgatacaatatagcacgtggataagataaatggggtgtagatgcggataaaggtgcttgaaaaggcaaatccggggaagaaggaagggggaagagaaacagcaccgtcaaagaaaccaaaagaggaaacaagagagagagagagagaagaggggaaaggaggaggggagggagagaaggcgaaagaagagaagagagaacaggaaagtcaaccaaacggaacccgccgttcataataccctcccatccgggggtttcttcatctattatcaccagccgctagatccggatccctgacttgacatgtccgagatctggccgcttatagacttgtagctctgtccggtccttaatcctgcagatcggcgagggatctgggaaccgggccggacttcaagcacaaacctggctacgattctgtcatgctggttggagagcgcagagaaggtttcgacctgttcgtagtcatagaagaggatgttaggttgattaagaagtttgtttgaaggaacacagatcaaacgaaatcaacatacgacgatgacttccatccgtccttcatcccccactctgggcacaccatcgaacagcccgttgttaaatcttaaccaccgaggcaacgtttccgagccgtcttgttctaatccggcaatcgttgccctcaatacacctttgaggggtctattggaatccaagtcgatcgttggcctgaatgagaaagcttctgtcgtgtgcgcatagaaaactagcgtttcgtcgtcgtagaacgatcgattggtcttctcagaatcactcgcagagggtttggagacgtgataggaagttgaggtatgagagtctccactgggaagaggaggaagtttgactcgagggggagcagtcaatgatgggttggagggaaacgacagctcggaagcaaatgaccgagagggtgcctcaacgatcgacgtgttaggctctaccaaagaataggacgtttctgagtgggcggcatctaatccggcgatgtatgtcgtgtaagaagcaagctcagagttcgttccggtaccggtcataaaaggaagaggggacgctccgatcttgacttcaggtctagaaggagcggtcacaagcaaggaagggcttccaataaccctttgggcttgaagagaggtttgtgtcaaccggttggctgtggtgatcacagcagaattggtcggatctgaagcgagcgatcctcccgacatcgaagaaggcatgtcatcgtcctcatcgcagtcggcgtcagaataaggtcctagatcgaattcagtttgacctcgtgtcttccggtcggatcgaccgtcttgaacaacagaggcgtcccaaacatatgaatctcgactactttcccaggaagcaggcgattgactcccttgactataacggaagctttgtccttggtatgagtcctggtcactgaggaatccaaacttggattgaggtcgttgatgggctgggtaaaattggctgtcattggcagaaatagacgtagcctgcgatgaagaccgggacaccaaaccattgaaagcgcttgcttgggattgacgagactgctgtacttgagagccaccttgagtgtagacggggatagggtaagagatagaagccgggtcgatggaggtgatgctcttgctaggctcgaatcgagtcttctttgacaacatcttgaactttccagcggcaatcgtagtagcgcgctatccattcaaaaggagaggcaatctttaacaaattaaattacaccttgatattgacgacaaagattgaccacatacctgaggaggtgtaattaccctcttaaaaaagcctgtgaggaaaggaagataatccatagcctccgcatctttttgactagacttggattttactgaaccatacacatcttctcctaaagcgatatccgccatacgttctggctcaaacgcccttgcctccagctcgaagccatctttgacttcaatctcagctttatcatcgtcgtatgcatatccgttctccaacgcagtctttcgatcgtccacctggtgtttgtctcgctcttgagaacgacagtagtggaagagaagaacgagtatcactactccaaatacagtaccaatcactccagcgacaatcgcttttcgtttgtgagtgagagtaccaaggttagcgggcgtgttagtgccagaatgagtcgggatgttatcaggggcgatggagagagagatgacttcacgagacactgcatgagttatgctatcctctacttcataagtgacgttgacagtatcgaatgataggtcgtttgggattgtggcatttgaggaaagcgtgttagatgtgttcgagaacgcaagccatttgcttgcttcctcaggctcgtacaagaccgagaacgtgagattccggtcgagggcagctgaatcgaggtaatacgacatatcgaccgataaagctttgccgggagtggcgtagatcttatcgggtgtcccgctgggaaacaacgaaggatacacagatacgggaagacgaagagcggccgtatcgttgaatatatccgagatagtgacagggaggaagagagtagaggccgattgagcttcagcagaagagggatatactagatcggtcaaattcaacccatggtcatcaaccaagaatgacatggtcctgatttgtccaaaagcatcctgtcagaacattcaagaaaaagagcaagacggatttaatcagacgtacgtttcgttccagctcagccaaggagttgacatagtatcgacatttattgtcgatatgttaactctgtccagagctcttccgtccaattccaatcctgcgctgttaagatcggaaaacatatcccacgggacaatggtcgactgtgagtgagcatccacagtgaaatttattcgttgaacgacgattgattgggtgtcgttcgttccgaattgggtgctagacgagagagtatgatcggcaaccatcagtcggaaggaatcacagatgtctgcttcgccttctttggagcctccgcaaagcttgacgtgacaagcagatgaacggtcctcaggaccgggagtatacccatgaaactcgaccgtggagttcgagaacttcaaccaggaagggataggggaaccatcggccaaggacgcagagaagaatcgggaagacgaagggaatttgaacgtagaagagttgaaggcgatagagaacgaccactataggacgatgaatggaaacatgaacaagaaaggcaacatgtgttcaattcaacaaatcagcccaatgctccaggtatagcattagcgattaagaaaacaacgcgagtcattactcacgtgaaatgggattcggattcgagcaatactgtcttcaccaggaggcaaaacaaacacgctacttagagccgggttgtcctgtctcatttggctcaaaataccagagcttatctcaattccagtcgctacggtagtttgttgctcggccgagctgtaagtttcattcgagaaagagacctgcgaagaccgcgcaagtaagggccctccggagggagcagatgaagaggcacgtagaggaatgggcgaggcagacacgctcaggaacagggcggtgatggcaaccagtacacatcgaagagagtacatggcgaagtagaagagagggtggcgcgtgtaaagggaaggaagggtaaagaaggaagctcgacgattaacgaaagagcagagagaaagttcctgacaaaggagagggttgtgtatttagaggccttcccagatcgaggagagacaaaccaatcaataagcaggtgagacaacaagactacttaacaatgagagcgcaacaaactcactggaaggaaacaacgaagaaagacacgaaaagacagtgggtggcgacttgattcaacaagtggcaagagggattgcacaagtagaacgaaaagggaggatgagatagaagaagaagaagaagaagaggggagaacggaaatgggctgaagaaatgaccaacatttgagcggacgaaatactcacaaacgagagcgccttcgtccacatcgcgtagctcacaaggaactgtggacgtcatctatgtgtctcttatgtatcagtcaacatctataatcaaaggaaccgacaacatacgaggacgaacctgataaaatatgtgcctgtacgactaaaatggataacaacgcgtcgttgactaaagacgagtctctacagcaaacgactcaagacgcgaacatgaacagtccgaggacaagagtgagatcaacagccaacaggaagaggtaaaaatatagacaagatacagtcctgatccgatcagtagccgaagcgaggtcagcggataaaagtaatagggtagtttctgtatttcccgaaggtcagcactcggctcgaacgtttagcttggtctgtcttaatcattatagagatagagaaaatgaatgggtatatgcactagttctacaaggatatatgatattcggctttcccgagacctctttgttacgacgtctcgtctgcatcaacatctagatgaacgatgaactgaggtctatcgaagagaaaatagcccacggcggagacagcgatttttttctcgtcaacatacgatcgctctagacttcaaagttattcaacaacggacagagcgagaaaatgctcctgatgacgaaccttttcccaaaaacgaccttagtcttgattacaccgacacattcatacctcgtcgctctcttttcctccagctcattcttttgcttcttgaacgcgccatcaatgacctgttgacgttttctcttgagtatgtcagaagcgagtgctggtttggacgaaggagtgacagaagggcgataaggagatgaagcaggctccagatcagacgagtagtcaatcggctgcagcgtacagaatgaacgaaccccaaacaaagcatatatcagttcacaaactctgacgcctatacgagctatgtgcggaaatagaatacatacaggccgaggagcagaaggcatcggactgctcataacattaaattctgagctacttggaggcattgaattcttctcgtcaattccctctagctcttcatcgtcaatgataatcggtgctttccgaagaacggctaacggtttgggcaagttgacaaacgtcccgtggagtaaatggtgagaaatggtgagtgttggtcgaccctttatttcagacaaaccatttttgtattacaaggagaaataaaaggaaagatatcagtctactagaatggagggaagcattggaagatgtgaagatttcaagggaagcgtaccgcctcgagtccaagctttccgatcaactgaccgtctgtatctccgtccgtctcgatagccccctgtaattcgatcaacaccgttcgtccatctagttttgcaagtacaggagcactctctgagggattggacaatgccagagggctcaggagcgaaggcgggatctcgatacggattctcatggtagatgttggtcgttcgttctttattaatgacggtctcaattcagacgcgttttgacgataaaaacgacgcgttcaagtcaaccatctgatgcgtgactcgcatcctctatgtcaggcaatcgaaaggcttcttaatcacaaggtctgacatcttaactggcaatcatgtacactttcgaggatcaacaatggcgagtgatgttgggagctcacatgagaggtacatatcatacagaaaccgataaccgtattagatgatagattcatgggaaaacgttaagacgcatcgagagatgattcataactcccaagtccttcaggcctaactatggagagcgatgaaacgaacaatcaaactatgaggagaatagagaaagcaagacagaatctgacatccatcagaagaagcccttctctctgatgatgaagggtgatcccttgacatctataaggatctgagcgtaactatttgcttctatcgtggaatattttctgtaaaaaaaagattgttgctacattcagttacatagaagatcacgaattatagccattggcgaatgagagtacataccacgcgcctgacttcgtattcttttctcataagcgttcttatcgttcctgatgaacaaagagaacagtcagtgaatctgatcgcacgacatggcgagtcgcaagacggatctgagatgtgtcgaagcccataaaggctgaacctactggaaaagcgtgtaggcctctacttgagctggatccgaagcatttggatcgttcaacagattttgaatgccaatcacaatctacgtccaagcagaatgatcgaaacgaagaatctaggtgagccaatgaaaccagaagatacgcgagaagaacaagtactctcacctgtttgatcgtaatagccggcttccagctcttctcctcgtccaaaatcgagaggcagaccgtccccgaaggatagacattggggtgaaaaaggggaggagtgaatttgcctttgtggcgagagataagttgagcacagtacttgttaaggcgaacggaagttggatcaaaaaacaagacataagactcagtggaacctacattttggaggctttgacggataatctgaaggttgattcgatttagcatcataaccagataattaatgaattcaacagaggacaacaagccagaagaaacacaccttcaggaaagatcatctgaagcttaaaaatacctccctcccagttggtctgataaagtaaagaccaaacgttgagagacatcagtgactgatacgttggtttcgatgagaacctgtgaacaaacgtactccagcttttcctggaattccgacctcccacttcatgagatccatggttccatccgtgttctttgccggacgcgcatagaagccctggcaatcaatggtagcaaacgatataaacagagataggcaaagattgatgagcatattctgtaaaagaacaagaaaagaataaaaacagaaataaactcgttcataatatacttacaaaaggatggtcctttcgccattgcttacgttcttccccgagacgtgttctgcagattccggctaagaagtcgcctcgtggaggactcaattcagtcatgaataaaatatactattttggacatatctgtatagcactcacccatgctttgtatgacagtgcgtggttgtgtactaaaaacgaagcaaaaattgagaataagcagccagtgggatgaaggattgatggattgatgagaaagatgaggaaaaggcacggagggaaggaaaaaagtggaaagctgattaggagatttcttgactttttctaatcgagccgcagaaaatgttctattaggtttttttgcttgctcgatcattctaaatctttaccaccacccaacacatagcccttctttttccttttcgctcacattcacttttatctcatctctatttgcccataatgtctcgagtttcatctcccgagttgaaaaaggtaaggtttatcgtgctttactatatcttcaatggattcgaaggttgtcgagaaagatgctatcaaattcatcttactgactggccttttcaacctttcaatcgtggcttcactcgcttcttgtgcttgcttgttcatctctatctttgtataaacactagttcatggataagcgaattttcattctgatccagggtggacgaaaggtgactggtgtccttcgaggatttgatatcttccttaacctcgttgtcgacgacgcgttcgaggagaccgttccggccgagaagcattcgattggcatggttgtgagtgtcatgcatctttcttcttgttagctttcttatatcggtctcgttggcttggatcttcaaggagcaatcacatctgctttctgtatggattgacatgccatgactgtagaagggcgggatgtcgagaaagacggcggcgttgtgtgacaacatcagatcttcatctgcctcacttttcaacccactcctagagtggttgatttgaagcatctgttttgaggcctagattctaaaaattcccatctgaattttctcagtaagcaaacagtccactgctaacatcacgtatcacatgttaatcgttttctcaggttatccgaggaaactcagtaacatcagtatcaacattatcggcttgatagaaaattcgattagaaaagcggaggataggagagtggaggttagcatcttcctcttattgacgagatcttgttagtcttggtgacgtgttgatacgtctgaatgacaactgatcagactcctctcgtatgcattgggactactattggaacgtatcgtgcatctacagaacaacttcaagctctcttccatcgcaccaaacctaaccattctcaactcctctatcctttttaaaaatcaacaagtcggcttagatgaaattggaccggtttcgaagtggtcgaggagggagtaggaaaggggccttttctgtgtttttgcacatttttctttagcttttcaacctcttcttccttactcaactgtctttgtccacttggattgtaatgtatatctctgagtcttggccagatctgaatagatgcacgctcgtgagtgacgtgtgagaatgagaaataagcaaaccctaatggccttgacaggtgcttgccttctaaggaaagcatgtgaaatcatgttatctcttcataaatgcaaacctgaaaacaataccaccatttttgatcagtcttagacacatatagagatatcatcgatacgaagcgcgcaagacacccccggaatactgcggagaagttaacaaagaggatgaaaagaagaacttacggatttcgaggagcctccttcgtgcccattaggacgttcttactctttttgttcgagcttccgcccgatgaagtcacggttggcgaaactgaagctgaactagaagttgttgaatggtttcttgaagtaggaggtcttagaaagtcgtaatcctcctcgtcttccttgttcgtcggtatatctcttctggatctcttgttcgcgctcttagaaccaacagatttctcgccggtagaagatactgattcgcttgaaccaaggataggactagagcgccgagaagatagttgttgaatcgtgtctttagagagacaaacatcgatgtgtgcattcaggtcttggttcgtcgtcgagctcgggaaggttcgctgtcaagaaggagcagattgaggttatcaagcggcgtaagtgaaagtcagatacatttgtttctgatcaagtcccactaaccgagcatatagggcatgatatcatcggatgatgtgttgtctctgtttcttgtttggatgcgaagggaacagccgtagaagaagctgcgttggtaatggcatcgttgaacggggaaccatttatggcccgctcgacttgttctgtttcagccgcttcactgtcttcgaggtcctcatccgaatcgagaatgatagcattattgaaatccgctccttcggcctcttcatcgtcctcatgaagctttctagagtgagacggatttgtgaaatactataagagagacggaggggaagaagatgcacctttcatcggtaattcgggacaatgactgtcaaccgcgaggtgaagagattaacagacctgttccaatccccctttctttctcaaatctcttagttggttgactctaagacctaaaagtcttagttttagaggcagagattcttctaaagctttgagagcccaagtctgaatggaatctctcgttttctgtgtttgttgaacaaatgttagtaatggcttcatctgtagatcactatcgtcatctatttgcgcaagcttgaacatacatattcgccatgttgcaatgtatgcgactttgtatggagcttgaagtcgtgggtcttgtatttcaagcttactagaaagctctcaaataaatgtctttcaacggtgtgatagtacttaggcattctaacacgaaaggaacgcagaacgtacgagtcttcccggtgtattctagtttctgaagagtctcagtcaattcctcggccacgtcttcgacaatggcgatcaactcttctcttttcgacttttctctgaatgtcctgtttattcgttccaaaattatatcaatcgatcggcaaggaagccacctacatctcagcatatatacgtagatatgattgaaagcaagagtgtagactcaaacgaacctctcgcagccaacagacttcctgtcctctctccgtccagcttcgaccacattagaggttgctcctaagccagctttgagcaattcgatgactccataatttaggagatgaagctcagcacgcttagtaataatatctccacatgtgatgaccccgagtgcttccaaacatctctcagaaactcgtccaattccagggattctatgtattttcgaactgttatatcagccaagaaggtcatcttggagtgttataagaaaccaacttactttcggataggaagcgtccgggtgaagtctaatacggcttgacgggtgaaagggagaatatattggttattaggcttgttgatatcagaacatatctttgccaacatcttgttgataacggtccatggttaatgtgtcttgaagtcagttataagtcggcgggaagagatgactgttttcttaccttgtttggcgcaatactgtatgaaagacgtcagagtttgaaagacatacgaagaaatcagatactcatagaaacctctcatcatgatcagatcaagaaaaaaagaaaagaacattatacttacccagcagagacagtcaaccctgtgactttcttacaagtctctcttatcgttctaacaatgcgctctctcctcttgtgcatagcattttcactctcctgaccggttccatccttctcgcgttcctcttggatgtatatcgttagattcaagaacgcttcgtccattcctactttggccatattcgggtcgaagcgccggaagacctgtttggttattcatcaagttgacagagggaatgaaatgacagtcttaatcatgacatgaaccgggtcaggaacaacaacatcactaacctccatcactttcccagagtattctccatatgagttgaatgtagccggcaccattctcagatgtggacacagcttcttcgctattttcataggtttgagcaaacacaccagtcgttaccgccattctgtattggagcaagaagtaaaggagagcaacgacgataaaatggggctttacctacaaaaacgggcattccactccggactccgtatgcccttgcctcgtagctagctgtcgtcaagacacctgcagaactcaagcgagaagaaatcaaaaccttagaccctctgctcagatctcatgaagagaacattgttgagcgtgtgtgacgaacccgttccgacaccaaaggcaataccttctagcgttggatccgccaacagttctacattggcataaaacgctaagagtgcatcaagaggatcagcttcttggcttggtcacgtaattcgtaggatattaagcgctaaccatccatatcgacgtgcacgatcgtttgtgacaagtctctctgagattcaattctctgaatctgctttgatcatccagttgtttccgcaaggtagaaccgtacttgtaagtaacgtacacgcgtatgaacagaatgataaagctaagaaaaacgaacgaaagtgtcacattccctctctagtcgtcgaaggtccactccttctttcagcaatctatctctcttatcgagcagcttcataatctgtatccctagcttctcgtccttttctctctcgttctcatagaatttggaaccctgatcagatttcaacgcgttcaaacaagcagtaagtggaactggctccaaagaaagcctaccagaattttctgttctcgagtggcataggcaagatagaaacgaactttggaagcctctgctataatcttatttatctcggactggtctttcttgaggccggctttgttgacagactggcctagaaatatcgatgagatagatggtccattaaattagatcgacgcgtcgtgaacaaggaaatcccgatgtacgcttacctgccattcgacggagcatagaatctgagatttctgttgatgatgacgacgagcctgcactagccatcgcagactgctccttgcttgacatggtgccctagaatgtatccagatatccgaaccaggggagaatgagaaggggagggaacagaaggttgacgcgacgttaaatgaaatggtgtaggcagtccgatgtgattcatcatgcgtcataaccctagctgataagatcagtttccatttgacagactaaacgccgctttggcctttacatacttgacacacatgtaaattttcagaatcaactctgcacatattcaacgcgatgaacgtctggtgtggcttctaatctttgtatccgttgtgtcttgtctgtttcttggggcatcatgcggaacaacagacatatgtatacaacacatacacacacacatacacacacacagaggcagacacgtagacaaacacagacagacctgcaaaaccagccagcaagaaaagacacaacgcacagtcagctcagtccttgctcacaccatcagattcaccaacgataaagaaagagtatgctccatacggaagcatatcaggtagaagggtctcagacatccaagga

SEQ ID NO: 1834 - DNA, 363 bp, Xanthophyllomyces dendrorhous
gggtctcagacatccaaggaagaaaaataccctcattcgttcccacccgtcggcacacaccccacaagggggcagaccgaccctcctgaagagcccccatcgacccgtccgcgccatcaagaccgatcaagcccggtaaggggcgaaaggccgaggcggcccgctcaagcggcaaaggggttcgaaaccaatcgccgcgaacaggttacaacgaggagagagctcgggtgccagaggcgagcacggggtggtccttcacaacggaaggaactctagcttgcgggcaggaggaccgtagggaggaaactgcgaagttggaaaactttggttgcatctttgaacagagggggaggggaggagagc

SEQ ID NO: 1835 - DNA, 304 bp, Xanthophyllomyces dendrorhous; identical to SEQ ID NO: 477

SEQ ID NO: 1836 - DNA, 41895 bp, Xanthophyllomyces dendrorhous
ataaaaaatggtcagccaagcaaatttacagcaacaagacgggagtttcaagggttagaagatctaatcgcagaaccaaaaagaaaacatcatatcattagttgatgttctaaatcggccggttgttcaagttgggaaaagcatggtggtagatcagagaaccggatctcgtccaggacacccccgtctgtgtttgcaaacagagggcgacacttcagacggcacttcctattgcatttgatggtgtttgtcttcttgctcaaaggaatagaaaaggaagagggatccaacgaacaagaagggtaaactcaccagtggttctgttggagggaagaagagaggaaaaggactccttgacggctgaccctttttgtacatttttcttcgccgcattttttcgaggggtcttatgcattaggagaggtaataatgtggcgttcaagagcacgtggaaagccttggttaggtattcaaagaatcaagtatatagcggtgcaacaatttcatccaactattgcttttttgttcctttcgctcggtagaaacgaaactgaaagcactagacgatcaactatacagtcgatgccctctccgtctcagaagagacgcaagctcgctcaatccacatcctcaaaatctgttgaatttgatcctatcgaaacggtctcatttgcatctccttccatgtcttccggacgacccatgagcgcaatcgctgctcgtaaagcagcggcagcagcagcagcagcagctcttactacttctgtttctgcttctagttctccttccgaaactatttcatcttccggagatagctcggccagccagaatggatccaaagctcaaatctcctccgtcaagtctacgaaaaagaggaaacctactctgggctcctcttctgcctctgcctcgacctcaacccctgagcctattaccaagacggcttcttccgacaaaccgctaagcgcggtggcagcaagaaaagccgctgctgcagaagtggcttcagcagaagcgtccatttttactatcgcgagtctgggctctcaatccttcaaaacctcgtacaagccacccaccgcttcttccaagaagcgaaagcttgacaaacccaagcaagcgcctataatcgactcaagtccctacctctccacctcctctaccgcagagcaggttgtccaaattcccattgccgcgcctccctctcgaccccttagcgcgattgcagctcgcaaagctcgtgaagcagctcttcttgcaacatccactactcttcccactacgagtcctcccactccatccaacaatactcccactcatgctctcgagcaacccaatgatgacgaagaagacgaagagcttgaaaaccaccttgcgttcgaaaagtcgcctccattatcgaggtcgtttcgaggattcgacctacctggagacatcgaccgacaggaggtctatgcagagtcattggacgaacagagcgagagcgaggaagacgaagagatcaccttaaagatggatggtgaaatcgttggacttgggttctctcataaatcgcatagaaaaggatggagtggactagagaaggaatcaaacattgagaggaccacgaaggataaagaagaggaggggaaagaggaagacatggtggcgggcgatgaaggcttcagaattgaagctgatgggttgatggacgatagtttgatcatgggaatgaattcgccagtggaaaccgagaaggaagagattatcaacaaaccatttcagaggtacaagaagccgtgtgtattgcaatttctttggtcaagtaatagtggataacaagctgatgctgatatactcattggcaatgatgtaacgctcgcgtgttcgttgagtccatccagtcagccgtccgcatacaaaggtgccatgtctacttttttccctgcgcttggacaaaacgttattcttctgtccgagaatcgtttaagaactgtatttgatgatgtggataacggagagaatgctgttgtagtactcttgagcgaaaacgaggtacgttcactccatcttagagataacgtaactcgagactagtgttcttactgattctaaccggtcgacttgagaacataataggatctgatcttctctggaacatgcattctctatcctctccacgcttccctctctctgttcggtacaacgctctttcccgactcaaactccttccctgtctatgcgcctacgagtcatcctcttcctgttctcaccccttcccatgcctcgccatcaggctcggccgagtccctgattaaaaagcttggtttggacattgaccaattgaagggcttcaaggctgccttcctcatcagggagggcaagagtggattggacacgatgggaaggatcgttcctaatttcgagagcatctggatgggcgatatggctggttggggtgttcggggattctaccctgttcgtatactactttcctccatcccaaacttagaagaatgtgattttgttctgtactcatacctgctcttatgtatttctgtagattcttcatcagtcttcattcaccgcacattcggttcctcttacatggcacaccgctttggagcagagcattcctcgaatttcctctactcaaaagtctattcaaccgcttccttgttcagatgatggccagtctcaagacggcgacgacgacgacgacgatggacaaacttcccagcctttcactgcacttgtcaaaggtcccaaacgagctggaaagtctggattctcgaggttgctcgcgaacaggttgctgggcacctatagacgggtcgcatttctggaaacagatcttgggcagagtgagtttggaccggaggggtcgatcagtctagtagtagttgagaagcctttactaggtaggttatttcacatccagtatagatctcacgatacctcaaaacacctagtcatatatgctgatccttcgatgtgttttctttcaaatgcagggccaccgtttactcatcctgctatcccttttcgggcacattacctgggttcctcctcaccaagacataatcccacccgatacctgaccctgatcgccgacctgcttgaatcctatcgactttcaatccagtaccctcctttccaaggctcatcctctatcgaccgccgcaatgattcggtgattcctataatcgtcaacacccagggatgggtcaaaggactcgggatggaccttctcgtccgattggaacgaatggtctccccgaatgtgatctacgagtttgatcctgcggatgaagaagagcaaggctgggaagccgccattcctaccgaaggtggttggggccgattccgtcctcaacaagacttcggtgagatcgaaccagatgaagacaatgaccagaggaatcgatctgggccggacgggtatggccatctgacccgatcgaatcaggccaagagatatgctctcaatccgattggagtatccccgatagcagccagatacggagcagttgatcttcgaatcttgggactcatttcctactttcattctcgattcttcaaaacgatcgacccagcctcgttatcaggggaaacctctggtcgcctagcatcctccaccatggtcaccaagtgggactttagtacgccgctcgtcatgcaacgaccttggacggttgattggactaaggcgattgagagaatatatatggtaggatctggagcagaagaagtagcttctgaagagatttggagagctttgggcggttgtgttgtcgctctcgtccgaacggatccttcctcttcttcctcaaggtctgtggttctacaatcaacatcgacgggtttcccttacgagtctggtcaacctcttccgttaccatccgcaactcaatatctaggactcgccattattcgttctgttccatcccctgacgcacacctctcatctcaagcgagcaagacaatccaccttttgactcccctccctccggatattctgcctactgcgagaattatcatgcgaggggatacagagcttccagtgtcagccatgttgaattggaaggatcaaactgcgatggaaggagccgatggcgttgctgggttgagagatttgcctttcctggatcaccgaatgaggccgggggcagatatcatcggtggagacagacggaagatcaggaggaatgttcagaggcgaacgtgatgtgttgataatcaaacttgttgattcttgaacagaaacatagatgccttccaaaatcaaatctctaacttgaacaatcgtagattaagaaataatgacatatataatatgcaatactattgataagggcagtatgtaaacagcaagtaattgtacacgcagtgcactctacggacgtgtacgaggcatacatgcagagactacgagaaatgatggatgaaagaaacagcaagcatctaaaaatcatgggctaacccgtcccaatcacctgggaccttcgctgccggacaaggaatgggtttgcttttgactagaggtggctgagacacacttcgtttctgaagaggcaagcttagtgatggatctaaattgattggtgttgtattagccgtcttggagtgaacgattgtagtttttaatgccttatgattggtcgtgccatgcagaggttgattagtagaaggaagcagtgtttcgggggaagaaagttctggaatgatacagggaacaggctgaaggcgttgttgaggttgagcgatggcaattgtgcccaacaatgaagtgtgtctttttaagaaggaagttgacggcggagcaaatggtcttgagacgggagataacggctgctgggctagcttttgttgaagtgcttgagtaagtgctccggctacatctgacggatggtccgatactgccccatccgaccaaacgtctgactttgcctgtcggacagcctgcgtgacatcgactttcaaagaatacgaattccggcgtttcgcagcggaaggatcgtctgattcgcaggtcgaggtacattgacggaaagcagagctgacggccgatagggatgtttgtctttcggacagacgtcctggacgattatgagagatggcctgtatatccatccaattttcagtgtctgtgagaaagatcggaggagtcagatgcccatctggtgcacgtcgaggaacagaatacgaagttgatcgaattccgtaaatattgacttgtttgggtgcgactggattggtaaattcgtaaggatttcgaaggatcggtgacggaggtaaaggcaaagcggctggacgggtaatagccagctcagaggtctgagcacgttgaggtgctttcgacgtctgagatcgacttccttcgcgtcgttctcctccggactttcggcactctcttccactaggaggtggtgatctatgccgagaacatcttccagcggtacccgaaccgccctcagttccactccgactagaagtagcgacctcccttccctttctctcagccatcctctctttttctttacccttctcgctctttagatgagatggcagaaaatcatctcgatcgactcgagttcgaggactcgatgcaaccgatgtgttccgcttcttcagccctggactgtagcctcctttgaacccaccccgacgagggctataggcggatcgtctgtttcggccagtagtaataaacgagagaacaggcgtttggaactgttgacaggtagagtcacctcgatgggatgatgggatggaagactctgcgcgtgaaacagaaaaagcaagctcagaggcgttgtttggatgcagagtcagaagcgacgatcgcctctttttcagggtggtttctacccagccctgttgtagtttaggcgttccagattgctgatctctgctttgatcgatttgacgataagagtcggggggaaagccccctgtcggtcgagaagatcgtaacgtcccgacttgttcgtcctcgagtaattcatcgtcttcggagtcactttgaccaaaaagactttctcgcttgaagcgatacttccttccgatgggcgcgctgatgccttcatcgtcctgcagaccctctccttcgtcatcctcctcgtacccatcgccctcaacatcaaagccatcgacttgttctacttcatcctcctcctctttcccatcctcatcctcatcctcctcatcatcctcaatatcctcctcatcatcatcatcgtcgtcgtcgtcgtcctcatcgtcctcttcatcctcgtcttcatcttcgtcctcatctccttcctcatcagggtcatcatcttcatcacccgagtcttgtagtgacttcatcaactccttcgactccttcgctaacatagcgggccgagctgaagtggtcgcgacagcaaacgttaattgaggcttcttgacagggacacacgtgacctcaggtggcacaggagcaggggaggagcgggatgacgtttcggaatgggctgtggagtgctgggcactcggcatggaaagaggagtcgtctgaagaaatgtattagggggtatgactttgtgagtctctattgatcatgatgaggaaaaacaaaatgagtgagatcttaccgagccagaatcagcaaacttcagcgtgggcttcttggaaacggttgcatccgtagactgtgtcttggccaatgacgccaagatagtcaccggtggggcaaaatcactgagaggtagaggtggacgctatatatcaaagcagaatcaatggtgagctcgatccgttgtcgatatacaattcaagtaccaaccttgggtaatacagcggcctccccgaatctgatgtgtactggtgcaggagaagggtaatcgctcgggactaagcccagactagactcttctttctctggacctcctcttacatcggacggatggaggtccagtatgttagacgggcagtctactgcttcgccgtcctcttctcctacttgatctaagatgtcacatgctccgttactcattctcctgcctttgagttgtcggatattaccatatccagcaggcgaggaggtgttggatgaaagaggtgttgattgtaaagaatgatgcgcagtcgttgggttggaattattcggtgtacgataggagagcggctttgactgatgagagtgagagagtaggatttgagagagaagcgacatttgtgacggagccggaccaaagatggcgctctggttgagattctgttggatagcaatcggagaaaccgattctggcgagtacaaaccgtcggaagaggagagtccgtccgagagacaagttggagaagagacgtctactccgtaggatgatgatgatgacaaagaaggcgttctggtgagcttgtatgggtcgcaggcaatattcggatcaccacatgataccggttggtaggacactggtgggcatccactctgtcttagggggactgggcgttttacaaagagacccaaaggatctgaagacgagtttgtggatgaactgtgatttccggataaactctcgttgtagtttccctgagtcaaaggtgggggaagaaagccaggggttggagttgtcgttgtcgtttcgggtgattctatcggctgggctattaggttattttcaacattggtgatcgtccttctcatcagcaacggagaccctaatgtttcgtctccgtccatatgagattcttttgtaggtctatccatcatcgtttgttattccgtggaggaaggtagagtagatagacagttgctattcaaagggtgccggaccttagaccgcaggagaagattggctcgaaactacacgctcatggcgaaggaaacctgtcgacaaagatttctgaagcctcacagaagaagaacagtgaggtgtcggacgtccctccagaaagtagtcagggtatcgagacgtattccaacaggaggagaagctgattaatggaaagggaatggatttcttctgttgggcgaaagacaaatgggaacctatataaaactaagggcggaaaaactaacagatttggtaacacgtaacctgcgtgcctctgtcatttcatccttcgttcagcttaccgaaagctcatctagctcttatctacctggatcaagatttgtcaaatcttctagtggcgtattatctaactctagagaggggaagagagagagaggaaaagattggattaagatatgcgtgccttcctcactgaccatctcaaaggtgagcagattcgaatgggtgagcaaacgagtttgaaatgctcgtttaccaggctggcacaataaccacaggaacgagctctttggtgatgtcaaattgctaacgaccatctagatacatctgaagagaattaaaaagagaacgagactaatcatttgcttctatgaagaatcaacatcactaatactagtacccgttcagttgctgattactgaaccaattggagaaagagactaatgccatctgtctggtcagcgctttgaccgcccagtgcctaagatcgagctagctgacactaatacctgtcaagaaaggtagagaaacctgtcaactctttttccttttctttgtcgatttcttttcattcccttctcgcttctttcacttctttccaccatctatctcgtctttgttcttcgctcctaatacacttatctcgttcttggctcaatatgaatacccaggcagtcaaggtaggctccccacgatcttacttggcacgcgcacatttcagcttcttcctcgagaagaggaagatcaactgtcaaaagattctgatgcgttcgaggttatttgaatgtgtcaataccaaagacaactcagtcccaggtgacaggtactcaaagcacctccatcgtgcgaacgctaatgatggccagcttgggttgtatcacgtatctcaggtaatttcatgctaagcctgtcaagttgactatatgctgatgggttcataacaaaaaacttagagggctactgcccgaagagaacttcaacgatgaaggcgttcaccctctagctcgttcgggcacgtcttcctctggcagtagtggcggatctcagcttggaggactccgcatcaagaccatcaagaagaatttctcgtgagtgataatcactcaacctgccacagactcgatttgctaaactcttatcttgataactccgacaggcctgaaggagataaactcattcaatggatcgtaagctcctatgttcctgtgtttttgtgaaccaacgcagtctaattttgttcctcgacaccgatcaaaggagcaaggcgtgatggatgctgtcgaaaagggggtgagttgaaagagcgccgattgaagatatcttctctaggagaagatagctttgtctaggtcttaattgctaaacatgcaggaaggacaagccataacgctgactatttcttgataatttaacagtatctaaaggctatggttatgagcatctacatggtacatagatctggttcctagctatcatgcctcctgttgagaagtttattgacttcaaattgcgacctggcattcacatctgtaaaggaccccaaagaccccttaaagtatgttctccttgtttgtttgtatcacttgaattgagaactgacatattcatgtaaccttttgggtatcaagtgtcatcgaggtcagatccgcatctgtgctgtcggaaatactcaagtactaatcaaatctaatcgtaacagacttataccttcaacttcacttaccacaaagttacgggtgttggcaccgttcctatactttctgtcgaacagaagatgaagtccatgacagtatctacagagccagtaagctcccgtcggctcgcagggattcatgtctatctctttctgacacgttagagttcattccttacgcgcgttccaggatccagatcccatcttcagcgaggtacaagccggaaaaccattgaccttagggcatgtcaaaaaagctactaaggttcatctgtttgactaattcgactcctgagacatagctgatataccgatctgccttctcatgaaaaataatcatggctcgtaaaccaccagagtcttctaaaggtaagcctactcattttcgggctccttcttgttggctcatgccaaatgtttgcgtctatattgacatacaataactcttagcaactcatcttgatgacccagaatctggctgaactacctagtaagctctgaaacctcttcctcttataaatgatgtagtctgggcgtcttacctttttgaaaataggaaaacgatgtgtgtctgtcacattgttctatgaagatcatacgcctgaggagtacgtcctgatttgacccttgaaaagctggtgaccgtaatagaaacctgacgaatcttcatcctatgacagttaccagccccctatgttccgcgctgataacgagcgagataagtacgtggttctgcagctcgatgcagaaatcattcagtgacatcctttaagtccttcgtttaatccagaatgtactttgctactcatgcccaagacgaggctcccgaagtcttgacgtgagtattgtaatttatttgaagtcaccctcttcaaacgagatagttcgaacacaaactcagaattctgtgcacttcgtaatcaacagtatcgatgctctggaaactgggcatcatgggtaataccttcattcaattctgttatatcgataactatcccttacttttgttttcctttcctgtctcagcgtatcgatcaagatccgatccgtcgccgagtatctcccagcatcccttctggccaatgactctgataattatttcacaaacaccaatgccaatcgtatcgatcctgacagaggaagagagcttgacgaacagatgcttgagaaggataaggagctccggtcatatctatggaacgctcaagaggaaaataacatggatggtaggacgagcgcgcgattacctatgttccaaccatttccaagaactgaccaataattattgggctatttatctagatgatcaacaacacctcaggaaaagtgttgaaccactagaagatcgtactgtttacgaggacgaaagctcaggctttgactatacaggagccgatgaaatggaagaagaggtcttggacgtagtcggaaagaataagaagggcggtctccgaatgaataatcgaagaacttccatacgcttgaacaggctggtatgtgggtttctacgcattgtggctaaatccaaaagtcgatggaattgcgctcatgatcactttttttaacttaattaggctcatccagagcttgacaaaacacaatctcaagccgctgttcctgaaactcagcctattgacactacccaagcaatacatcaatcataccccgtgcctaatgaagaatcagttgatgcctatgttttctcgccaagtaagagagtgcctttagcaccatctatgagcataggtatgttcagcttcgaaccaatcatatcttgcataccgataacgactgatcggcttataacgtgatgttaaatgtaaagatgaagatcctattcagtctttctcaagcttgccacatactagtaaatttctaaattccaagaaggctgagcaagcacaaactctcaccaagaaaatgtctagcctgattgatgcaaacacaggcgaagaatggcttccttgctggtgagccgagatatgcttagattctgtgtcatatcatatactagtgctgatcttcagtgcgattctttgcaaaaacaaacgaacaaaaaggtgtcttgatcaccaggaagacggagcggacttgggtgggctggtaggctgtgacaaggcagggtgcaaagtgtacatgcatggtaagacattctttcaaaatcccagtcgtagttgggtgggtaatagttcgttctgactttgtgaattctttcgatcaatcaagtctggtgtactggtcgagagaaaaagaaagactttacgaggagagagccatttttctgtctgaattgtagagtaagtgcaaggagatcaagcacttttatttagaatgcctagtacgctaatccaacatgtactctgcttgactaccgtgggtagcttcatcaagatgagagatgcgctggatggtctgaggaggactatgagacggctcgtcagcagtttgtgagtaatgctttttgctcaacctcaaccgatggctgacacattcccctcatcatgggccatatcatagcgatctttggcgttgttccggcgcgccttgatggtaacatatgacaatggattttcattcgacatcaaggaagttgccatgaagctgagtgagtcattgcttttatctatttatccacatctatgtacgtctgattcaagtcaatcaatgtcatgcttgattttgagataggttgcgaattggctgaagctcgtgcagtatctcaggtgagcttcttgatattattcctgagatggtgacggaagttgactagtggctctaccgcggaggaattccttgctgatcttactatagcgtctcgagttggaaggtatgagtcaaacttgacgaatcacgaatacagtgctcaatttcacactaaagttttctctattttctaggttttatcatagttacttcgagaaagaagaagaacagaaagatgactgtctccagatcggccgagtctcttgcaaaattgaagacgtattttgataaacgagataccgcgctcgaagaccaagtcgtaggaatggtagacaaaacgtctgaagaggaagatgaggaggtaagtcatcatcactaagtccatcctgtgtctttggacttgaatgatactatatactgactcaagacttgaatcttctatgtatataggtcggaaatcgtgctacagagcgagatataagcccctctttaacagagattcgtaagtcgcgattagtatcgaccgatagtatataagatactgactaacacgctcttctatgtcggactatggaatcaaaagaagaatcaacaccatcaaaatttagcgagcagaaagagatcgagcattcgaccgtgatggaggttttagaagaagggctagccaagacccagagtcgatctcagtttcaggattacgttccaagttctttgccaagatctcccaaaagaaaatcagacaccgtacaagagcaggaacctctgaggaagagatatcgagtgtcaactgctatgtcagagatcaatttggatatttaattggccccttcatcatcttccctttcctttctctttcatttcctctactttgcggcggacgtctccacatgatccatcgatcaccccttcgtagactaggagtctttctggcttcattttcccttttcgaaacttatcagttctcttcgcgatctcaagtcttgtcctgaatcgtattctctatggatactgcatcatgggattagtggcaaagtggcattgaatcaaacaccccctttactgccaattgctttctgattaggcattttcctactctgcttagcgaaatcttctaaatcttgagccgagaagtagtggcttgcagctgaagacccaagtccacgcaagggagagaataaatggaataaaagaatcagcacatacccaaggtgtcttatgcgaattaacaaaagaggaaagaacgaaccttccaacaaccattctttcttgatctccatcacgcttcttgcaaattccttggaagtcaataccaactataagatttcacgaagatcgtcaaatcagttcaagacccactaatgagaatgcgtgtgatgatagaacgagacaaaagcaagatcaaagaacaaacctcgtagtacaagataaaacgaggtggaggttgagcttggaacattgacgatgatggatgaatatggattgatgcatctatataggtgacagagcgaaggaaagcatcagaacacatattggttttgagtttagaatcagagagagggaaggtcatactgtttttagtcgttcgatatcctccatccttgttcaaccgagcctgtatgaataaataacaaggtacatcaacactatcaattggcgcatcctcatcagaagaaaaaaaaggcgtaaaaaacgaacggtgttctggaaataacctgccacgatcgatcgttggataggtacaatgtcgctcgagtttggattggattcaacgacgacttccactcgttcgcacagggctgctagttgatcacgaacgtctcgaactctcgtgagacatttgtactgcagaaaattctgtgttccaacgatgttcaagatcaaaataagtttgttggtttcgatgaacgaataatatcatgtcgaaacatccatagaaggaccgagagatacgaacctcataacaccattgttgagagtaatctgtatcacgccatgtctcccagatgttgagtaatgtgaaatgatcccctcctggcttgacaaagtttttatgcgcggcttcggcatggaccttcttatccttcggtcggtaatacaatgagctcgattcttggagcatggcgatgatagaaagaacctgatatgaagaacaatataaattagagtcgatcgtcgacaggaatataacgagacaaaagttgagagagatctcacttcatcagtacagtggaaattttcactattaatgactgctttagccaactgaggatccactggaaactctgccatccgtcttcccatcctcgtaagttctccatgatggttcatcgcccccaacgcatacagcatttccacactcttcatcaacgtttccgccgccggaggatctaagaagtcaaatcctaagaggtcgtttataccgagtgatttaagaagaagaacaacagcggataagttggttcgttggatttcgggtacggtgttttcttctagctcgttgttgaacgcccacttggtgaataaccggaagcactgtccagcacccacacgtcctgcacgacctgcccgctgattcgctgctgctcttgagcactattggtgcgagtcaaatgatgaagagtcaatcatggatagtccgaacgctgataagtacaaaaagaaagacgcacaggtactaccacgagagattccattccggtcttgggattatacgagttttgcttcacaaatccagggtcaatcacatacacgactccctcgattgtaatcgaggtttctgcgatatttgtcgccaacacaacctggtataagaagaattgatttgagcagcttgatacctgacagaaagtagcatagacagctcaagaaagaatagttggcacccaccttcctggatccttctggggtaggctcaaagatctttgattgcatctcactcggcaagttcgcataaatgggcgcaataatcaactctggcaccttgtcccccaaagctctggatgtctctgcaatgttctcagcagcagcatcaatttcgtcttgaccctgagtggcaagcataaacatcgtttttcgattcatgtcagcaaaacagaagggttacggtagcaaagaaaagaaaagaaaagaaagacaggccgacatacagtgaaaaaaacaagaatgtctcctttgggagcggttacatgaatttggaagatggtggtgatggccgcatgaaggtaatttgcttctggctgagccgtgtatcgaatttccactgggaatcgtcgtccaggaactgtccatcaaaaacataagaaatgcgagtaagcattttaacttgtgtatcatccagaggaataaggaagatatacccttgaaaagaggagcatcatcaaagtattcggcaaatttcttagcatcaagtgtggcactggagattagaagttttagctctggtcggaaccgtgcaatatcctatgagagaagaaacggaaagagcaatgcaagtagaatggtggatttattaattcacgagcgagtcataagaacaatgaaaatctaacacataagagaattcttttaactaaccttcacgagaccgaatagaatatctgtactcaaagtcctttcgtgagcctcatcgatgatgattgccgaatattcacttaatgctggatcagttaagaagattcggagtaacattccgtccgtcatataatgtagcaccgtcttatcacttgtgcaatcttcgaaccggatcgagtatccaacttcgttacctagtctgacaccagcttcctcagccactcgagcagcgacagacatggcagctactcgtcgaggttgcgtacaagcaactttcatcccgttcttggtgtagccggcctcatggagatattgaggaagctgagtcgtcttgccagaaccagtctcagcggtgacgatgagaatctggtgctcagcgatagcgtttagtagttcctcccgataagcgtagatcggaagagattttcgaactgcatcgatctgatcggctgttgtgttgagcagtgaatcaagaagaaggtatagagaatcaagatcagatgagatagatcaatattatgaacgaaactcaaaggatcacggaccttttgtttgagcctgagcaatagcctctttgagctgcttctcttttgcagtcatcgctccatctccctgcatgacaccatcactaatccattcaatttgttgagcctcatcaatcacaaagtcatactcctcccccatcacgatctccttcttgtcaagcgcgcccgtcttgaaactactagctccagcttgactacgttcccattgatcaacatccgtcacgaaggcttgaggatcctttttgttttcttcatatcgtttgtagagcacgttccttttcttttctgagtcaagttttccttgttcggttatgtagtcatccgggagttgatatccgtcgacaccatcgtcaatcttgagacgttcctccataattcgaagaagctctttctttcgttcaagttcgcgctcctctcgcttcgagaccttcattcctcggaataagttttcctcgtcgataatctcgagcttgagaaggtccatctgttgagcctctctttttgcaaggtactcctgccgagaacgctggcgcagatcaggcatagctcgttccctagcggccgcatcctcggcaagggctcgccgtttagatgcttcagattcctgggcgacggacgatcgatcagtgacaagtttcttggttttgtccttgtctcggtctctgattcgagcggcgaacgcatctcgctcggctatatcttccagacgctctcgttccaggcgttcttcctctgtctcgtccggtggtggtggtggcttgtctgaatcatctcggtctccaccggtttcagtgctttgagcctgactatcaagcaattcctgttgtcggaagtactcttcctcctcttcctccctaattcgttttcgaatctgtttttcctcttcgtcactctcccaagcaccctcatcatcccgtttccgaatagaccctcgatcagctcgcttctctttcttctctcgctttctctcctccttgtctttatccctttctttctcctttgacttccccttcttgtccctcctagaagaagccgatccggtcgttcccccggaaaccacttccgcctccaggagaagaccgtaccgcttgtccttggaagcagtcgtggtcggtgttcctgtagatgaggttgtagctgcgtgagaagacgactttgacttgtgcgaacgaggaatctttgcaaaaagcgaggtagcgaaggattgggtgtctgttgagtcgggtaggccggcggagacgagaccgttatagagcttgtcggtcgacttggaagaaacagctatgagcatatggagtacacaagagattccgagagcattatgtcagttcatctatgcttccctgtcgtcttcgtaagggaaaagctgaaaggtcaggtggaacaagttgctagcgacgcgtatgatacaagaaataaacctcagcaacggtctcatcaaccgctcttcacctagtcaccaacagatataccagtatgtgtctatgtctggatcgagagaaaccacagagaagaagaagaggcaaaaagacacaggacgatgagaggacacgaagaaactggactgaccgatggcagcgatgtattcaaccatggtcttgtccgacatgcccatcagcctaaggaaggtgtccccgatgaactgcttagtggacgtatccatggtgtggttcaaccctttatttcagagattgttctttcgtgtatgttcggacccttgagcgtccgacgaagtaaagacgtggtgaagagaagatgtatggatgtatgaatgagtgggtgatggatggaaggaagaatgaaagaccaaactacaaaacctttcaaatagaatactacaaaactgttgtgatcatcttcaaatacaaatcggtcgtaattagaactataaaacttcttcaatggaacgtattctgatctgacatctactcttccttctctccatcatcccgagcagtgacaatgtcagacctcgagagagtccgtcaagatagactgggtttaccttccagcgaacacatcaactcggtcaatgtgtacgagctcatccattccattcggtcccagatcagagttagccttctctttcgctctcctggtttggattcctctcggacttgcccggtcattgggtcctctatagaatcgagtactcatctgttttgctatggtcttccttcatcacgactctagacaaacatagattcagctctcagctgggagaagctgaacgcgccagatatcaacttctccattcttcgaccgcttcttaaaacgtatatcaatgataagaacccagctatcatctatgcaatcctgctcaaccggcttcagtttctcagactcgcccaggaagatctcgctttcaaaggcctactggaaagtcgggcgatgttttgcgagattctcgccatgaaacttgtgagcctgaattccttttgaacgggttcttcttacttgtctgataacagattccgtgacttgtttgatgatgccgacgtcagacccgggcatttgcggcttcagatcttgaactcattgactgtctaaccagaccatggaacccattccaaggcgtaaggggtttttaatctctttgtcttgtcatcataacagaattaagtcaatgttttactgaacagcgactcttatgatcaacttgaaggcttccgaaagcgtacttggaagggtcgatcttgaggacattaaagagggcatgcagaacaccctggaggtcgccatcatctcttcctccaaatgtgaatcattcatgcatatcgataggctgtcttatcatactgactttcgtattacatgcgatgtcttctgtttcaagacttcctatcgactcctcttctccaacgagtgatctccctaattcatgctgggaccatcgtctatcatacctgctccggcgttcatgctcgaaggggacttcttgaagacggataccttgggcgaggacgcagaagacggatagggcttgctggtgacgaactcaagttagtttatcatgtctgcgaagtacagtctacataagaagaggcgctcacaggtatcgcctcatgattttgtggttttctataaattcggttgatgtagtgaggagagtcatacagtatacctgtataacgtccgagaatctggctggcttgataccgctcgactaaaagtccctttctggagggacacgatcgaattcatcaagtaaatcccactttcacattcttttgcgctcttctacagatcttgcacttatgttttctcttcccattccggatgggctcgtagcttctttctgctattcatcagctttgtgctatgcattcggtatcaaaatttcgaacgaattcactggacggaaggcttcctcatttctatgggtcttggtttagccctagatgaggttcgtttgtatgatatcaattcatcacgcaacagtgaccttgttcaatctaaatagagcttcatatctttgtctgtctatgtagttcgctgccactaaaggtatgagcacggtttgatttaacctcatcaaactaaatctggcccatcctgaccgcaagaacactgaattatctttctacaccccacttgatctatgataagaacatggacttctgttctactcccaatctctgttcaatggtaagtctttccggcttttatttctgttacattcaatacacctaatacagccttctcattgaatatatcatctataggcctagatctctccttccttctcatctttttcacctacctgatactccgagtccaaaacttgtgcctacctcatcatcaccgagaggatgaagtggaaacctccaagcttgcattcgatatcttggcctgtggagcggcgatcctattcccgagattggctttcacagtgatcagaggaaaggttatcgttcttgccctcaaaaagatgatggttgagtaagtcccaaccttttcatccttgtttccttcagctttcttgctcacagcatcgtaagacacaagagaagactgataagacggagctgcctgtgatagttttgtcctgtttatgatgttggctttgacttgtttcacaggaatattctatgcccttataactcttggcaaatctacctggacggcacgatccctgtccgtgtatattctttcattaaaactgtgttctacagactgatcgttcgagttgattcatgtttgacagggcgtggctcatggctcagatttggtttggttctagctgttagcatgcccagtctcaatctgtcatggtgtctttctattcttcaatcactgacgagtacgattttattttatcgcttttgaattacggtagacctttcttttcaatccagcgccagctttcatcctgttcgtaaagcctcatttcacacgagtgatgttaatctctcctaatctcttcaataaacatatcttcttgatctagatctttggcccaatactcttgatttcttacgcagcgctatgtaatactcttctcgtgaccagtgagtttctctcctttatttactcacatcacggcgtcgatgatagcagttcatcgtgtctggtactcatggtggtggttgtatagttcttgtatcaattttgtcgaaccggtatgcaaaggtttcagagaacgcgcgtgaggaacaagcctttcaggacgctgttgctaccgttggtggtgtaaagagagacgccgtgagttgacatcatgcacctttcgtttccgatgttaacctaaacgtacaatctgatcgtctcaacactggtcgtctcaacagatattttcttatatagttccgtaagttctgcttccgttaatcatactgttaaaagtgagatatctgatcgttctcttggtgtgcaggctaaacatcatagcgactatcattttaggtcctctgagttatgttctgagtccccgaactttccactccctcaatgtgttcctcattcgatcgagcgtacgtttgaaattacacatatgaaattcaaagaatctcatgactgatctgttgtctgtcactcaacatggtttgacagacgtttcccttgctcttggttgtctcgctttacgagcgttggaaaattaaaaattctaaggcgatgaataatctcctcgggtttgtctccctttatgttcttttttccagatgtttgagtccttgccttctttaacctttgattcttcctgaagcaggtcgttcggcggatctagatcggactggatcgaagatgtctttactacatcaaccttttctctcggatcgaattctatagccacccgatctgattctcttgaccttctcacccgatctgaagaactcgaggccgaaatctctggtgcatcatctcctgtagagtcttccacttctgaaactatcatgggaaagctaccatcggacagaactcatatggaaaccccaatcaaacgacgaaagactgttcgagttcaggactctcaacaaagcacacatggaggatcgacgaatggcgtcttgacatcactcacgtctcctcttgcaaaactcttccgatctgattcttatcaagttatcatgaaagaaggagagggaggtaaaacaggaagcgacgcggaggagtccttgggtatgcttcgaaaagaggtcaaggatatgaaggaaaggcagatcaggatggagaatttaatcttgtctgttctcactctttgttttctgtatcttcttcacaacgcctggttgacatacaatactgacaccaatttgtttgtcatcttattttgtaatgaatcgaactggactggaaacatgaagggcgttaacgaaggaagttactaacaaatcataatctaagtaagatgtcttgcttttctatctgataagatagtcaaaggaagaattaggtggaatctggaaaaaaaaaatcccgaattctatgctctttccaacgccgttctcttaattctctcctttcattcttcttgggctattcctgtaacaaagacataaacggcaagcagagcttctctccagaaaagataattaaatttaacaatagtgagggagaccagaagcaaatcgatgatttgtccttcctcttccctgatggccttatctttaaaaatccaaaaacggttagaaaccgcccggagacgttcgtatgacgtttttctccgaacatcgcttgctagctcgttggacgagctcctcgtttctctagatggcagttcgataggacaggtagaagaagagccagcggagggaatgtattgggtttggattgtaaactatggtgagcaaggaggagatgtcgagaagaagagggaggtcattcaacggttactgggaaacgatgcgatctggattcctttgatcggtcttgtcagtctgtccagtcttcctttctcttccatcggcttgaacttgacttgttttctggttccactggatgtcgtaacgtatggttcgaacacgattgaaaatatgcacacacatacacagacattttccattcttcgcttcccaacacctcaatctgccctatcctttgttcttctttaccagaaccaacctctcctgcatcccgcatccacactggatcttcctaaacctctgtatgttgaactagcttgtccgacggctgtcttacctcgactacctccgataccaaatacgtttgaactagaaggcgcagtggagttcgagaaggggaaacgaaggtggccttgtggcatcgaggtatgggaggattttatcagtgcggaagaggaggctatgttgatcaaggagatgcggactatcggtggatgggtagaaggggtcgagaaacgtctatctgtgagtaggctcctctctagcttgcattgaagcttgtcattcatatattgactggttcgtctggtgtttgcaccactcaggttcattttggcaaggagtttgactattctacaaacctgacgaaggcgagcgaccatgaaatgccggcctatatgctcaacggaggtccgttggacaggttgccatatgtgaatccgaatcttccggtcaaccagatgaccggtcagatctatccggctggaacagggattcctccgcacgttgatactcagtatgttgttgtcatagtgttgatctatacagctggtcatatagaaacaaactgatccgcttgctgtgtctcccgagcagttcaccttttggagaggtaggtgtcttaatcaagcgaccactcaatctttgatagtaattgtcaacaatcattaacaggaccatttatccacttcgaacaggtgatatggggaattagcttagggagcaccgtcacgatggaacttaagctttgtggagaaattgaggaaaaacggatgcgggagcccaaacgatgcctcactcctacatctaactcaaatcctatccaatcctcgaatacaccactatctgtactattgaaacggcctcctcttccagaagttctttctccagacgaactcctgttgatagatctacctcctcgatcacttcttgtgatgaaaggcccgtcgagatacggttatactcatcatatccgaccaaggaagctggaccctcttggtgaatggggagaaatactgaggcagagagaagaacggtactctctaacgttcaggagtgtgaaaacggatgaggtcaggctgaagggttgcttgtgcgagtgggatcgcttttgcgactcgagattttgataatcatgatataaaactgcttgaatcacatctacagcatacagagatactcttgcacacatgtacatgatcatccacaacgcaagcaagaattgtgatgtatgacgggcaggatgcactcgcaaaagaagttagtgtttaatgaaaaaagcagggaaatccgttcaccttctttttgctctagacagtcatcatcttctttttctccttgcgtgagtccttctctcctttcccacccagcacatccctctcccctcatctctttacttgctctgttggaacgatttcctgtgttctcttgccgtcgttcttcaagaatctttgtgtttatcactccatgggctcatctcactcgttctcttcacctccccgggtttcatcggctttttgaatcgcgtctatcgtgtgtgtttcctttcttgtcgtgaccatgccatctctctttgcggtctatcggttgagtctttagggcgagacgtgctcctcaactacaagtgcacatttctgaagggaaaaaagaaaaacgaaagaacctcactcaaccgatgtccggtttaccacctgcctcaaacttgccgcctaggcctgcccatcttccagcacccccaagctttcttccagctcctccgatttcttcaatctcaaacaccagctcttctggctcccgaggtgacttctatattccctcctacggcaggggagatcgtgatgagtgggctgtgagctcgagagatgaggacgaccgcgacagaagagatagcttaggtcgtgattacgatggtaagggttcttttctttctccttgtttcgctctctaggttctgtcctagttcgaacttggtccgcttttgatcgatcattaccagggctcacctgctaatgatcttctacatatgttggtctcgtctttgttcgcgtctgtgccttagatcgaaaaagaagacgatcgtcgtcttcatcagaatctcctcgtaaggaagcccgacgtgaacgtgagtttctttaaaagaattaagctcgaaacattattctaaacaatcaccacactggggtttcaatcaagccttatcacagaattctgcatatccactggcctcccgaatgagcagccgccaatattacaatccgtcgtcaagatcgtccggcccctcctccggtttctcgaattcatctactgttattgcaaccgatccagacctttcagagcatttgatgcatttttctgattgggcggctgccttcagatatcaaaaccctgaagtcgtaagtttctttatgtaaacattcagggtcctcaggtgtttacttacaaatcgacgcgtgtttctatcaactcgaggttgcaaccgatgatcctatggaacaacccaagaagatgcaggaacgctacgagacgtatcgtaaaaagtttctcagtcgacaggtgcgcgatctctctcctctatcttcctctcaatacatgaactgatcggccatacacgtcacattcccttctctggaataacagctttatggcttgtttcttcttaaaaaatcggaatgctggtttgtcgagaagtactcgctcgagcccgagatggtcgcgatgagagaacgtgtctctcaggaaggcagaataggattggtagacgctttcgtgacagagctgaaggacggcaagtttgatcaggtgtcatttgatcaagtggatggtgaggcaaagttccgttatatctattgcctaacttgccaaaaactgacatattcctatgtgttcctttcccattctctctggaaggcaaagatgaaaagagcgaactgaagccgtcagaggaggaggaggatttgcgaggcgatgcacagaagcaactcgtctctgttcagcccatcccgaatcaaatcttcatcaagagcctctccccaaatgtttctagagagtccgttgaaaaggtttctatttttcttcaattgtgctatagacgaaagatcgacgtttgaactgacgtaacgcaaggcgttccttctctcagatttgtaaggaaatctctggcttcaagcggctcagtctaggtcctccttcggagaagcggaatttccatcgatccgcttgggtgacatttgaagaaggaacagatttggatgccacttgcgcaaagttggaaggagcccaagtcagttgactctcttctcctaatttattcttgacgtcctgatgttcattatccgtattcattttactttcaggtcggggaaaatggatttacgttacatgtcgccatcaactctgaaccttacgtttctcgagcaagacttgctcctgaaggaacaaacaacctcaatcggctcaataaagatttaacacaagctaaggcgatcgctatcttgtttgagtcacaaagtttgaagaaggcaggcggcgaggaagtggtcggatctgaagctatcgatcagaaagtcgaagagttacacgggacaaccgatttggatggtgatgcggctgtggcaaaggttagttttctcttgggagatgttattcaagttttatcatgggtcgggttgattgaatggagtatcatatcaacgcttggcggacgcaggtcaaattccacttggatctgtacatcacgtaccttcggcgggcattccacacatgttattattccgctagcgttgctgactctgcagaagagctccaacggttatcagttcgataccttcgcaagcagaaacgggcgagtctatctcccgccaaggagattaccgcgctttctccttccgtcacggagaggttggaaaaagaccaaaacggggatgaagagaaggtagcggaaggagaagaaaagaagaaagaagccacagatgttgaggaggaccagagtgaacaggcgaaggcttcggcgacgggaattggtggagaaagtgtagctagtgcaaaactatcagaccgtgagtgtttttcttcctttttttccaatgcgaacctaggtggcaactgcgtggctgacatgatgactgttcttccagtcaacatgatgatctggagtcaagacttggatccaaagatcaacataatcttgaacagaacgacaatagaccctactgaggctggcgggaagaacgtttcggagtatggctatccttctcataacctcggatttatcaggttcctttgagatctgactgctcaattgattttttttgccaacattttaacgaaaacaaaagggagattgctcgaatcatcggtccgtttatcaaacaagaggatgaaggaaagttcagatgcaaagtgtgcagcaagctcttcaaggcagttgatttcgttagaaaggtatgtcagatggataaagtagaactcatgacctagagcatctgtgtcctgaaggaacgcgctttatatttaaacgaacacatagcatattccgttgaagcatccggagatcatgaaacccatggacgatgtgagtcttttcttgctctttttctatgcatcatctgtatgtttgcaaggtctcaacaactttcttcctgtttctgcattccaggtgcactttttcaattcgttcgttcttgacccactccacatcacgccttcccctggtgcgcccgctgctgtaaacgacgagatagttcctccccgatctcgcctacctggtgggttgatgagcataggctcctcgactacggcatctgggttcccaatgacaggtatgcctttctatggtgcaacgccaatgtggatgaacccgatggggggtagttataatcctggattcgtaggtttaggaggtaacaacccttatgttcctcaaccgatgttccaccctggcgtaggttttggtatgcttggctctcgaggaggagcagcaggtggagggatggccggtggtaggggagcggggaggagaggagacgagccggtgcaagtggatacaacgctgggcagacctgaaggtgtgagtgaagatccgagagcgaagaaaggtcgggttagctataatgatctggacgcaagtttacctcaaggagatcttcagttggattattagtcattccatcgtttactcactcttcttccgctatcttatattgatcccttgtctctgcttcctttgagccctactctcactgtccccgatctagtggtctcatatttactgtctcatcatatctattcatatgttgcttgtcgagtcgcctttccctattcaaacccctctgttatttcggaactcccttggcatgaccagaatgaagggaaagaatccactttaggatgtacaacatctggctgttatacgaattgctgcttctgaacagggtattcggacacaaactcatccttattcaaatcggaaaatcacctcgaaagattataatggatacgctcatacatactcatgtctctactcctatctctctacttgaattcgtttggttccttcgttttcatttacttatagaagctggatcattcttatagcaggacacccttggtggagggaacatcgtttcctcctgtacgagtgatagcttccctgatagcaagagcgagcgccttgaacgaagcttcggcgctgtgatacaagtaaaagacaagaaacaagatcgccagatggaaacataatgaagaaagaaagtgtcagatgtatatccatatgagagaaagggtaagcaagggcaaagacgaacatgtggtgattgttgactcctcgaatgcagtcgacgtgcaaggtgactccagcggcggtagcaaatgactcgaatacgtgggggatcatctcggttgacactgcccgcattttcatggcaaacaagggaaggtaagcaatagaaaaacaacagttgataataagaaaagtaataagatgaagagtaaagaagaaaacatacaatctccaattttttcacgagtgaaggggaggtcgccacaaaagtaaggtcgagacgagatatccaacacggctcttgataaagcctggacacagaggaagcggataaagggaaaggtcaacaatcccgattggtttgaggactcaatagtggtagagttgaacagaacaaacctcatcaaggggggcgaacccagtaccataccgcctgattcctctcctctcaccgagagcaagcttgaaagcttcacctagagcgagcgcgcaatcctcggcggtatggtggtcatcaatctcgagatcacccttacagtgtagagtaagagacatgttgccgtgcttggccatagcgtggagcatctaaagttggcaatccatcaacaggacggagggacaagaagcaggaagaatccgtgtgagggtcagaagatttggagcggtgatgattggattgattgatcaatggcccgttgtcgtcaatgaagatccagtaaggcttgcttgtcttgttctttccaacatttaggaagattaaacgttcctaacgccttacagttcgaactaatggtcgacccaacaaaccccatgacaagaatcgcaaaatatgcaaaagcagaaagacgaagattaagacgaacatgattaaggaagccgataccggtctgaatgtcgatgatctgctgatcaactccaggagtgtgatcaagagagatcgagcacacgatctgtgtctcgttagtattccgagtaacggtagcagttctgataggaagtccagcagacatcgtgaatgttgaagatgatggtggttgatgatggataagaagcaaggcttggatgaattgatcagttgtccgagaataattagaaaactttcgtagtgaattcataaaacccattagggattgtctaatcattatttgagttttcctctcgttctctcagcatccatcagactccatcccgcttcagtcgtttcatcaaggatgatgctcagattgactatcggcagagtcggggccggattcagagtccagcacggcctcgcctttaggtttcaatctacgacacatgctaaaggaccggtcggaattttttgggatatcggttcatcttcaacttcgtcttctcaagcttcgctcgtccgccctctgctttttctatcctgtcgagcagacgaaacgactgagatcctcactgtatacttaatacgcttatacgtagaaaactgttcgccatacaactatacctcaccggctaagctgatgcgctcgttacgaaccgtctttcatcgttatggcccgattgcctctgttcgatcttaccagggtttgtccctgttctatttgcccgtattctaacaattgatgagactgatgagaataacggcggcaacatctatcggaaaccctgttcctgacaaccgacagacgtttcgaaatacacgctgaatgagatcgaccgggccggttacagcgcctgtgggctccaaatggtcgacacacctcacctcggacggaagaacgtggcggattggcacatgatgactgacattgtcggtttcgcattcaataatccactacatagtaccatcattgtcatgttcgtccttcttcaattgagactatggactgacaagctgctcaaagtctcttcgagtagtagcttgatagatagaggatagttccgtcaggaatgacttcgcgtcccaaagcgttctgacagaatcccatccatccttcttcttgctttcgtttcgttctctcagcacgacagatagagactattgcagcctcctcaatatgcttagcaaccggatgtacaatatcgttcttgttactaacattgagcatgtcattgaagagctcgcctcaagtgcctccgtcatgtacaactggaaagaatttctcgaccacgcctcgaatggccagaaggtctgttcgaaactcccttgaaacaatggaaggcacgacttactgactgattcgattattggatgagagcaatctcagttgaatctctcaatcgaacctcccatcaagccccatcacaccggattagacccccactggccctcaactgtagcacatgtgcccagaaagctaaaaagctcacgcctcaaatccgaatcaatgtctccgcgtgtatttgaaccctctagagcaacatcgtcatcatcaaccacagccgctacctcaccatccgtgattgcacctccgactaccactacagttgaaccagagccggtaacaatatcaacatccactgaaacgtcttccgaatcttccttttcgtctcttcctttgtctggtctctcaatggaaaactcccagggatggagcagcaccgcattccgagtttccacccaatcagacgccatataccctttgatatgtcctaagatccgtgaaaagtacaacgcggtgatccgatcgatgcccagatctcatcacaacatcatttcattcggagagctcaccaagcagatcgagcggctgcaacctaatattattcagtccctaggtgttgcctcgatgagcgaagttatcgaagaagctatccgggatggcgttcttgtcctgactaacaaagggcctaaaactcatcaactcaagctgagcagacgagtctatcagaaatctggtctgggcgcctggctgattcgatctggatggggcaataagtttgatgagatcaaggcactggagagagtgaaacacagagacagcccttttatcccggtggaatcagctgagccaaagagcgcggaggccaacgtggagaaggatgacaaagagttgtcagaagtcactgccaccgtagtaccgattgaatctaccaatacggtttcttcggcaaccttcgctgattccggcctggtcaccaactctgacacgccttcgactgcagctattcttaccgagccgactcctgaatccgcacctgtcaacgattctagatgtgcctcggacggtcaaatacatgaaattgcgaccttccaggtcagctctcaacaagacctgatgtctatgccaccatcaaggaccaaccttacttcttcaccagatgaaccagtccctgctttgtcaactgaggagtgcgacgactctctttctgttccgaagccagcacagactgagactaccgatgatgacctaacgatcatactgcctcttgaatcaggatctacacccacccccacgcctgaatctacatccgaaaccatgacaacagctagctttactcttaacattccgacgctatccacatttgtcgatttggatgatggatcaagacccagctcaaattcaaatccgagtccaaattcgagtccgagtctggaatcagcatcgggtgtaaaaccaactatcgagccgacgacgtcggcaacgaaatcgaaacggaagagaaaacaggttcagaagcaggttcatgacgaggccattcagaacatagaggcgcttactaagacgaacgagaacgagaacatgggtgcgactagctcgggtgaaggggcgaaggatgcggtgtcggatgtgatcagttcaaactcgaatatcgtttcagatttaagggaacaggtggtcaaccgtactgaagaagcggacaataacaagataggaggggtaaagatcaaaaagaagacaaagaatgccaaagggactgttcaacccaagaagaagaagaagaatgtcgggcagttggaggtgaccgaaactgtgaagagaccaagaggacggccgagaaagagtcctaccccaggtgttttgccgaagaaaaatccaccaaaatcgatcggtttgtgctttcattcgcttgtctctcgaatttgaggttgtatcactgtctccatgctgaaaccgccccaaatactattctcaaaggcatgcccagaaaaaaaagagaggagcctagctcagaagctctggccatcaaagcctctgttccatccgaccggccgtggaggatcctttcctctgttctcgccaaatctccggatactgctccctcccctgcatcctctcccccgacaaccctatcaacaccaccgccatcatcattactacactcgacgagttccgtctctgacttgcagtatcgaaaacttactccgcctgatccgacacgtgtgaaacttttcagctctttcggagtcaagaaacgattaccacatgttttgccattgcaaacgccatcgtcccaccaagcccgcgcttcggggccgaaagcagaacaggaaataacgttgagcatactcaacccgtctttggtctgattattcaagcttattcggggttgacaagacaacttctccgtcaacgtcagaattagagtcggtatattaacgcctagatgaacaagctaatgcgaaataaaggctagagtaagaatttcctcttcgcagtttcttttctttgtacattcttcaattcttccgctttcctcccaactcttttcttgcttcttcatcttcgatttttctatgtttttttcttttgctacatcagaacttgttgtttcacttggatctttcctaaaacctatcaaactgtcaacccacacagtcctgttgcttgtttatgcttactctataatcgtaccagtcctttttgagaataattcatatctcagaaaataaaagaaatgagggatgaattccatttgtcgccgcctttattgcgttcggcgttggagagcggcacttagtcaagtggtacatgttaagcaggaaaggaagacgcaaggatcgatgaatgatgcaatgaatacagttgatagatacagtgagcagataagaacaaacaacagagatggagggcgaaggagaaacacctgaaaacagattgaggaaggaagcttttcagatgaaaaggagtcggacgccttcaaccccacccatcagtggtcgccaataccattggggtccttcgagaaacatgccgacctcatcagactgctcgtctacgaggacatctagtgtactttgatgaggacgctcgcagccttcaacagggcagaaccattcatacgatcgagatttaactggtatccgaggtggttttatctttgacttttgtttctttttatctttagcagatccctccggagattcagcagccgaggaagaaggatagacaaatgggaaggtagaatctggatgcgcacaaagtctgacaaggcagtacccgtcgataaggtggccgcaactgaggacatagatctttctgtctgaactggacgcgcgttgaagtagtggtcgaaggcaagacgagcagccgaatgatagaccatattgctgtatccggggcggacgtcgtttctgcccttgaggttgtaaaggacgacgtattccctctggaagcgttgccgttgttgcgtgagaagaggacgcttggtcggatgaagaggcagggccggaaggcaatgagcgttcaatcccatcggattcgacaacatatattgaatcttgacttgaggatcgctcggtgggcgatggccggtctagactgtttgaatcgccttgagaaagatgtagctttggagcaacagacggagatagcctggtgttttcgacctcttcgtcctcgtcttgatcgatatggatggcttggtccatcttacccttattcttactcgcttccttcttcctggccttcttttcctcatcatagtcgtcgtcatcatcgttgtcgccgtcgttgtcactgtcactggatgaatctatgaagcctcctatatcaagctcgaacgaccgggcgaatcccttcctagtatcttctctcttgaaaaccactggagattcgaatatgtgctcgatctgctgatgatgaggcacaacatcctctccgctgtccgtgcggtaatctgaccgaagtcgcctcctgccttcggcaggagcccaggttctagacaacgcgcctcgtaagccgctgccgtagaaagactcaagtgtctgccatcttaatgatccagaagaaaatgctcgtgagagtatactgaagaagctcgaagtatcttcctcgtggtcgcttaggttgagcagaaagtcatcttggtaagaccaagcctccgggtctgagggtgaatttatatatgactgtggacctgagcgagaagtatggtcggtcaggtttctgggttcagactgttcgttatctgagctgctcgtatcaagtagaataacctccactggagacgatgagcgagaacctggtgtgggtgagaccatgaattcttcttcgccgtcgttgtcgtgaatggtagttgatctcaaatcagctgcgtctaattctctttctctcccactgactatcatcatcgacaacgacgacgaccatcatggctcccaaccctcgaacgtttcttgatctctctatcggggattcgccacttggcaggtgaggcttactgtgtccttcctattttctcatcttgctcccaaactaatatgcatctcatcccatacagagttgtattcgagctcttcatgaatcagacacccattacggctgaaaagtacattatccttcctttctttctttccttcttctcctttggtctttcatcgctgctttgcacagtcgctcatgagtggctcttgtctcttacgtttgttgactcttgttcatcagcttccgagcattatgtactgggtcagaaggagtatctaagacgtcgggcattcctctgtcctatcaaggctccatctttcatcgcgtcatccgttcgtgttcttctttatgtttatcctctcgaggtcgtaaagatttgatctataatatagcaatctgactaacgacggactggtctcgttaacacagccgaattcatgattcagggaggtgattttacaaagaagaacggatcaggcggagagagcatatgtttgtcccctcagtttcttctcgcttcgttggcttatccgtactatgcatcgctgatctgaatattgactattctcgtgcataaccaaatcagatggaggaacattcgacgatgaggatctatccattccggttgacaagcctgggttgctcgtcatggcaaacagaggaccagctactaacggctctcaattcttcattacgctggcccctacccctcatcttactggaaaggtatgatctcagcatcttcctgttgctcctcgtttgcacacgttgacacgcgtcgagtcgagaaaaactgatcgtcgtctttttttgtcttccttgttcagcacgtcgtttttgggcgcgtcgtttctggttcgtttgccttgcctagttgtgctgttcatataaatatatttgacatacaaatccatactaactctgcatcgctctgtttgtctcaccttctgccgttcaacaggcctcgaacatgtccggtctatcgaggctctgccaaccgactcgaaggatcgaccgttgacgtcagtcatggtagtcaaatcgggtgagctcgagctcgtcaagaagcctgttgcgagcaaacctgcttctccgccttctcgaacgacccgaagacggtcaggatctgtctcatctatctctacagattctggagatgatcgtcgcgcccgaaaacgatcccacaaacgacgttcatctatctcttcctcttcttctttttcatcctctgcctcggactctggttcggattcggatgatgaccggaggagacgatctaggcgatcatccaagtcaagtcggtctaaatcatccaaaaagacggtttcgtcttcccgttcaaaaaactccaaacaagttacgtcaactgaggctcgagatgaaccaagagacgccagaggaatccctctgtacagggatgagacagatgcagagattgatgctcggctggagagagaagagaaggagagggaggaaagacggaaaagggatgagttggagagactcaagaatcgcttaggaaaatccaatggaggtggtgctcccacctcaaactactctcgacatgattcccgtgtgaactcgaatgaatccaccgtagtcaattacaagggtcgagggtcgatgcgtcatagagaacaaggaccaaccgtcgaccttccgtcttatgcacctcgatataccaatcgacctgcaccccctcatcaacgtagccgagacagcaatgcccccaacggcggcacagccgatagatcagctagattcgatacgtggaaacatgatctcgcaggttcagatgttcaaccgagaggtgataggcaggccgatcagcacgtctccgagaggttcataaaaggacgagcctccgcatccaggattgcgttcgagtcggaggccaaaggacaagatcaagagcaagaaagagcaagaggtagtgcttatattgatagagacgagccccagtcgatcagtctcaagcataaggaaactgagcgagaaggtcggcccgagacgcagactctggcagatgctcatggagaggagtaaatgagactacagaagatgtttaaaacaaaaaggaaaggaaagtagaggaagggtgattttctgtttcattaaggcttgctctcaaattctccagctttggtcttatcttatggcctttcttagttcgctcgcatgtttttcttttcctcggtataatatggcaaggaaaagcagtttcaaaagacccattcgattgtttaatgagtgaaagaatagaaaccccttgagtgagaaaattccgatacagaagatcaacctctgtaaacatttttgtcgtttcccagccatactacttctctatttctctgcttcctttctattgtatatccgtcatctgttatgaattcttgaaaatctatctactggacaaggctacacggaacaaatcaaccaagatcagaaacaaaggtaagcgaccaagttcaggattagaatcactcaagagcagacaacacagaagacgaacgagaactctttggccttatcgtagtgaattccaatatgggtcggcacaccctcgactcgcttgtaggcgttcaagttcttgtgcaacgtgatctggaatacagacgccgaaccctgtcgactaacaatagttgacgaggcaaggaagaaagaccaaattcggaaccatctgttttttttttgtttttttgtttttaaagtaagtcagtaggttgatggaagcgcgatgtgtcaataagcttgcctaaaaaaagtgctgttcacaaaaggggaagataaagagtaagaaaaactgacctatcaccgtacttggccaaaaccttctccttgttgctgatccagttctggtaccacctgtagatggtggccgagtagtggacaccgagcacatcgacctgcttgacctcaaatccgacagcctcgacctccttaaggacccaccagaggggaatggatgcatcggctccgggaaaaacgtacttgttcatgaaaagtccccactggagatcctcaaactgccaggacggtcggataccagcgacctggaacacaaaggtaccatcgtcgtcgaggagatcgtaaacctgtcggaggaaggaagagtactttcggattccaacatgctcggccatctcaagagaaacaatcttggtgaaagactggggaataggatcgatgaatcggtaatcggtgcacaaaattcgtcctctgtcctcgggcacaccgttctctcggagtcgctcagttccaaacttggtctggttgattccgagggtgactgcggttggatttttgaaggaacgccagagtcaacacagcccattctttctccatgttgacaaggctaaatgagaacaaacctccggtaacatcacacttgtagttctttccggcaaaggcaaccaaagttccccatccacatccaatgtccaaaagcttatcagtgggctggaggtcaagcttctcgcagaccagcttaagcttgttatcctggagctcctcgagggtctcgggtcgggtgatatcgctgatgactccagaggtgtagatcattcggggtcccaagaaccactcgtaaaagtcatctagatagggtcgagagggtttgatgtttgaggaatcaagtattaaattatcaggaccgagacgtgtgaggccagacgcagacagactagaagactcacctcctcgatcgtagtggcctcgaacctgctcctcgtcctgggactgagagtgaaggatgacctcgggggcaaaggtgaagaaaacgtatttgaagagctcgggggtgaagttaaaagtaacaaagtcgtgtcggtactcaagaacctcaaggacgtcgcctgtttgataataatgtatgtttgttcaaaatgaagcatgaagaaaagaagagtcagccatatgagcgttgctcttcggcttttctagctccgaaagatgggctcaagttgcagaatatgacagaacaaaaggatattgatgagaatactcaagattgcatcttgagcagcaagagaatgaaagacgaaacgtacccttgaagtcaatcttgccctcaaagtacaaatcatgaagttcctggtaaggaatctttcgacccaagtactttttcctgacctcctcgtccttgaactcgaggtaatgtccgataggtcgtccggggagctgcaccttatcgttgatcctgcctccaaaggtagaggtcaaggtccagtaaccgatgaggacggggaagaaggtgatggcgagaagaataaagtagatgattcgggagtggttcaagatggggaacgtccattggatcaacttgggagtgatgatcaccgccagggcgagatgaagattcgaaaacgcgccggagccctctgcaggcaaaggggaaggagcgacgacgccgtcggccacgacgtgaggatgcttgacgaccatttctttccttctttctagcttgtcctttcgtgttgtttcttgttcttgcttacctgtcttcctttctaattctatcaatgaagagaaaagcctaatgagacagaagaaagaagatgaatgagaaaaggggcaagacaagaaaaaaaaggaaaaaacaaaaaacaaaacaaaacaaaaagaggagatgggcccgacgctgtttaagctcacgtgcagatacgaatgtggcgggaaattcgatacgttcaatagctatgcgtgttgtaacctttcatggttacgtgcgtctctccttacgctttcctttccagtacttttactgaagagttctctcccatccatcccatctgatacaataaagccatcatatgggatccacttacgatcaagcgactggccatctggcttcccttcaagctcacctggcgtctttaccaccaaatgcggtacctagctcggatgatcttacaacatatctcgctctgttcaagctgatccataggttggcatcaacccatatcgtccaggccaagtcagagacggccgagttgaggaacgcgttggataaactggtgttagaagagaacggatcagagtatgagaagaaaaggctcggtcaagagattgaaaagtgtcaagactttcagtaagctttactcctgctttgttcgatattcgtgacatcggctgacaccgtaagctcattctggtagacaggactcgtttcagaaattggggatccaacaagcaattgagaaactcacagctggtcaagataccaacattcaccaagtgactctgaaatttcttgagcaagaaaaagaaagcatgatgctgtatgttttctcctcgtctttatgtgatatataacttccttcttacctttcttcttaggctctctgcccaaaaaacctctttagacaaagatatcttgagtcaacagcgagaactcgaccagctcaagcttgagctcagtggagtagacaggaagatggaagatcttttaaaggtaagtgacctctggtcgctcctctgtttatatacatctttcacaagcggctgatcttttatcttctcgtatgtgtgtgtgatatatttctagatcactcaatccatccaaaacggagtcactcatacacttaacaaagcaaacacatgagcgttgctttttcttcgacttctccagtatattcctccattctaggccatcggctccccatagctggttcgaccacacaacctccgcccttatcacatcagaaaacatgtatacccttcgccttgttgtattatagtctctccctcgatacctatctttcgatttcttgtcaatcttttgacgttctgtgaaattaatctacacatcagagtcgcctcctgtgtgacctgactacttctgagatataggagtatatgcgcatgaaagatttcatcctgtttcagccagtcccgaccagcttcttattcttgctagtaaatggcgaaggtcatgaatgaggagaaagaggatccttgcatagaagttatttaatgataactctaactatctgtatgtttgtatcgaccatacaggatgaggacagagatagaatacaaaagtggattagttgatgtggcgaaaatgtctaatgaaaatgtgctggtgaggaaaagctgtgctccgattattgaagattttgtttgcaacctgttttttttggctttccctttactcgccctccacccgtttctctctccctcccaccttcacatccgccttctttattcctaattaaagatggcccctagtaagagtacacccgccaagactggagttagtggcacgaagaagaagagaggaggagagcagggagagtttaccctcaagcgagtcaagggttcgtctattcctatcttcaaaaatcccatgaaactcgcctccgatgaattacttacctatactggactttgt

SEQ ID NO: 1837 - DNA, 5823 bp, Xanthophyllomyces dendrorhous
cctatactggactttgtcgatcgttactcctttctatcttgtaggagagaacttctacgtcaatgcccatgctgctaggaagaagaagttgctcaccggtggaaaggctatcagggatagagacggaaagatcaccgagcaggctgctttccagaagggagaggaggatgccccgaacggtcgagttcaggctgacaagcggtggttcggttcgtttgcttctcactccccgatttcttcttattctctttcttccttctcgggtcccaacgagaaagaatcttcggtgcagtgtctcgagttggatcctgacatatcatcccgacaattctatcaggaaacacccgagttatctcccaatccgctttggaccacttccgaacgtcaatgagcaaccatacgtctgatccctactctgttcttcttaagcggaacaagttgccaatgagcttgctcgagaccgagggtaaaggatctgagggcaaggttcgtttttaagctttgttcatccatgtattcatgattgcatccagaggcgtcttgtctaactcagatttctgggatattgcatgttcctccttcattatcctcagcgcccgcatattgtggacactgagccgttcaaggacacctttggaggaaaagctcagagaaagcgacctcacctcgaagttggaagttttgcagagcttggaagtatccccatcagagacgatatcgccgagagcaatggtacgaactatcttttcgtttttttagttacttcaccccactttgaaacctatgtcgaggccaatggctcataatgtgcttgtttcgtcttcgtacagaccccacctcggagaaactttttgtcgaggctgatcctaatgatcctcgagatgctgctcgagagcgaatctacgccaaaggaacttcccgccgaatttggggagagctctacaaggttcttgattcgtccgatgttgtcatccacgtgttggacgcgagagacccgatgggtacactttgcaagcctgtgttggattttttgaagaaggaaaaggcccacaagggagtggtgtttgtgctcaacaaggttgatttggtccctacctgggtgactgtacgtttccggaaacatcctttgcttcttctttcttatcgctttgccccaatctcttgtcttctgatgatctgacgcggtgtttccctctgactttgtcttttctttaggcccgatgggtcaagcatctttccaagctagctcctacgctggctttccacgcgtcgatcaacaactcatttggcaaaggatcccttatccagctccttcgacaattctctgttttacactctgacaagaaacagatctctgttggtttcatcggttaccccaacgttggtaaatcttcgatcatcaacacacttaaaaagaaaaaggtttgcacggtcgcacctatccctggagagacaaaggtttggcagtacatcactttgatgaggcgaatctacttgatcgactgtcccggaattgtacccgtctcctccaaggattccgataccgccaccgtactgaaaggagttgttcgagtggaaaatctggcgacgccgacagagcacatccctgctttgctcgaaagagtcagaggggagtacctcgagaggacttacaacttggaccacaagcctgacggttggcacggtttgaaggacgccgatctcttgttgggtacgatcgccaggaagagtggaaagcttttgaagggtggagagcctagtttggaagcggctgccaaaatggtgttgaacgattggatccgtggaaagtgagtgtgctttccttgtttctgatataaagtcgccgatgatgctgatcgatggtggcctttggtcccccttctccccttttaagaattcccttcttcgctcctcctcctgagaaagaagttaaggaggctcccaagcctttggtggtttcccttcccggagccgctgaggctgctggtctcactacggccaagactgatgacgccatcaccgctgctgccactgaggaggaggtggatgaggaagaggaggacttcgaatcttcggctgtgaacgctcagactcttcttggttccaagcgagtcaagggtgtggagcaacctatccgaaagatcgtggtcatcaacaagttcttccctgatgatgtccaggctgttgattctgattctgaggatgagactaaggatggttcttccaagaaacgacagtttgtcggtgagcctgctgaagaagacatggattctgatgaggacgaggaggatgacgatgaggaagataaagcagaggcagaggcggcggaggaagagttgacgtgggatgaagttgtcggcaagggtcctgggttgagcagcacaggtgaacccaaaggaaagggaagggctgccgttgttggacctacgggagccgttgctgatgacgatgaggaggagagcgaggatgaagaggaggaggagactgatggtgaggagaaggctaacggttcgtcaagtctgttctttctatttgtgtatccaattcgggtttgatgtttcctaagcacttcttctcttcattattacaggttctcctaagggagccaaacggttcaggccgtccctcggattagaagacgacgagccggtcaagcctcagaaggagaagcgaatgaccaccagcaaggtttgtgttttctcggcccttgttccttcttcaaatactcttgctcatccttggtgatttctttcttatatatcttcttcgtccgggttcgttcgctaccgatgatactctactctagaaaaaggccgaatcgtactacacccatgcgaacgtcaagaacaagaacagagacaagtctgactccaaagacaaagtcaccggtggagggcgtgctagggctggaaagcgaggaggaccgaccagtggaaacaggaaggggactgatcctaaggccggcgctaacaagaagagaagatagacgagaccttgtcgttctgtgctttcgtctgttgctcttgttcgcattgatatcttgttctttcctttcctctatatctctacattggcttcttgtgttccttttctatctttttagtgtttgctttcttcattccttttttcttctctcatctatctaccctctcgtgcatctttctgtcttggtctttgtttttttcctttagaagaggaaacaaaaactgctatagtttataaatgatgatctatcggttcgagaaaaggaacagaatggaaggggttaaaccttcccaatctctagttcttggtctgataaatagtcaagggtctttatgacctttgccggatttccaaccgctaccgatctctcgggaatactctttgtgacgacactcccagcacctatggtggaaccattccctatggtgacacctggacagatcactgcgcttcctccaatccagcagtcggatccgatggtgattggcttcgcaccttcccgacctcgagttccgttccgagcctcgggatgaactgggtggatgggagtatagatctggacgttaggaccgagcatcgttcggtcacctatctcgacaggagcgacgtctagaatggttgttcctgtgcctaacacaacgtctgttccacatttgatgttgaagccctaagtaagatcagaatatgttaccaagtcagtaggatgtgcaacgatgaaagggagagcgatggaaacacacgtattcagcaaagaagggaagcaacaagtgaacttcagcgtcggcatcgcaatcaagaaactctttgagcaattccgatctctaagaaagataagcaaagagattggccagagctctaggtcagtctatctcggaagacaatactcctgataagcagggtagagcccgaccttttgttcatcttgctcgttattgattgctttgacttgttctctccctctcttagcaagtctggaaatgtaggcatctctgtaagtatacggatgggtgccggtgaccatccagttgaactcttgagggtcttcatcagcgttgggtggtagaggcttgttgggcatgattatggttgtagaaatagggtggatacgacagtgataacgagacggtgagtgagatggtgaaagagaaagaaggctattgaccgaaaggctcaaaagacaagactggtcaagttgagaaggcgatgatacggcaagcaagcgcgaaagaaaggtaagccaacaaacgatctttcggcaatgggagactagcaacataccgcctagctccggtccggttgaatttcaccggcgtaacctctgcgggaacgccggtgtgccgcaaagttgatcgcggttcttgcttataaatcgatcaaaaatcgtccgtcaccgtttgccaggatagttagcgcacgcgtcaaatgattacaagaaaagtcaaatacgcatcggacagttggcaatctggcgcgtgaagggcaagcacgccatcgcgtttgctgcgtcttgatgtgaccttaggtgaacccgcttgaacctggttgctcaatttgtgagtgtgtcatcaagagaaaaaatcctccttgaattcttacacaacctctcttgcacacatttaactctcactcacatcattcattcggaatactttgcaagatagagataaggatgccctcgttcaacatggaagcacagcagctcagcaccagagccattcacgtcggaagcgagccggatccgtacaccaatgccgtcatccctcctctctctcttagtaccactttcgtccagaacggtgtcggtaacctcggtggtggtggatttgaggtgcgtctgctctttatctctgtcttcacccctgttgactatcgagatcacttaccgggcttgaatcattcttatgggtcaatcttctctgatcttcgttgtatgtcaccctcggccacccgcttggcacacccacccagtattctcgatcggccaaccccaacagacaggcacttgagagcaatctggcttcgctcgagaacggatcggacgcctttgccttctcctccggtagcgctgccacccaatgcgctatccagatgctctccaccggtgcacatgtgctctccgtgtcggacgtctacggcggaaccttcaggtaccttgctaaggtcggctcagccgtccaaggtttggagaccacgttcattgacctgaacgacgacgaaaaggtcatctatgacgccatcagagataacactaaggtacgtctcctggttctatgttcctacggtataaggttatcatgcagctgattatgtctcgacgtgcgctcctccttctcttcatacctcctccttcagctcatttggatcgagaccccgacgaacccgaccctccgagtaatctcgaccgagaccattgtccggatcgcaaagtctcacccggccaagccattgatcttggttgataacaccttcctctcgccttacttctccaacccactcgaccacggagccgacattgtccttcactcgatcagcaagtacatcggtgggcactccgatgttatcatgggagctctcattgtccgaaagggtctcccagaagtttctgataagatccgattccttcaaaacgctgggtgagttttatcaacagtcttggcccaagtgtgccttcttgactgacgttaccttgtgctctccttcccctctttcacttcagtggatccatcccgtcgccttttgattgctacttgaccacccgaggaatcaagacccttgcgcttcgatcgattcagcacggaatctccgctcatgccgtcgctagtttcctcgaaaaccacc

SEQ ID NO: 1838 - DNA, 1984 bp, Xanthophyllomyces dendrorhous
cctcccacccttcccactcgatcgccaagaaggctgtcgcgctcagggtctggaaggatctcaagaagcgaggagtctccaaggagagcgaggaaggcttcccgttcggtggtatggtcagcttcaggatcaagggtggagcggccgaggcagacaggttcttgaccgccagtcacctcttcacgcttgctgagtcgttgggtggtgtcgagtctctcgccgaggtcccggataagatgacccacgctggaatcccagaggaggaacgacttaaggtgtgtatgcctctgcttctttacaatttttccttgtgcatgtctgaacatctgccttggtctctcttctttcactcaccatcttccagcttggaataaccccgaactttattcgactctctgtcggaatcgaggacactgacgacttgttggccgatctcaactacgccttgcagactgctgtcggaggaaaatagacaacgaaaagtagattaatagatgaccaccatgttcatatagatgtctgagaaataccgaaccaatgatctataagcgagtagtaggatattagaagcgacattatcgttttttgaatttatcatcggctatcgattattccaggattcatgatcgatgatgcagttacgtctcagactttcaacatactcgacgtagagagtagaatttactatttcgcagtcaggtgagacggtctaaggtatctgtagaggcgtctgaagaaaggctgtagcagtaattgacccgtctgatcgttcccagttcacaactctctcctatcagctctgggagcaactgtctcctctcgttcgagagagaaaagaaggagaagaggaaccaccacaaactaccacggccttcgtcgctccgtcagggctcttagagctcctccttcctcgccagcgaagggtgatgaaggcgcatctgccagccttgttcagctttctgtcagacaccattcttagaggtctacctctcatagtcaaggacatcaaggcctcatgatggtcctatcttcaccttctctaccggacatagtccatattcgagaaataaggtcaccaagacgcgactgcaagacggaccactcgtcgctgggggtatgacctccgcctcttctcgctcctgcccgtctcgtctcatcggtcgtcctaagtctatgtatacaccgggatccttcacgacttttgggcccagctcagatcggaaaatgccgatctgggacatatgcgcggggtagaacgagagtccttccgggctgactttgacacttgggggaggcgatcatctcacacctccaaagtggagacccaacggcaccgcttcgcccggtatcttgccacagatgccgccggagtgtctggcggagtgctaggaacaacgtcatctccatctgacgagcaagcgtaccacaagctagctcttcgtctgtcagaaggacatccacgcaccttcctggccttcggggatggcaccttctcgtcgacttcccatggccgtgcccctggccttgtgaagatactgtttgccaagctgagcgcctccccgctgctccaggtccgcaaggtccgagagtattggacgtcgaagatatgttcaaagtgtcaggcgagttctcgggagaaaaaaaaagcgtgggctctgaaacagtgtggaaatgtctacaaagtgagctggatttattgtgtgtgtatgtgtgtgtgtgtgtatgttctgtgttggttgctcactgtactctatgctctctcttagatttggggaacagtgctgtgaacgcgtcgcgaaacatgctgcacctagcccttcaccagaaggagaaccagagggcgggaatgctggtgtctgacgctgctactgctgctacgctagccgctgaggctgaggctggcagaaactaaatccatgacccatcagatcttggtgattcgtggtctgaggacacccaagtccaaaagggctatatatcgacc

SEQ ID NO: 1839 - DNA, 60819 bp, Xanthophyllomyces dendrorhous
ggctatatatcgaccatcatccgttgcggtcactcagtagtaactaaagctatacataggaatgttctgaacttgataaccctaacactacgaaaatatctcggaaaatagattaatttccttctcatctcaaacaaaagacacaacaccatcaatcacgctcctttcacacactctcctttttgctctctcgttcgacagaaaataacatcaatagccaaatgtccactacgcctgaagagaagaaagcagctcgagcaaagttcgaggctgtcttcccggtcattgccgatgagattctcgattatatgaagggtgaaggcatgcctgccgaggctttggaatggatgaacaaggttcgtcaagggtttcttctttatttcttcttgtcttttgtttcggtcgaactggctttcgaacttggccttgaccggttggatctcggttgttgcgccaaaacgatgtcgaagcaaaacttactcttacctgttcggtttccttccttccgaccttctctctacccttgcctccgatcggtcttatagaacttgtactacaacactcccggaggaaaactcaaccgaggactttccgtggtggatacttatatccttctctcgccttctggaaaagacatctcggaagaagagtacttgaaggccgctatcctcggttggtgtatcgagcttgtacgcgttttcttcattcacctttctttctcttcttctactctcttctctcgaactatcttccctgcgtgtcatcctacacgaatctttatacttacatgttggaacatatgccctgttcttaattcacctcttttgtctcggatggtagctccaagcttacttcttggtggctgatgatatgatggacgcctcaatcacccgacgaggccaaccctgttggtacaaagttgttagtcccttcttctctttctgtcctctttcttctgagctatgccaattcttgattgaaatcggtggtgccgtccggactaatccgtttgtcgtttttatcatatcttcttgcacaaacaggagggagtgtctaacattgccatcaacgacgcgttcatgctcgagggagctatctactttttgctcaagaagcacttccgaaagcagagctactatgtcgatctgctagagctcttccacgatgtttgtctctatttcttttcttcctcccctcaataaactgtatttgtgaccattctggatcctttcctgacgatgaatcattcttcggatgagtaggttactttccaaaccgagttgggacagctcatcgatctgttgaccgctcctgaggatcacgtcgatctcgacaagttctcccttaacaagtatgcccgtcatatattcgttttgttgcattcacgtctgattgtcagctccgattattgactctgatggtgatggtattgaccacatcatgcgatgtttgactttctcgtaggcaccacctcatcgttgtttacaagaccgctttctattcattctaccttcctgtcgcactcgctatgcgaatggtgggtctctctcttcaactgttcttcctgattttcttgaccatctgtaacataaatccttggaattttgaactctatgtcataggtcggcgtgacagatgaggaggcgtacaagcttgcgctctcgatcctcatcccgatgggtgaatactttcaagttcaggatgatgtgctcgacgcgttcgctcctccggagatccttggaaagatcggaaccgacatcttggtgcgttttcgttccttccttctacgttctgttttctatcttctgactccccgtccatcatttatgcttctgttaaaacgtattgaaacatcaaaaggacaacaaatgttcatggcctatcaaccttgcactctctctcgcctcgcccgctcagcgagagattctcgatacttcgtacggtcagaagaactcggaggcagaggccagagtcaaggctctgtacgctgagcttgatatccagggaaagttcaacgcttatgagtatgtcatcttttttaaattttctaattttcttttcatctcttgttcccaagaattattttgtgaaagttctggggctgaacatggtgcatccctttgggttcactccgcatatgtctcccgtttgaataggcaacagagttacgagtcgctgaacaagttgattgacagtattgacgaagagaagagtggactcaagaaagaagtcttccacagcttcctgggtaaggtctataagcgaagcaagtaattctcctctttatatgcaaagggaagattttggcgggagtgataggtaggaagagaagggagggtcatattcattaggcatttctcttgcagatatagatgatcaaaaagggatatcggtcctcttctttgttccgaatacataataagtcatacgaagccgaacatgacaaaagtggttcatgagatcaaactttttgcatgatcttctgcgattttgtacaattctctcgcatcctattaggatcgaaccaggagaagatgagagaaggaaaccctcaccccgtcagataacaaacgagaagtctcatcacacacacacacagatgaaagagaaaaataaactgacgaggataacttccaatccgatttttccagcccacgaaccttccttggtccccgctccggtgccttcgagtccgatcaatggggcccaaacgcctgaagatccaaagaacccttgttgaggtgtatttctcgtctgagcaatcttagatccttcaatttgcagtcgcgcatatataccatcaacatcatcgtcatcaccatcattgtcgtccacaacagcaccggcaacgccgttaatggcagggcttggacaacttgaggcggtttctagcaggtcgaaccgattggagctcgacccagggttgcacatcaccaagacacattctccttcaaatgagcgaacaagacataatgagggaagtagtacgctatcgaacgtcttctcacatcccgggttcttggcgtatcttttggcgattctttttgttgaaatagaaaattgaagagaaaaaaagagatccacatgatgaagaacggctctgtagattcatgctcgaaagaaagaaagaaagaaaaagaggggaacgaacggatctgaatctgtggccaaccaaaaagtaggcacaaagatgacaacagcgccctcttcgacaagtctttgaactgcttgtggatgagacaagtcccagcagatcaacattcctgctttaccccatggagtatcaaacacctgagaataggtcttgcccggctgtagataatctctggaccgtcatatgcgcgaaacgatcagtacgaccgactctactcgaagtcgtcaagagcacggacgagaacgaaaagaggacaaaccgctctggatgccataaatttctcttctcatacctctcccacccaccctcaggcctgacaaaatatgcaacgttaatcatctcgtatcccttatgatccatctggctctcatagttcttccattccgttttctctttctcactcagcattctgggtcccttgagtctccttgatgagttggacagtgaaggatcagaaccaaaatcgaaaggagaaggtggaatcgagtgtagagattgactggatgtcaggtcattcagacaaggctcgacgatggtcaacacaatatggagggacgtcaacgttgatagatcttgaattaatctgatcaaccaatatgctggtagtgcataagacttttcgtcatcatcatgaatcgagtcaacgttggtcagccagttcagtgagggttggttgtcacagattagaccatgagaaatcttatggggaggagagatgtaccttgaaaccctgatgagtaggacaagatgaacagatgacatcagtgctcgaatgaaatctcgacctacaaactcttcgaaggtcacccgcgggtttgctctcgagagaaagctacaaagagaaggccgttggaaaaggagaacaaacatctataattccctgtagagcatattccggaaagacgacaacaccatgtccttgcaagctcttctccgcttcccagaggtgtgttctgactatatgaacgttgtgctggatcgaaggaaatatgtattcgtttgattcttctagtgatggctgaggagatagaggagatgtttgagccaggtagattggcaacgttgaagatgacatgccttctctggtggacgaatcactcgatcgaagcgcttgaggtcggatgtgatggaggtagagatggtgttaatcgcatcttgttcgaggtttcgctcgtggccgagccctgaaccaccgacggacgttcttattctcgtatagtcaatagacaaatatcaatcgagtgatcagatacataatatatagagacggtgaataattgaataaaggaataaaaagagagatctaaacaacgttaaagagtgagaaatgagaaacagccatgataacaaacaaaacatgaacgaagagtgaaaaaaaaaaccgaagaaaattacaggagtgagcgagtgtgcgggaaagagtgagggatgaaagcacgatataagcagatagataagcaaacatatagatatacgacgatgcatgaaggaaagactgagaagagaggaaggcgaagaagaattagttcgccctagctcaatgatgaatggactgtaaaccttcgtcacagccatctactccaaggtaaatccccttgccggtcttcatcgaacggggcacaaaggcaacggaggtccgtacagacttgtttgattggccgagaaaacctcttctaggccgggcgatcgccattgggggcatcacgtcgtctggggttggtggcagcgaggacaatctggaaacttgcggctgaggcagatgaaaatacttcgggacggccgggatggatacgagagtgggtatggtagcgtctgtggtctcgctagcttcgattccgttgtcgtctgagcctaggacaaaaatgggaacggcctttcgtttaactcttcctttttcagaggcaacctttctcagcccgtctacacgggacctggctgccgattgcagaacctcggctgcgagtctgagctctctgagctctttgagtccgaagagggtggaaggtggtgaactcggccggcgctgaaggtaggaaaacgtctgagttttcggtttcagcttcgactctttagtcaacagtggtgagacgggagaaggaaagggtaacgtcgatgaggaagcaccgtcaatggaaaattggttggtcggaatgtgaatcaaaggaagagaggcagagaaaagggcgtgggcagaagagatcgaggcaggagcgggagagggataagagggataaggggggtaagaggaataagaggagtaagaggggaagggagacaatattgacgccgagggagagggtgaacagtcgaccgagggctttacagaatcccgacaggggtacctgggcccaggggaagaatctctggacgatgatgatgatgatgatggtcggcctgagccaaacctgaggaggccgaaggacctttttggtttttcgaccgtctggggcgtttttgagggctcgcccgggaagtgtggagtatcatccttaagactgtcggcaccaaattctgtgggcaaaacggcacctggaagttctgaagagtgatcagtccatcttgaggatctaacatgttggcctcttcggtgaaccgagccaatggatgaggtcgaaggagatcgggcaatggagacagaatcatcggcttgttcgagagaggacaagctactttgggagtcgcatctagagagtgcaggagtagaaggagtggaaaatgaagaagaagtccgagggctagcgatagtagcaaggcttgcttgtcgacgagaccgttgaagagactgtccgaagattctttcgaccgatatattatcctcatcgtcatcttccagactaatgtcctcttcagcctcttctgcatctcggaaacggacagtcgaggagatcagatcatcttgaatctcccaagcaatctctgagctataggcaccggtgatgtcaaagagacctggaggtgtttggcggggaaggtcttccgtcagaggacctggactgacgggcgaagagggcgagagcgaggatcgatcaaagaccgaagggaagtcaaccgggatcatcactggcttccgagggatcctcttagtcgaggcgacacatgcagctgtgaaaggcatggtgtaaggaagaagagaaataagaggcctgtgcacggagtgagcgaaagatgatgggaagcacgtatcagctctttgatgtcaaaaaaaaggatgaagaattctgtgtagtcttcttcttctagaaacaggaaacgaacgtacaactggagctttgttcgattctatctgagcaggttgcgcaagcacaataagtgaaaagcaggaaagcaaaaaggggagttgggttccggttaagagttcggaaagaagggaaggaataggaaagcggtctagccgacggagggaaagcaagaagggtgcgcgagtgaacccagaaggaaagaagggacaagcaaaagaaaaaaacacaaagaaggttgggggagtaggtgcgagcgtgataagggaaaagaaaacagaacagcaggaaagaagtcgaagagaaagaggaaaaatctaatgtgcaaccttttgaattctttctttttggggttgatgaaaagatcgagaaggaaagaatgcaatacatacaaagtagaacgcatgcacggaaggcaagccaccaagagaactcacatttcattagaggatattctccgtaccgatctccccggctgggggtttgctgagcgagagggatcgatcgtcaaggtctcggaggagggagatagtgagggacaaatggcacatatgtttggttcctcgcgatctgatgcctgtccggtgaattgtttcagcatgcgtctacactgcggaacttgccggtcaatcgccggacatcttgcctcctatccctctccgcgtctctaaccgtgacggtgtcacggttgagcaaaccggctcataggttttgtcagcgagcttatttctctgcctctctgcctctgcctctgtctgtgtggccttctcttttcacacccgcgccgtctcagccttcctccttctctcttggccgttgctctgaaaattttgctgtatagccagctgcgctactgccatatggccaatgtctttcccatctgcccttgtgtcatctgccctactatcaacatgctgacgcgtagatgttatatatctcactcactttcagccctttgagcctctctggcgacaccggagccaaagaaaaatacagaaatcatttgctcgacatactgccttgtcccttactgcatttgttcagattgcccgcctgggatggttccctctctttgatcggggtgatcatctcgctttcttacccggctcgttcttcatgctccgagaccgcttggtcctgtctctctatccctccatccttcccttcccttcctccgtccacctgtcataacttctgttctctttcgtgctttcttcatttgtccgtattccttctcgcttccttccgttgatcgccttcatatcttgtcccgccgtatcgtttgtgacacaacctgttctattcctcttcgtcaggatcagtctatccatcctaccactgtcttcaaagttaactcatggatctgaccagtttctcgtttcctcttgctttcttattgtaatccgataagcatcgcttagcttttcttgttctctctcatatcctcatggtcgtcttgactttccggtctttacgcttttgttcttgttcaaatacatagaatacaaacatatatatcgaacaatacgaacagaacaatcgacagagaagttttcgaggcggactataaacgatgaaacaacaaaatagatgattgtcagcaatgaaatcgaagaaaaagattttttcaagacaaaatagaagaagccaggaaggacgaaatcagaggtgtcgagttaagtttgagatgacggctttttgtcctctgcggttgttcggaacaggtctgagaagtatttcttcattgaacgttccttcctggccttttcttcctgtcttctcttgtctttctgtcttcagtcaactaacctagttcagaagcactgacaaccaactccaaaatacggacatattaatctaaggtttaaaaaaaaaacattcctagaacaagcaaaaacggagtcagtgttgtactttttcgttctgcaagacacataagacaagaggagacaaggtggggcaggtttcagataggggtgaaagactaatttcgatgatatgattcagcagttccttagtagaggagtctgattgaactatgcatttatgactatcatcacgagatgccaagctaagagaggagatggagggcggaaggatatgggcatgtaaatggcaatcagtgaaaacactcacaaatcaattagcgatctattattcctttatccccctgtgtctttcttgaagctttgcttgatagacaaaggaataaaagaatcagtccaaacgaaagaaataattcgaacaaatagagaaaaaaaagggatgtaggcgtgacttaagcatattccaaggtcacgtgtaaagtttaaactccgactgtcatgatctgggttcagagggtaacggataagttacgaagggtgtaaccagacgggaatgtggctagcaggggggaggaagttcaggctctctggcttagtgactttgacgagggcgcaaagcaaaaagagtgggagaacaagattgatataacactgagaacaagggtaatagggagtcagggagtgacaagggaatgacaaagaattcaggcttgagaagctatactatcggtggtaaaggagacccgtcttacatattatcctcagactccaacgattaagcataagagaacggatcatagaaggtgctagaagcacatgcgctaccagactatatgcctccatgttgatgcaatgagaaagcataaggaataacgaggcaggaggagaactagaagtaaaggaaggttaccagggtgtaacttcgggtcacattcctgacattgacactcactatagatgcaaccgttcctccacttatataagttttatgtgatcaatagcttacctcatgagatacaggcgtcatcactatctcctctctttaccccgcccgcccccgaagtgggtgttctttcgtatcggcaatcctttggctctttctcttcattctgacctcttcgtcctcctctgacccaaccatcaccaccccactgcacactatcgcacaccactatgacagagccaacggtgacaaagccgccgaacctcaaactactgttgatcggaaactcctcggttggaaagtcctccctccttctcagattcaccgatgacgattttctaaacgaagacgagactacggccaccatcggcgtcgacttgtatgtgctacctttcccctttatcttggtttatctcgtccttctctatctggacattcgactgatctttgcttttggtgcttcattcctcaatcccactttgactctcactcttcatctggtagccgagtaaagtcaatagaatctgaaggtgtcaagtacaagctcagtatatgggtttgtccttgtcgttctttctttttcttgtcttttgtgccagggctcatgtttgtcttttgtcgctgggatgctctcttattttcttaaatactgacctcctcaggatacagcaggttcatcttactctctcacattttcgaggttgagtcggaccatagattgaatgctgaactgacaacctcattggtcatcgacttgtgcctggaaatgcgtaggacaggagcgattccgcacgttgacatcaagttattatagaggcgcccaaggtgtcattctaggcaagccttctttacatgttctctatgcgcttccggtgtcacctgcttacccatctttctttactcttgacaatcttctctactctttctacactcgtcttatcctcaacgttcctttcttaactcggcgtcccttcttacttttcatattccatcgcaactcatgttcggcagtttatgatgtctcttccagagcaactttcgaagagctttctcgttggtttcatgagctcgacagttacaccaaccctgaaatcgcccggatgatcgttggtaacaaagtggacaaggtcagtctcagcgactctttccaaaaatgaccttgttgctaccaaatgagaggtaaagaacactcttggatgttgactccctgaatttctccctacatcatgttacccatcacaggaattttcaagacaagtcaccactgccgagggaaaagcgtttgcagatcggatgaattgccagtttataggtttgttcaggctcggcccgtattcttctccggacccttctcggctaggttggctcgtagatatggttttgactaacatagcttcctctcttgaactttgactatatggtattcccgatgatatctatcttcttctctacttagaatgttctgctaagactagacaaggtgtaaaaacggcattcgccaccctcgttgctcagattgtctcgactccatcattatttgccaaggacagctcggtcagcttgactgaatcaaaacctaaccaaacgatcacgcttgaagagactccggatgcggacgcgcaaggcggttggggtctcggtggaggatgttcgtgttagacagattcttccgtcattcccctctttgctttcatctttcacctatcaccagggcttgtgaattggcagaaagacaggtcttgtttcttcgtttccttcctatcttataggtttctcttgctcgtcttgctttctacttatttacattctcccatacactctctactcggcctttgtttctactatatacatacacccttcctcccccctccctttccaaatcaccaacttgtcactcttttgtctcttccactcttgtatatcttttaattttttaatcataccttctgataccatgtctctttctctcgccctgtcaatgttcagctttgacttttctcccctgctgcgctgaattcgatcgttcgacgcatgtgtaattttatttatggatctacaaatccacaagccagaaagatcaacacatcacctcctttccaaaataagagaacttccatcttgcggctcataaacttcgactgcagtaatcagacccaatcatggcaagacctttcctacctatgatcatatttcatggtatcaagatctttgaatttgacaaccgttcaccatctcttctcacttctcgctccgatagacagcctacggagccggtatggagatcctttcggggatgaccgacgatcagagatgtcgtgttctggacgttggatgtggaaaggtgagaatgaagcgtactggtatcagtgtgagctatgggtcgggccgatcccatttgactgaccagttggtttgaaatccttcttttctttccttttttttccccttggcaatgtcgatgtcatcgggttgatcgaccaaagggtgaatggtacgtcttatgtcatcctgaaataccaaaatccttacttcgagtatccgttgtacatcaaatagctcaaggagagctgaaagaaggaaggaaataggcaaacgaaagagagaaaagctgatgagtatccctgtgcttggatttacacaggctcgaagaaatggcttctcggtttaaacagccaacttacacagggataggtaagtaccagggttaaacacgcttttttttaataggcaaacaacccatgtcgttttatctttctttcggctttggcttttcagacatcttgcctagaccggtcgttttaccgacggtggtccattacgtccagtgtgtatcttattcggtctttccgcgaagcagatgatgaaatcagcaggcgcagaaggtctaaaaatatgttcctcccccttgcctgtttgctttgaacaaataaccgacgattctatccagagctgaccgaacagcactccctctaccctttcctaacaatcattttctcttcgttcattgccgaaaactattttcctcactcgaaggcgaggatgtataccctatgcttttaagtgaatgtgtgagagtcttggctccgggtgggatgattgcgttcatagaaggccgaaacgcgcaaacgatacaatccaattcgggacgtccggttgaccggttgaaggaagtgatggttcgtgccgatgataaagacacgttcacccatgaattcagcatcggatggctactgatcgcgagctattctctacaattggatatgcacttgatacgtcggatgacgacgtttccatacaaatgaaatcagatcgagaagttaaggaaagatatgctcatccgaaaaggcctggatacggctgacctgctgatgtctctaccaaaactgatgagggacacagggctggggaggatccaggtggaaagcctccgaccggtcaaaagaaatgaaaacatacaaagtaagtcggcgtagggtttgtgtggcaaggaaagcccttgtaaacaaaggacctctttttagtaaatcatgctgttttgattttcatagactaaagaaggtatggcttgcggttaatgaactcaaagggcttacagttgacgactcattcggcgctctcgcctacgacctggatggcaattcccaagacgcctctgccactgacctgaccgtgttctctggatggaaacaaaaccaagccgcatccccagagatattgaaacgagaaccaatcaactgatcgattagatctggactgttatcaattgtttgtactttgggccctgaagggaggtggcacggaaagagaagaagcatgtatttgataccactcagaggggtatgcatacgcttttcatggatccctctttcctcggacactttacacatgctatgctctccttgtcctatctttgccccttttctttcttcctctcaactttgcgtcttccgttcatccggtcgcttgctctacctttcttgcgtcaggtctgattttctcaactctgcccaaggggcgacccagcgtagacctggtctgaatagaagacggataggtgtatgtgaggatctatgcgcgtgttcgtctgaaacatccaactctatacatcctctttcccccttatatccaacccgtctgctggctgataacaaagaagcaggaaagtacgaggatgtaatggtgcattgtttcgaatagaccagggttcatatccgttcctcgccctggatcaacatgatatgccctggatccatctcatgtcattattctcttccgcctttccgttgttcctcttctttcttcttcttctcttctttcttctctttcttccctctctctccctcttcccttcttgatcttctctcttcggcaagatcaatatcatctactgaccaaaactgacattggaatcaccattgtttgtgccatcatgtctcaccgtcatccctcagccttacacccttcatacgctatgcctcactctttctcatcatcatcagctgatacctgtcaccatccgtcagggtcttgttattctcagggcacatgttctacgtaccatgcacattctcccccacgcgatgctcctcgaaatgtcggctctgttcatactgcgaagaatcctcaattcgtgtcagggcgcaagcgtggaaggagcatcgagaaggatcatatggtccttgagcgacccatgtttgatcctagaccgactagccatcgcagaaccgtctcgatgaacatgtctgggagaccttccaacacagcatcgcttcccgtagaaccccatcctctctggctctcgagtgaattagcgagaacaagcccaccaatgtttgcctatccattcatgggttgtcttcttcgatcaccgctgccagcgccccctccgccttcctctcgtcggtcgtcttctcaccgagaatctctgtctccgactctacgaatagccggatcatcaccaaaggatcgtgtcgttccaggttcaagccagatgagcgcattagttcaaagggaatattgccagagcgttaatccagggcagagtcctgagcggtatacggtctatgagaggagccgaacctcggttcctggattggtggatttcacaaacacgtacgcgaccctgattttgcctgaactttcaatctctttctttcgagcttcaccctgaactcacatttagattttaactccatgtcgatgcctatgaacctctgcagcgcgcctcgtatggtgtctggtcttcccaaggatccgagtcgtattccaaccaacttagatccccatcaaccatacccttctcctccaaaatctcggtcggatcgttcaagcgcgcatacatcaagccattctccacagtcgtctaccactactgtttctcgatcttctcccgtctttgtaatgagtccaggagacatacctctacctctcccgtccccctctcgacgtcaacctgtcagcgttttgattcattctcgttctcttgagaatcatctttcaccgaacttcaagagaaggcgaaccacttctcaaactagccctcctcattcctcttccagttcaatgtcctccactcgcgccaaccgacctctcgcccctgatcgcacctcccgaaaacccaacaagcaccgggcatttcctcctttgagacctcgttcgcctctcatagcaaaacctggattgttcttggcggaatttcctgtaccgtctccttacaaggcgagcatcccggataaagatatctacccttttccaccggcagttttgcctcaagaacacaaagttacgaccgagcgcgtcgttgatcatcgacatgaatactctttacctcaaattaatcaaacccgacaacgaacactgtccagttcgaaaggacacgcaaacataagcgtcggatcgctggatttgacgaaggggaaccggcctgaacatcagtcacctcaagatgtgtgcttgccgagtttcgaattgcttctaaacggcatccaagagatgcggatgagagaacaatctggagaatcaacggggatgaccatcatggacgcagtctagtgacgatatctggagaattttgtctctttggattttgtatgtatgcatgcacataagagggggaaggattaatggaggagtaaccgaggtctatgtattttgtgttcttccctttgcttcctctggctttctttattttttgtcatttctggggtttgcatgaattaacggtttgtacaatatatatatacacatacacaatttatgtattcaattcatgttgtgatttgatgagtcggcgatgccagatgtgcaccaggaaagtaacggaatcgaaaacggggttgatctcttgctcgtcggtttaatctagccaaacgcttctcgctaccgaagaatgaggaagagaaagaggggagagaaaaagattgaagaaaaaaaaaagaaaaaagaaaagaaaaagcaaaaacaaaaaaaggagaaatttgcgggtacattgaacaagagttttggtttattgtccgtactgattttgatctagctcctaatactccaaaatcttatagcgccagccgaattatgatcgagatttcagcgaccaaaacgagcactgttgatgaatctatgtctcaatgacacgtggaactattgttatctttgacaaaaagaaagattatgaggatttcttgctatgctaatctgtgttcggtctcaagaagcgtaagtctgtcttgtacaagataaatccatccagatggaaaggagacaacaagaaaggcaagggagaaaagatactgatggctcggatacatcagggtgagagaaagcatacggatggcaatgtgaatatgggcatgggcataggaagagcaatcgaacgagattcagagaggaacaagtgtggaaagtccttaaaaatagacggtcaaggtgatgaatgggcaaagacacaaaagtaagtttggtggttcgcagagaaaataccctgaaactgtatacatgaagaatgcaagtacttaccgagatgaacagcttgtttagcgagtctcgtcctgcgcgtcataagagctgtcgatggcacccatcaaaagcttcacgagccagactgtatattcaagcatgtgtttcaagtatagatccgctacttagcaaactggccaaacatacacaaaaatggcaataagatgacatacgctcaggggtcaagtccaagtttgactttcgcttcatctcgtctgcctcggattcatagttggatgtgcaatcgaccagaccaccgatcgcagggtgtgtatctagctcagccaagaaagcttgggctttgagatcatttccaacctgggcgaactgcagagagagggcatccggtccgtatcgagttctcttcaactcgttgtttgcattctggatcactctgaaaatctgctccttaggttctccagcaggtgttccatctgtgatggcaatgatgagaacaggcttctggagctggttagcgcgagcgggaccaagaaccagaggttgcaaaatcttctggtcgagagacgttccgagtggggtaagtccagaatatcggatttggcctaggagctgcaatgcgccctgctccgaattgatattgtttccctggacctgggagttgaggaaccgaacctggattccatcttgatcaaacaagctagcagccatagcaactctagacaagatcaacttgagatcgtctattcgttctcctccctcctcgaaggccatgcttccagaatcgtcgattaacaagatagtgtcaaacaacgagagcttcacaagatccacagccaactctttgggcattttccattgagaagcgatggtttcgatggcaccgctttgagcaacccgttgggcgacttgtcccagacttccaggagggtaaaaagcagccaggttttgatcttgcacacattgttgcagaacactttcgaccattctgggatccaacgatgaccctcccgcttggtgggactgttgttgagaaggaggttgtccatattgttgttgctggggaggttgtccatattgttgttgctggggaggttgtccgtactgctggggctgattctgtttctgctgttgaggttgacccccttgtcctggataggttgactgagggggaggaggaggacctccctgctgctgagagggttgtcctccaggctgaccttgagaggacgcgttgcccccataaggagattgttgttgtccttgactgatggagcgagatatatgatatcagcgtttaaagtgacagtgaagcagatggtctcaaggaatgacgacgtacctaggaggggctccatatggcgagccgtatgcctgttgtcctccctgctgaccgtattgtctaaagaggcatggtgaagagcattcagttcggaggtaggaagaacaagaagaagaagaagaagaagaagaagaaaaccaagattgcaggagatcagcttcaaaccgaagcgattctatatatttagagatacacggagaacaaaattacccagactgttgacctccgggaggaccaggaggagccgcatactgctgctgttgttgcggaggaggagcgccgtaggaaggagcagcccctccaggagcagctgcctgagcggcgttggcggcggcgagtttcgaagcaagtcctgtaaagaccgcgtattcgtcaggcgacacacatgatttcagaccgaacacacaccagagacatatacgtacccattgtgatatcaattaaagagaagaagcaagaggtgagaaacagacgatgatgatggtggtaggtaagagaagaaagatgtacaagatggcgatgcgacgagatgagatgaaatgagcgagggtgggaatggaagaaagcggtgcaaggctctcatcggttttgccaagccaattgatgacgtaagcgcaattttgccggacattccgtcctcactcttgtcgtatcactccatcttgccagacgctctgctggtagtttctgtggccgagctctgtcttcgcatactgaacatgctgtgacctgggtgtcttctcagaatgttatcaagtcgttacgatacattccttcagttgtcatgttgttgagttcacaaaatgtagttctacgtatatgtcgcctttgcttgagttgtatttgtagtatgcgtgtcaatcgaatgtctatctccgacatagacaccggctcatggatagagctcaaatatgagccggtgatctagatattcattggagcatctatcaggattcttagcaagaccacaacccaataagatgctgcgctagaatacagaggaggacgagagaccaatgagaggataaatcgccatctgacgaaagctgcatcactatgtatcgatcttaacctatgctggtgcattccttcacctcggcgtgctcgccctatcagaagagctgacttcatgggatatctcatctgggatgagattggttttgtctggcatgtggaacatatgtgtcgagtatccgtcgaaggttggtcatatatatcttagcttaggacctagtacttttgaacagatataccgatgcatgtacttctttttgaaacactcaagaagggaataataggattcacaaacaaacatgccagcgatagattcgtatttgactataaagagtgaattcgatcgaaccgttatggtccacaaaggccctgaatctagctcattctcctttgataccttgcacaagtaacacaaatgaataacgtagtattgaatgacatgtagttatcttgatttgatgatgacaaggaccgtatacccaaagaaaaagaaaattactttgacgggaatatatagactaaagcttcgctcgctcaccggacttggactcctcatcctgctttttgagcccaaacgtgcgttccgccctggcctcggcctgatcgcccatgaggggcgggaaatgcgagtgtgcactaaccctgatatcgctccaaatgtcctgtttgatcgagccccatactcggccagcactctttggtccgtagcgatcggaaagtgattgagcggcacccatgagtccctcatccgatggttcggagagcacgtcaactacgccatgggcatagagttcggacgaagtgaaccggtggccgagcagagtgtctctaagaacacgtgcagggacgcggccacgaagggcagtagcaaaaagaacctggacacaacgagtgttttgagagtcagttcgcgtcacacacccatacacacagtgacgagaggaatatcagggcaataatgaacgaacagggaaaggtgcgccgaaatcaatctgaatgatccggcatgagcataattagtgctacagctcttctagtacgtatcccgagccagccacatgagagttgaccacgaacctcattcatacaacaccagaactttcgaccggctgcctcttttttcatgaccctgaaatcacacgcaagtgcaatcatatagcctccagcaaaggcatggccattgatggctgcgatcgtgacgagaggaaatgtcaacaaacgaaggtagagcggattgaacacggctaggttgaatgagtgatcgtcggcgtaacaggagctacaaatcagttgatgagccgggatagcgagaaggtagcaatgagacctaacgaactcgggtgaaaatccggattcttgacagagttttcaaagtctagtcctgtatcattgatgtgtcccagagaggtagaccggtttcagttaactcgagattcaatgaaagcatgaccttcagctattgcgcataccattgctgaaaaacttctcgccctccccacgaacgatcacggcaccaccgacttgattcttgattggtttgtccgtgccttgctcccgtcgacgtacccaccaatctttctcaattgcgttcagtgcttcgccaaactcggccaggagcgactcagtcaaccggtgatccggcggggacgagagcgtgagaacgtaagttggattcaagtttggagacgacgatgggggtgtagatggaaaggtgattttaacaagagacatacttgatagagtatatacaagatggatagtggatggttggtagatcaggatgcgagatccaatctccatctactccgcttagaatgttgaccgagtgccgacgacgagaatgagaagcatggttacgatctattaacagtaaatgtctacaacccgccacgtggtttacacaacgactgtatggctggtctaggcctcctacgtagtgatgacctcattaaccgaagtccatgtattatgtaatcggcgcgcggttcctttttcacttttttcttttttttttctttctccacattccgtaaaaccactaactgtttgtctggttctttcgtctatcctcttcaacgttcatccacacagatctcttacctttctttacgcttctataactacccttctcatagtttaacgagaacctattcgatatgcccgacgctcctgaacaagaacgatcattgatcgtggtgtcgaaccgattgcctgttaccatctcaaaagatgcgtcgggagaataccacttcaagatgtcatctggtggcttggtctctgccttgtcgggttgcaagaagaccatgaaattcacttggagttcgtcccctcgttctcattcctctcaaacttgctttcctcctttatgaatagcataaagagcatcaaagaacataaactcatcgcatcgttcaacattgttcatttctcttttggtctcttaaaacgttctacctgcaatccttcttacacgggtctcatctcttccgtctcttctcggactcttaagtcggatggcccggtcttgagattcctctgaaagacagagctcacgtcaacaagcgccttatggacgaatttcagtgccaggctgtgtacttgagcgatgatgtggctgacaaacattacaagtacgcctctttgttgaaggacgcttcaaaacgtgtgcgtgttctaaccgatgaatatatattctctttctcagtggtttctccaattctatcctctggcctctcttccactaccaccctggagagatgaactttgatgagtctcattggttggcttaccgagccgtcaatttaactttcgccaaagttgtactttctctcgctcgaaagggagatatgatctgggttcaggattatcatttgatgcttcttccccttctgctccgagggctcatcgctgaccgcagcgacgagtcggctggagagatcaccaagactgagctcggacgagtcgtcgagggtatcgatgagggcaagtctgaagaaactgcgatggaggaccaaggagaaaggccaggtacgagtgatgagaagctggaggagaacgatgtgaagattggattcttcttggtaagtagattttcattagcatgtcggtataaacacagtgatgacatctgatggcgccttggttcgacaacatgcagcataccccattcccttcgtcagaaatctatcggttcgttcgtttccttccctctgtaaaattgtaatacttcctcagggtcacttacctgcgttcatatctttgatcgcagaatccttcctgtccgacgggagattttactcggtattcttcactgtgatctcatcgggttccatacttacgactatgcccgacacttcctctcgtcttgcactcgaattcttggtcttccaacaatgcccaacggagttcagatggacggccggtatgcccatgttggaaccttccccatcgggattgaacccaaccagttccacgaggtacgcctctcattgctcaacttttcacccatttgatcaactttactcacaacacaatctttctcttgccatattttatttctcgcctgatgaaatctgctcgaattacagggtttgcaaaagccttcggttcagaaacggattaaggaactcgagcaccgatttgagggtgttaagttgatcgttggtgtagatcgattggactacatcaaaggagttccccagaagttgcacgctctcgagatcttcttgactgagcacccagagtggatcggaaaggtatcgtcgatctacattttcatttcattcagagataagatattgttgcttctttggtttggagctaacctaagtatccggcatgatctggttgcctcaggttgttctcgtacaactggccgtcccttcgagacaagatgtggaagagtatcaaaacttgcgtgcggtggtgaacgagctcgtcggtcgaatcaacggtcggttcggaactgtcgagtttatgccaatccacttcatgcacaagagtgtgcccatggatgagctgacggcgatgtacgccgtggctgatgcttgcttggtgacgagtacgcgagatggtatgaacctggtaggttatataacattccttcctttgtttcctctcttttttccattgatgatagaactgacctgaatgaaccgttattctgaatcaatcgtgtaggtttcgtacgagtacatcgctactcaggccgagcgacacggttcgatgattctttctgagtttgccggtgctgctcagagcttgaacggatcactcatcatcaacccttgtaagtgtttcaatccttacaaatagagtatacgtgaccaaatacagatgttgaaagagagtctatgaccgaatcattctaggggacgttcattcgaccgccaatactatccacgaggcgatgatcatggatcccgaaactcgaaaggctaactacaacaagctgagcaaagttcgttatctcaacttccccatttgtctggttgaggttccccatacttactctattgttctgtttcaacagtacgtcaacaagtacacggcagagcattggggaacgactttcgtcagggagctcaccaaagtcagcgagaaggcacaagcttctaaaccggatctggttcagaagtttgcagataccaagatctaaaacgtacatcgatatacctgcgtttgcacatacacgctttgtattcctgcccgtttccgttgtttacctcctacaaacgctgatattctatattccttctcgatctgtttccattttgactacccattggactgtggcctttttcctctttttctcctacaatgtatctttgccgcaggctcagcctaattgagccgattcctttttcatccggttcttctcatcttaatctggtatttgataaaatatatcgactgatctctatgtcctgatctatgcgtcaattagataacttctctcagaaatttgaaggtgtggaaggagatgtaagggctcgtgaacggttgtgtcagtcatgaaggcttgtaaagcgatctgtagacattttacctcctagacaagaatcgtccatccaagattcgtcgagaggacttctattgtgttggtcggtctctagtccaatctcttcttccctttttttgtttcacctcacggaactcgaaagtgatcatctgcagacgatgatcctcgacttgcacgattagaaactttagtcgagttaacgaaagaaggacgtcgagatcttcctactgaaaatcaagtatcgagtcaccagttagcaggtgccaggaactgaggttcagccgagcgctaaaaagatccggatgatgtctccgttcataaacggtccctccgtatggatgaacccagcttacgggtagattagaaacaattgtcgtcaagccctgtttcctgaacaatctatcttcttcgagaagaatttgagtataccttatgcggatcggagcccgaaacaagtataacagtcatctcttcaatcagtttatgccagtaaggggatttaagaagattcggtgaacctttataagctgcatgatagatggtatggacgtccaaacaccagagagtaaccgaaacacaaatgagaacaatgacgagaagatagatggaaaggaagaagttcagtcggacgcgtcgaagtagaaaaagtcgcgtgctgataataacaatcgagtgtttcattacctgtactcgacccatcctctccgtctccctcaccgctttgtcatgtctacagaaacatcggggaagcttccagttacatcgataacaccggaatatgaacctcagatatcagactcccctctgccgcctttgacagaagcacaacagttggaagtcgtaactgaactgatgggttacccgcccagaagggttctttgggaaatcgtaggtcacccacgtatctcatgtcctatatactattgagaagatattgatcatcaagatcaaggaaataaactacagcacgagactgcaaacgccgagatattctctcttctcgactctatcgagacttatcttcagagccgggacgtcgctcccgatcccttacccgcaacgttcaacgcgcctccaactacgaagccatcgtcgcggagaccggcccctcctccgttaccatacccgacaccggatcgactcgagcaagagctcgatggaggattacattcgatggaaactctgctaaccacacacatggatgcggcgatggaaaaactacagtcgtggtgctaccgaaacgcgttcaccgttggagaattcggaggtgtggttatcgtgagttttgaaatttcttctacggaatgagaagaaaacactagagggcgaagttgaatccaactctgtttttcttcgttttgctgtggctttggagcaactgtagcctgcacatgagggtctagattttctaaggggtaagtacatatccgagcttccggaaggagagaaaacgctccaggctagacttgcagcccttcgcacccaagtcgagcaggtacgttcttctgttctcaatttggcctgcactcggtccatactccttcttgccttctgattagctctcccaactacttgaacgccagaaacggaagatgaaagcgctcctcgttaaagcgcaggccaagtcggcaaggtcactggctcgagcagaatccctcaagaaggatcttcaattcatttctgatttggcagccaagtatgcccgtacgcgaatctttccttttgatatagttttctggacttcattatcggccatgatggagttatctgaattaagatcttcttctatttgctctttacctctatttgctcgatgaatgacgatacagtcaaccctttaccagaaacactttcacgtctgatgacttccctccaaacgctgcagaatcacgcatccgcccttccaccactcccgacggaaccaccttctgcgcacacgctatctcaatccgatctggtcatccagcatccgtctgacttgactcgagcaggttatctctctcgagtagctctgagagcgctacccgccgacgtggacacaaagtcaaggagggaagatgagggaacaggaaagttacgagagatggagaggagtttgaatgcaataggagggctcgaggggagtcgagaccaagctgaagtcgacatggaggaatgactagttgacagatacgatcgagacgcgtaggcaagggagagacgaatgccactagctcttccccgagacgggattagaaccctggatcgcgactatccgtacgattggcgagcgagcattcgtgagagcctgtcaggaaaatatacccaatacttattattatgataacgacgcccatacaacccttcggtttgaaaatagcatgcagtcttcgatgtgagaagcaagggtaggatacatgcaggaaagtagagaaagaagggtggattgacaaatattataccgacttgcaacagcacagagtcaggaggtccaacgcaaaccattgttcaggaaagaaggcacgtggatccacggcatcagagagcaagctcttcttcgcacgaccaatcgctccgaattttaacctagggtcgagagatctgctccatgactctgtgacggtgggggttgaactgtctcaggttgattttttaatttgtccttccaggccttccatgccaacagcccctcacccatctctttcttccgtttacatccgtccggctcgttgtcgtctttggcccatgcacggattcgctcctcggcctcggcgtaggtcacccattgacgtttacgctgagtatcctcaaggaaatggatagagagggaaattacaggaaggtgaaagtaatgatagatcgtcttgtgatcctggttgacgtgaattgcggtcggaggaatctcgaaagggagggatacaacaccggctggtcgaatagtgcatgacgacagtcagagagaagaaaagagatatgattaggtgagtatgtgagggtaccaccgaaggactcagatcgaggacataccttcctcccgtgcttctcgtcgagcagcctcgcctaagctctctccttcttcccatcctcctttaggcactattgaaagaaaaaaaagtcaatacatttgtacgttgtgggttcgatagatgaggccaaaaaagcaggaaaacagctggctagactatcaagcacgtacagatccactttgtcggatgttttctagaggtcaccatgagaatccgatcagtcgcctgatcataagggatggccacacagacggttcggacctttttccgaggatgtgatggaggaggtatgctcatttgtgatactgatgttgatggaatgaagatgaagacgatggatagaataaaactgatgggaaggtgaggagacgatgagactcatctcgcttccttctatccctccaaccatcgtctccgacaacgttgtatctcattcaatcttgtcatattttcatctttcactcatatctcgtccacttctatacatctcataatgcctcctaaaagacaagcaagacctgtcgacccttcattacttcctgccggaagttttgaccatcttcaaccagatcagattcagcaagattctggcaaatatcttcaaccagccacccattatcaacagacctttgagtctggtactcagtccaaccttcatccgtcgtacggtcaagatcaacagtatcagactagcaacatatcgccttacagcacgcctaatgtaggccatgatgaaggcgcctatcagactggcacgttcactcaacctgccacgtcggcagcggcgtcagcaacagcttcgatttatcctcctcaatctggatccgaccaggcgctctatactcaacccatcccagctgagcacatccaacagccatcccacagtacaggaattccttacaaaggacccaagatcaatcccgcgtttgtgccctcgcctgtaacagttcgacaagttgaccagaacctctggaagcaggatgatggagtttttgttagtggatcaggaatggctatgccacctttgagtactacggatgttcgagttgttgaccatggtaggtagctcttcaatcgttgattaatgtttactatgtagcgaagctgatatctgattatatcgagcatcgcaacaggtaattcgactccagcccatcttcgtctaacaacatactctattccagcgacatcggacctggctcaaacctcacatgtaccgctcgggttgattgttcaacccttcgctcgacttgctcctggggagtatcctgtcccactggcaacatttgggaacaaaggtccagggcgatgtagggtctgtagagcgtacatcaatgtctggtgccgatggattcaaaatggagagaagtgggtctgtaacctatgtgaaggggtcaacgaaggcgagatactcaatgccttgcttgttcctattcagactgctctttgtaacacactctaatctcataaacttaatatgctctggatacagtttatcaagaagactactgtcgacttgacggcatgggtcatcgagaggatatccaagaccacccagagcttcttcacgggacggtcgacttggaggttccatccgaatattacttccccaatcttccacctacatcagagaccgatctgaatgctattcattcgtccaagcactctaaaaagcctgacctgaccaccactgcgcaaccaaatcagcagagccaatcgtcaactgaatcgtacggcgctaacacgtggtcaagtacattacctgaatcgatccgacctgactttggtaaagcgccaacgggcctactggccaacttgacgctaggcgatcaggatgccaaagaacttcgtcagcctagaccacttcgatacgtgtttgcattagatgtttcgtggaattcagggaaatgtggactgatcaaagaatggtgtgaaggacttcgcgaaatcctttatagtaaggcaaaggacggtgaggatgaaggcgaaggtgaagtgaggctggaagaaggatgccgggtcggaatcatgacgtttgacgagtcaatccatttctatgatttcacggttcgtcttccaacgatctttgttcttggtttgtgtcctgaatcttacaaagttcgaaaacatcaactgtaggagacacgcgagacggcccagatgcacgttgtttcagatattgatgagatgttcatgcctatcagtgaagaatcgttctttgcagatcctcgtaaatctcggtgagtacaatttaaccttgctttattcagaagctattcgcagtttcgaacatagagcctttgactgatcgtttacaacatccattatggttgcgttaatcatgagcagctctcagattgaaacgctcttaacaaaccttccttcactctttgccgagaacaacgccccaagtgcagctcttggccctgccgttcaaggatgtctgcttgctctccgctataccggaggagtcctcaacattttccaaactgcgctaccctcgattggatcaggagcacttaaaccgagagacgagatcaagatgcaaggaacagacaaagaaaagacactattcgtgcctcaagacattttctggcgaaatttggcagaggagtgtgtagatctaggagtaggagtcaatttgtttttgttcccgaatcaagctattgatgtggctactcttggtgtgttcccctcatttccatcatgtttgtttcttcacaagacttctggacagaatgttcactgatagtattctggctcaattttctcaggtgcacttcctcacacgacaggtggtgacctattctttctaccaaagtttgacccagtcagaggaggtggtaggatgagagcggctatggaacagtttgttcatcgagaaacagggtacaacgcgactcttaagatacgttgctcgactggtaggaacacttctgagcttgactttgttatacgcatcttccttgacacgaagcgctgactgattgtctaattgggttattctctcaatgtaggtcttcacgttgatcaatacttcggatcttttctccaacggtctctttacgatgttgagtttgcgtccatcgatgctgataaagccctggcggcctctattcggcatgaaggagcgctagatgaacgaaagatggcttatatccaagtcgccgtgctctatacatctcgagcaggaaaaagacttgtcagaacccttaatatacaagtagccatcacggcactcattgggaacatctatagattcggagatggagaagctacagtcgctttgctagtcaaagaaggtaagtcttccattcatgccctcacaaggaactaagtgatgaatgaggtcgttagtcgatctgatcgtgttcctatatgcttgaatacttgtatagctatgggtcagacagcctctcggatgttaccccaggtacgggaagagttgaacgaaagatgtatcaagcttcttgtcgcctataggcgacactgcgccttatcatctaggccgaatgacgtaagttctcacttctcgctttctgttttcacatggagacttgagatttcatgccagcttctgtttcggtatcatcgtctgcaaagatcgttttaccggaagcattccgaatgttgccgctttacattttggctcttcagaaaactaaggccctaaaaggtaagtcgtcaatgaatatctaaatcatgctttcttctctaatctattttattgttgatggttgcttaggtggtgtcgtcgtggctgatgttcgggtggcgtatatgcaatacctccgaacattgagtgtggcttcgacgatgatgtacctgtacccccagatgtttgctcttcacgcgctctcgccagaagatggatttgcggaggaagggagcggacgaatgaaactccctcagatgatgcggtgtggatatccatggatggaggcccatggtgcctacctactcggtcagtatcaatattctattattgactgcttgcttggcagatattgatctaagctccaatatgtcaacctcacttttttggccgccttggcgcttgtagtcaatggagaagtagctatgctctggcttggagcatatgtctccccacatctccttaatgacttgtggggcgttgatgatcttcaagatcttgatgcccgaatggtcagtcttctcgtttctcatgcatccttctgtatccaacttattctgaagtaattttctcaccatcatgcgttctctcctcgaatgcatatgactacagtcatctcttcctcggctaccgacccatctgtcaacccaggttcgcaacctgcttacccacttctcactccttgctggtaaggagctctcggtcaatatcgctcgtcaaggtatcgatgggccggagcttgaatttgccaatatgctggtagaggataccaataaccaagagatgtcttatccagactgtatgtgccaactttcctctggttgacacgttcaattctatattctgggcttcaggaaccttgctatcgcattctaatatcgttattttgttgttggtggcatttctcctgcactagacctttctttcgttcacaaaggaactcaagagcagatcagaggaaactcaacccaagaagaaggaaaagggatcatgagttggttcagtcagtcgtagtagccgttgagacgagagaatataaacatgaattgtgccattccgctttttgtgtgctaacgactgggatatcgagaacccaagatgacaaatagagcggatagatacgtgaacaagagttgacagacgtgtactgccgccgcttacataagcaagcaactatgatatctcatcatccatctacaaagaggtaaacctctcataaccaccactcaaaacaagatggatcaattgatgcaaactgcaggagcagcaggaggactaccagcgggtgtccaggccgaacaagaagctcttcggttgatttttccacctcatctccaatacaacactgtatgtagtccctacttttttcagtcgctttctcaaccctccctacgtcttatataccaccttctgagcgttcgaacgaaccacaacctgttccacttcgttcaatctcgcatggtcttttcggctttctcagaatgaattggccaactcaaagacactcgctttctgcttttccggcgcaactgccggaatcctcgggctcgaatccctcactggtatcgtttggtatctgggcacgattggttccttggctttgatgtacgcgatcatcaaatgccaaggtcggccgaatttgttcttccagaaaggatggtgggatctgctgagtattgatcaggatggattcctggcgtttttgttgtgttggattggaagttatgcggtcgttcatggtacgttccaaaggcttcctcacatccctgttcccatccttcgtcgttgtctttctcgcttgaccacaagtctgagggacgtaggctgtgagaagaagtactgatagtttgtaagaagaaccctctccttttcttaacatgctcgtgtatagtctacgattgaacagcatcaagagcatagagaagaggcatccggcttccattgtatatcggcctctgtacataattggtataaaattatctgatatcctccagttttttggcttttgagtggctcagagaataaagaagaaagaatcacttgctaccaccgtaaaaagttcggatacgacatgtctgggaaattctgactcaagagtttgtgtaggggacgctctgaagatgagatcgaaagcgatcttggactacatgcacaatcgagatcttccgatgaaatatcgtttctgcatgacataaatcttttcagaaaacttgaaccatcccacgatgttggctccctcattttgctcgttcttggtctttacagctcctcccgaattcgctcctttacatcctcaactacctcaccggccttgtcgacgcccttctgagcctgagccttcgcatcctcgaacaggtctccagcagcatcaacgatggacgccgctcgctgggtaaggaacgaggtaaggatgttggacttaatttgaagctcgtccttcttaatcgggttgagcgcggaggacgaggcaagcttggccaatctgcagataaaggatttgacaaaaaagagaaaagaatagagttaagagagatcgacgtttgtttgtacaagggcaaagaccaagaactgaaaacctacctagctttctcgttggaaatccaagttcggccattctctccaagaacatctaacttcttcaagactcggagatagtacttaacagactcctggtccttggctcgaaggaacgaaggtgcaagagactcagcactagcaatcaaggccgtgagcgaggtggcaagtgttgggttgaagaccgagccgacgatggaatccaggtctccgatcaagccagcgacgtcagagagccctcctccagcgactcgactggttccacaggctttgtttaggaactcgacaaaggcctcctcggttcgcgccttctcgtatgactctggctggaagtcgatgctcttagaaacaccggaggggaagtacttgatggtcgggtaagacttgacaccatatcggttagagaccactttgttcgtctgctcgtcggcgttcatctgggcaacaatgcactgtgaaacaaaggacggcgaaagtatgcatagtaaggatcaaacggttaaaacggagtaaacagcattgtgctcggatgggcgtacgtcaggctcattcttgaaatcggcagcaaccttctcgagaactggcttaagactcttgcagtgtccacaccagggcgcagtgaaggcgacgagagtacccttactctcgtcaagggcaaacttatcgaagttggaaacagtaagctcgagcgtggccgggggagggggagccttgaccttgctcttgattccagttttgtcagagacgctaagagagaccggagagacaacagagttcgacatgaagatcaggttgacattatgatgagagcagtgcgcacctaaagacggatacaagtacttacaaggcaacaagagaatcaagatctcgaccagaattgtaatcgaccggcttcagggaaccagcagggaaccacttgatagttgggtatcctttaacgccgaatcgagaaccggacttcttgccttctccgtcggcatcgatcttagcgatcaggacgtccttgccagagtatgtgtctgcaagctgctcataggtaggtgctgatatgatggtggaacggatggcagaaatgaccaagaaaacaaaggttgttttagagctatgcgattgaagaggagaagaaacgcgatgcaaagaaacggcgtaatatacccaagtttttgcagtgaccacaccaaggagcactgttgtgtttagagtccatcagggaagttgaaggaagggagaaaggaatttgcaaaggagaataaacatggagaacgaatgattgagtaagccgaataggttcgaatagtgaaaaatccgataccgagatggaagatgagtacgaactagaactcaacaagggcacctttggcctgaccaatgtgctgatcgaagttgtcgtcattgaggacgagaacgttagaagcgaggacgactgccggaaagaggagtaacgaaagaagtctcatgatgagagatagatgagtgagatgagagttgaagcagatgaggatggacagtaagaaggccagcgtggcaaaaaagaacaggaacggtgacgaggcaagaagctaggtcgtcatggtgacggagccctccgactagcggccatctcttgcgcacaggcccttcctctcatacgcgcacacgggttttgcctgcctgcctacacgctcgcacaggcctcctccgttcctgttcctgttcctgtccctgtttccactccttgaagcccatcatcagtattctctcttcccttctggatcttctccatcttaacttcgtctccgttcgttcggccttgccaagaagaaagcttcatagatggctccctctcgtcgagtcttctcagggagtaatagctcttgcgagcatcttgctcattcattggaatccgcttcgtcaacaaagatcctttcgagatactccaagatcgtccgttgggcgctgaaagagaaataccgtacctcggcgacctattcctcttctgaaccagcctcgattctcttcaacggagcacatcatcagaatggacatggtcgaccgaaggtctgtcttgttctctgcaaccttccgctctctttgtttctcttttctcctttttcttcttcctttctctctccctggcctcatacttgggatcctgacccacacacataaataccctaccatatcagatgagtccaccggaatgttcagagtgcagtctctcattagaccgaccgttcgcgtgtctgtcttgctcctttcttggctgttggtcatcatcgtcgtccacctcgaccggaattctcaaagggaatcacttggttgaacacctggctgcttccgatcactcgtttggtaagctttctcaatgatcctcttgtccttctctcttgggccgttcggatgctaataatgatttttttatgagcgccgtcccccttcaggtatcgattcttcgaccggccggatatattgcgctcaatgcgcagacttcgtagctcaccctttacttgagtcagaacggacccggctggcattacgggaagaggacgactgtctggcactgataagaaagggtacgtacagttgtttgtgtgtttgatgtagaggtgtggcacgtagatctaaacgctgatcgacattctccgtcatcccttccttccttcttctctccaccatataccggccctccccagcgccgtcgaaacgaaagcggcccctcgctcggtcggatcccacatttgtccctgatgagagagagcaggtcttacttctgaacgccaatcctctgccttgtagaggtcagctcccatgttgcatctattcgttctgacaccagttgaccttccttattcgcatgctttcatcatcttcctccttgagcacaggtctccgtgggttccgtaatattggccaaacttgttttctctctgtgatcctccagtcatttgttcacaacccattattaagagactactttctcgctgataggcacaacagaaccatctgtctcgctcgtcggacagctggtaagcagaaggagaccgatgtgggtgggtgtatgctctgtgagcttgacagggtgtttagtgaggttcgttcgaccagtttttcctccaatcacacttcaaaccggattcactatcttgagtacttattgttcgttggttcccttatcgactagatctattccgaggagcagacgccgttcggcccaatcacctttctatactccatgtggaactcatccgctgatttggccggatatgcccaacaagacgctcatgagtacgtcctcaagctttatgtatgatcgagtaaggagagatctctgatcccattctgcctcttgtccaaacgtaaactgtcaaacatagatttttcatcgccgctctcaatcaaatgcatactgatacccaaggacttgacagtgattgctcctgtcctattcgtgcgcatcctccccccttgctgcttcttcccaaactccttttctccctctcttgctctgtcgctgttgctcccattcaatggtaatgaccaaatgtctgtgggttctacgtttgacagatactacgttctcgggtctgctacaatctgacgtgcgatgcggctcctgtggaggaatcacctccgcctttgacccgatgcttgacatttcgcttgatctgaggaacaaagggtcagaagggaaagcggggagcgaaggaaatacgctgaaaaaatgtctggatcggtacgtccatagtcctcattgtcctttgttcatccgttgcgtttggtattgaggatcacactatgttatcaggtatacctcccctgaaagacttggccaacaatatacttgtggaaaatgcggtttggtgtcctccgttcgtatcctgcttcctccggtcgatatttgcagttttctttctgtgattgactcaacgatgttccttcacataaaccgttaactctcgtgtgtgtgttttctctggtcccattcaacgttgtccaacaggactcgaccaaacagctcagcataaaaaagattccgccagtcttgtgtttccaattcaaagtatgttgcgtctcccccgttttcgttctttgtactcatgcttatattgtctttgcgttcagtagaggtttgagcatcaacctggatctacatcaatcaaagtagaatcaccagttcgatttccctcttcgatcgatatgacaccttatctttctcaatcgatccgaacaaaattgaaaaagtcctcggccctgatccgcgggttcggagaagagatgatatatgacctagttgtggtcgtgtgccatcaaggccagctgaacaacggacactgtttgtctatttcacatcattgcgtcttgtcagagcaaagacatctgtctctgtgtatttggtctgatgctcatatgtatgtaaacatgatagacaccaactttgctcgattcagagaggagtggtactactttggtacgtctttagcattctcggttgatgtagatctcatacatcaactgtcctcgaagctgattagaaattctttaacctccaacttttttcttcttcttttcatcaacagatgatgaaaaggttgatttccttctcaaatttcgtcatttcgtctgcccttgtactgatgacggggtttctcctcgacctcacttcctattaggtcttgccgtcgaccttaggttatgcgcttggatccagagcgtacgcgaatgtcacttgtttctcgttatcttggcacacaccttgtctaatgatattcgtttcgattctcattctatgcatatattttcttcgcagctatatgcttacgtgcgtctacaatccgtccttcctaacaattttccacatgtagagcgggtctgtttctgatctcttcgtctttcttcatccacggcatctgcgtctgtttagctatgttaaacggtatctggaatatgcgccacttcgtatatgagctgccgaacgaacaatcagggtttcatctagttggctggctggatagagggatgtatcatgacggtaaactaaacgacattgcgaccgtctagttagcaaggttggactgtgcacccatctggctcctcatatcagaccgaatggttctggtagtgttttctagatcaattttatatatgccagataaagagaaagatagaagagcaatggcccgagaacaaacaggaaagaatgatcacattgaggttgtggtacataagtagagaatgggccactaaagagtggaagaaaagggtatggaaacagaacattaaaaagcgtgttccttaagttcctttttgagggagaatgggaggtgtatgtgttgagggtagaaatgagaagggagtttaatcgaaggtcatcttcttgccctcggcagggacgattcctccggttcgagctctgtggtattagggaaaggaaaggagaaaaacgggggaacatgatgtcaggaatgtctgtttgatctaagaattcagctataagtacagatagaacgtgaacttaccctccacctcggggggcacctcgacctcgtcctccacctcggcctcctcggtcaccgaaaccaccccgtcctccacctcgaccgcccctgtcaccaccgaatccacctcggcctccacctcggcctcctcgacctcctcggtcaccaccgaaaccgcctcggccacctcctccaccggcgttgtctcttggaggggcaaagtcgatcctgacgttccttccctggatgtccattccgttcacagcggtgagagcggcctgggcggaatcgatcgatccaaactcgacgtaggcgaatcccttgggagcaccggtctccctatcggtgggcatcctgacggaggcgacctgtccgtgagaagagaaggtctcccaaagagcgtcctcgttagtgtcgaacgaaaggtttccgacccaaagggtggtagccggagggttaggagctcggtcagactggtacggctttcgctcttccctgggggctcgggcaacggcgtagtcgactcggcattctcggccgtcaatctccttaccagaaagctcgtatcccttcttggaagactcaaggtcggcgaaatcgatgtaacccatacccttggatcgaccggtctctcgatccatctggattcggacagagacgatctctccacaggactcgaactcggatcggagccagtcctgatcaacattccacgaaagatttccgatccagagggtcaaggcgggggggttaccctcctgggcaacgttcgagttgtaggcggcagactggtcggcgagcttggtcttcttgaggggggcctcggcctcctcgtcagcctttcgcttgcctgtaagtgaaatgtgaagatgaagagagggagagggaggaagatgagtggaaagaacgaaatcgaaacaaaagaacgagttcgagttgaacagatagggaatcaagtcacgaaccgttgctttcagcaggcttggcctcctccttcttctcctcttcctcctcatcagaggaagactcctcctcggacgagctggactcctcagagctggaagactgtttatgatcgggtagcacaaagatgaggacagatataaagctgcctaagcataaatatgaagaggaaacgaacctcctcggcagcggcagcggcagccttcttgacgggcgaagcagccttagcggcgggcttcttctcctcctcctcgtcggaagaggactcctcctcagagctagatgactcctcagagctggactgtaattttcaagcattgacaaaacaaacatgagcttcagcttgaattcacgtgcgatcgagcttcagttcgagaacgaaacagacctcagccttcaaagtctttccgttaacctatgaaatgggaatgacaaagagaaaccaacgttaatacccgtcctctagcaactcgataggatcgaaaggatgaaggaaagatacgaacagcggcatcaacgacagtggcgacaccagcggcgacggccttagcgccggcaacaaccttggcgacgggcttctcctcctcatcagacgaagactcctcctcagaagaagaggactcctcctcagacgaggaagactcggaagaggacgaagggggaggaggagtaggctccttcttcttctgtaaagcagtttttttagtagacgggaaaaattgattatcagaaagatatgaaaattttcaacccaaccagaaaaacgaagttttgacgtgtccaaccaaagtacgtgtcagttctgtttttttaattaaacttgcagcctcttggttcccatccaggcgcgaggaaccaagcactctcgaacaagatgaaacgtcgatacgtacagacttcttctccttcttgtcctcagacttcttggacttcttggactccttcacaggggcatcggcaacaggggcggcgacctcggacttcttggacttcttggactcggacttggccattttaggaataagggattgagaaagggaaaagggggggacggacgaagaaaattaaggaggatggatggaggtggggtggaataagcgtgggttgatagaacgagtggaaactttccatatgactgcccaaatttggtcggagttggaaatgatcacgtgatatcatacaaccctaaccaggtcgtctctatatctggattccatccgagatcatgagcagcaacaacgatatcaagaagacgatacaacatgttctccaacctgaatctgttcaggtcaactttctgtccgatggcagccagatgtgaatcagcgttctgtccgttcgcacatcaagcccatcaggccgagtcgatcgacgtacgagctcttttggagcttccttcgaaccctggtacatctagtttggttgactcttccggttctcgttcaaaacggccgttgtcagacgttcctcagcctgctggacgacctctgagcacgaagaaacagagaacagatacattagacagtcagactgctccgccagtctctttggccaagaaattatcctctcagagctcctctagtgttcagcctgtcgcctcgaagccaaccgaatcaccggccaagttcgaatcgttgtcaaacacattcagacgtccactggatcaaaaacctcttgatggtgtcggtaattccaaatcaagccgcgaatcctcccagcttgttccgtgtcccactttaagtctacgcccgaaccagacaaccgttcccctaagagatagacagaatgcgctcaaggcgctttacgcggagttcacaaagctttaccgcccaatcctcaagttggacggtagcttgccagccaggcatgcgcttgctcaggaacaggatgcttacaagaaaggccgaacgagctacaagaatgtaggacataccgaaaatctcacaacccgtctaaggtactgatctgatcgttctttcttcgacggactctaggctctgtccaatatgttaattagtattcgaaagcggcctcctcccgacttccttatgcattcatctatcggaactcaggccgagagcttgcgtgcatcagcgtccttggctcaacgtgaagcctctaagatcacttacgcctcgattgctcctttcctccttcctcttgagaactttggcctatgggattatgctgtcgatgtacccagctttgagggcggcacttcaccacatcaggaaggaactaatcagatatgtgagcgatgcgccaaagaattcttagttcctcttaatggtgaagcaggtatagagaaaggacaggacaaatgctggtaccactgggggcgaaaaagatggggcaaagatcaaggttcgtgtgagatttactttgatgtgatttctcactaaaagaaaccactctactcgtaaaagtctgatgatactctatgatactctatgatactctatgggcggacgtatttgcccatcctttctcaggcatacgcacccagctagccacttgctgtcagcttccttttaattctcaaggatgcaccactgcgacctctcatgtttttgcagacaaatcaatcgacggattgcattctcaactagctttcgttcggtccgaagatattcaggccgcagaagagtcaaaagcggggcgaaatagatcagaagtctcggagggttggggagaactgatgcccgggcagttgagattgttaggcatggattgcgagatgctggtgagtatatgcgattcttcttttcattattaaatgcctgtaggccagtcgattgatcgttccaacgatttttggactctttgtccttgtcaacctatccaccagtatacgacagcaggtacgcactcttttcttgatcaaacactacctttctctcgaactcacccgcttcacttgccctcacttctcaggatttacagtgggcagaatcactcttgtagacgaagatggaaagatggtctttgatgaattcgtcaggatcgatcctgctcacgcattgtatgtcttctgcaattggtttgcccctcatcgtctctcagagtcgttcctaatgatattcgcttctgtcctctttatcaccgacgatatattcgtctcttaccccttgatgataatatgtacatagagattataatactcggtgagcacctgtttattctcattgctccgttttcctgtcgctcataggtgcggatcgacgaatcgtaggttctcaggactacatccacaccaaattgaagcggcgtccatgaacttgatagacgctaggcaagcgctcatggcgttcatcggtcctgctactatcatcgttgggcatgggtaagtgatgaatctctccagggtcatcgccatggctcgtctagcgctctcctatatccctgtgttttgatgggagaatagtcgcctagtgtatgctgtcgatttgatgacattgtcttttcctttgacgtaatcagcctagagaatgacctgaaagcactccgattgattcaccatcgagtgatagatacagccgtcgtacgtggttctttctcatgatctttcttctgtctttgtccgactcttttcctgatcacgcgatctggaaatttgattgtagcttttcgcccatcctcaaggtcctcctttccgattctcgttgaagactctcgcactatctcatctgaaacaaaccattcaagactcggccgatcaaggtcattcgtccgaggaggatgcaagagcatgcatagagttgatcaagtggagggtcgctcaagagagggaagttttagcgcgagcagcggaactagcgttaagttttggtattgattgaatttgaatataagaatgagatatgtaagcttatcagagtgataccataagagctcgtagatggatcgtctgagaacagttctctgaatcattctcctcaaatttaatccgaccggattgaaacaaagaacgaggcttgatcgtaagataaattcgccgacgaacacatgaatcgatacagacgactagaaagggaaagagaccaaagaccgaaagaagtatatctaagaagaggaaaaggaaagtaatacaggaggcgaacgccagcgccggagttatataagatgagtaaggatggtgaatgggaaaactgaaagagacaaggaaagaaacagacaaaacaagagtagaactcagaccagaggaagaggaagaccaaagacaaaagagaagaagcattcacgaaagagagaaaaaaccctggtttataaagataagtttgatatagaaggaagctgagtgtataagagcaaaccaagtaaggaaaatagagaagaagaacaaggagaagaaaaaggcagagtctacaccgttgaatcgagtgcgcacacctcgctctgaacaaaaactgggcgagacagaagaaatttataggagaagagatcgcagactaactccagcaagtacaaaggaaaaaaaagaaggtttaaatgattagaagcagagacaacgcaggtttcagactcccaggatcaaagagctacagcttccttttctgatatctggtcggccatcaccgtcggcatcgtctcgtccaacgccggctttgttgacctagcgaacacaactcggaagtcgactctctccatctctctgatttcgaccgattcgagatcaccatgctgacaggaagtgctgtcctccccgtcttcgtcctcaagatcggtcgagtagagcgataggttcgagtcgatggacccagccgaaggaagtgaaggggtaaaagatgagttcttggattttgacgacggctgattgacggatggttcgacggtgatctggacgtcctggttaaatcgtactgaagattgcaagggcacacggtcgtctatttgtttgagtccggttcggtctgaatagcttctctcctgacggagatagaacggtttccgatgatctcgtacgagcataggcgaaggtaacctacctcttggctcgaggtccagcttgtcgccagcctcgatcccgaaacccagtccggattggccggttagcatgggagcagaaaacgaggtggatggcgtgttgcggtccgaccttggagggggaagcgggaagtgatcaaacgcggtcggagagctggcaagaatggaagccaaagaggcgactgaagtggattctgacaggttcgggctagctttcggtgtctgcagattgtcgactgaaagactggcgagcaatcggtcgagctgatcatctacctcgtcaatatcctcttcaggaatgacattgacctggagctctggatgctcccaaagcggactctcgtactcatcacttgtgaagccagaagaggttgaaaaacaagaggtcgaagagacaagctctggaagggctacttcggctgggacagagacgggtatcggtggtattgatcgcgatggtcgcacaggcggcgaagcaggtgaggtcgttaccttcgggggctctaatataagggcaacagtaggcgaagccacaggtgaaggacaagttgatgatgatgatgatgaaggggaggactcctcagtcatagacggggctgatgccacagggggtagggttgtagagggtttcaactcagagaaggagaatgaggagtcgaaagagaacgagctggcaaaattgaaaccaagatcgtctgccgataaatcaagtaacaatggagatcgtttggtcttgatttgatcaaccgttatcgacgatgatggtaatgatgaggatggggatggcgagataggaggtgtggctgctctgtggaaagaaacgtcgctggcgttcgtgggggtcttgcactcgtccgaaatgtttccctcttcttcttcctcagcttgcttctctttactctgctcatccgtcacaagttcagaatccagctcttccgtactattcggattgctacccaagtcgggtgttgccggtacaacgataaatgttgggagtgcggttagtcccaaggattcaattggttctgtcggtaatatccgacaccaatcgtccatctgctcatgaagggtctgtggcgaagcttgaggggaggtaaacactggcctgataaccgaggagggtttccgtctggtggaagtcattttggaagaagtggccgaactctggtcggaagtagaatgcaggacgcggtgttgtgctgacgagggtcgacgggaggggaaggaagatgatgcggatgatcgccgagactgaggatgtgtgtctggagatatcaagcactcccgcgagggtaatgactcaggcaagttggacatactgttttgaagggaaatgagcgtcgcaagaaggcatgtttcagtcaagacttggtacgatgggtattgcaaagaaggcgagaagatattatatttacctattggatcgttttcgttcgtgccccctattgcggttcctcacgacattcgggctcccagtattcatggggttttctccccaacccttgccgaacgccatggctggagattctacgctccctcctgtccttctggtcgagacaaagcgcctctcgctttctttcatgctggatccctctgatacgaggtccaactgtgaggatgaggccgaacgaaggtcccgcatagaagaaaagccatcgggaaagggcggcatgggtccctcggcttgagtccaatggtaggacttgtcaaagaacgcacctgaacgtcgggaggggagagtatcttctgaagacgatgctctgagatcaaagggatacgtttgcacagagttcggcttccgctgaatccgatggtgagaggaagtagtactcaaaggggaaggtagagagtccgaggtctgatgaggcgactggtgctggtgctgatcccgttgtttttgttgacgcgacgagtccaacgcgcttttagactgggctaccgtcgacgattggctcgagacattcgctcccgatacgcttcgtttcttccagaacttgaaaccagacgatgaaggagttgattggtgaccacttgaggtaagctccttaacggaggaagagaagaaagaagacgaagcagaggtagaggtggacgatccaaagcctggggtcgaaggagatgaggcggaggagatggtggtatacgtacgagccgaagtgggggtaaacgactgtttgagaggcgagtttgaagaaggacgcggctgatgctggttggcttgtaggtccagaggtggaggcgcgtttcttcttttaggagaggacgaggagggattgacagaggagaaggtggtagtagaagaagaagaagcagcggagggagagttggaagatagcatgccagacgctagagaaggaagaataaaagaaacaaaggatgaacgaaagaaagaggctactctctggacgatggaccaaaacgagaaagggaagcgctgaggtaggagatataaagatgtggaaagagggtgaacgaatggaaataagaaaagagaagacgacaagaaagaaaggaggaaaggtaaagagaagtaaaagaaatgatagaagcgtgctgctgcggacgaacgtgagaggagtaaataaacaagcggtccgcttgttcttggttacgtgtgtttgtgtggttatatggccgcgggccattccgcagccaagtcaggttacggttacgtatgacaggtaattggccgctatacacgcaatgtcaccagcagcgatgatcctactttagaagatgacacatgcaaatcggattgtattgttctcattctgcagtcaatcgagctgtatctgttgtgtgaggcgaacagggacggactcgagttgactataacaagtctcttcctccaagttgtatattgtcaatatatataagctcctcagcgactctctgaacgctgcctgccatcgccgttaccttctctcctcttcttccggcttgcccttctgtctgggctcaaactctggctttctctgtccattcgtcctcctcttcctgagcgccttctagcctgggtagcctccttggggtcgctgtccgatccttgtgccttggagcttgtcccatgcagcagcttctttttacatctcttacagcaaacaactttgaccaaagcggtctttgcctcttccttttcaacataagagaaaggaagctcgaactatttgatcgatagttggaattgaaagccacagagtaggacggcggtgaagagggaaaagaaagaaaaaggaagagtcagcagttaaagaggaggaatatctgcgtatgtgcatgtgcaacggggtcacaaaaatgatagacaagaactcataccgcttctaaaggtggacaaggcggtgcatcagatgacagaggaggaagatgataggcacatctcaatgagccacaagtcgaagatccgatagaaccaatcacttcctcaggcgttcgccatcggagtgcaacctgcagtaccagtgaaggatcaggacagaaaatgtagagggcaaggtctggttagactaagtctcttctcgagaattcgatggcattttctaacaacgaatgttaacgatatatatgtcggcagattaaacatacctgaccggacttgtaatgcttaagatcaacgagagcgtactccttaaacagtgattcttcgtatcgcttggcaatcaatcgtccatacgctgttagggactcagaaggggtttccacggtggatccggtctcgtcttcacgaataaatctgaacttgattgagaaaaaaaggagaaacaaggatagcaaaatacggtcaaaaacgtcactaaaagcccagacataacactctatctaacgtggctattgaatggatgctcaactggtgttcttgcttcaataaatcccaatcagtcttgtttctcgaccgcctctcgtcctcagagtttctcgttctagatccatccgggtcgtagatcgcgacttggttcttatgtcgagtataggccgactggccagccaagttgttccgagctgaagacggtagaggctgccgagcagattttggccgaccttctttcttagagagactcgaacaagacatagctaaaatgattgggaacgtctagtgtcttaaacagagtcgtagtcggtcgagagagggaaagaaaattaaatacaaacagcaagccagaaggtaatcgcaagtgaaagttgtgtagccgaagtcggctgactatccgtggcttatgagcaagcgataagtgcatttttagggttattatcacatcatcaatttcaactgcgtgcagtcgttcttttatatttcaatcagatatagcgttctatgtataggatacccgaatatctagttggactcttctgccttcaaccattctcttggctctctcaacacctccattaggcgaccctcttctgtaccctgttctcctaactctgagcagtattcccaacgagccgttagtgggatggtcatcagaatgctttctattcgcgcgcccggcgtcatcagtctaggaacggagaatgtcaaacagagcagttgatcagtaacaatacagccgaggaccaaagaaagcaccaaatagacgcaaagaatcgttgtcactaacccaaacttagttcctcgatcgatgaccaagttaaactgtttacacacgagatagaacatcgagggagagacgaaacgattgaacaacaggttagcaaacaagataacaaagtcagctcacataagacagaacgtacctcggcatatctgcctctccgaatctgttgccagcgccattgttcaggcgtataaggtaatttccaccgtttctcaaggataggaacgtaagcgggcacaaaggaatctccaacagatttaacaaagtcaaagatctcttccttggttggctgaactccgtttgactaaaagacgtggaaaacagaaaggcaaacaagattaaggaaagaaaaaaagaaatcgtgaagaactggctgaaaaatcaagcatatctcaccttggcctttgccgatttctcatctaaatcgtcgaaaaagattcccccgactcctctcgcttctcctctatgcggaaggaaaaaatactcgtcgcaccaagttttgtagctcgggtagatatccttgccgtgtccttcgcaagcgttcttcacgacgccgtgaaaatgttcggcatcttcttcatacaagtagctcggagtcagatccaaccctccgccaaaccaagaggccagtggttttgatggatccttcgggtcgtaggtctcaaagtatcggacgttcatatgggccgtaggtgccttgggattcttcgcatgaagtacaagggatagcccgcatacagagtacggaagtgagactccaggtccgacagaggacaaggcagaatggttggcgcgcatctgttgtacagcattcggagggagcatcccatggacaacagacacattgacacctcccttttcgatcacatttccgtcagaaatcacgcaggtgattccttctccgccgtcattttgtcgaagccaatggtcatgaatgaacttggcaggagctgacgaggccaagcgtaagagatagcacttcagatggttaagaaatacacaaaagaaacagacaggtcattgtgaagaacatacgagaagatgaagacaagagagaacgcggctgtgttcgcttctcgaggtcttctatggcggaagtgattcgcaactggagagatttgatgtaggcctccatatcgtgatacataggtgactagttgaataatcaagagtaacagcagatagtcagataggcttttccaacagatcttcatcctaaaggtttgctcacaactgtaacctccgcatccttcgatagctcaagcgttttcagggagaaaccgaaaccggatgcttgcaagaaagactgtttgaaatcctcaacactctcctaaagtgtcattatacataatgcaacgatttaccgcacacgtcagactaggggaggtatcgtcaaacaaaaaatgagagggctcacagccaaagtatcccccaagaataatctacctccaactagaagactaacgcctccaatcaaggaaatagccctcatattgctgtttccgccgttggtatttttcggaggagaaggagtagcgagattaggacgtgtggacaacatcttctcacagccactcggtttgattggccgaaagcctacgtgaccatacagaacactgattaagtccagacatactacgatacgcgcaagtgaagcaaacttgtcgcttaccactgactactcgaagtgagtggcccattcgacaggaataattgagcttggacatatcctcggagtaaacaagttgaactggggtttcttcttatctctatgacacgcttaagatgtcagagagagacctgaccaggttcgatcgcaatatcagcaggtatatatgcattcctagatgtactgggaagttaggtggttgtgtccgttttccaaaggcgagcgctcctcaagagacgcgaatcttctaacgcgttctcctaaattcctcagtcttcatcctacactttccagtttctgccgaaaaatccacattaaatagaaaacattctcacatacatcttatcgacaagagcaacccaccgtcggcgggactcctccttgatacatactgcaaagtttgataagaggaagctattccgacatgcactcaactatttggacaaactctccgtcaacagaagaattaaagtgattgagtttgatcactacgatccatctatcgttttagttgaacagatacattgagatgttctataggtatatttaaccgttttctaccaaagatctgttccaacaacatcccctccgaactcagcaagatagattcgggtctcagacaagatggccaacttctggtctccgacaaatgccagattggcagacccctcgccgaggaagatcttgccaaggagaactccgttggagttgaaaacctgtttgcacggacatatcagaaagaaattcgatctgttcggttatcaactcaagtaacaaaaggaatcactcacatgaactccatctcctgctccagtgtacacgtttccattcttatcgaccttgattccgtcgggtacgccgctatgggaaatgattcaaccattgaacaatcagctttaaacataggtgctcttttaaataataccgaactgaataagaagatacacacgagtctaggtaagcaaagagttttcggtttccgaaagaaatctgtccatcattctcttcaatatcgtacgtataactttatgtacacgttatcatatcagccttggttcacctcagcaaatcacagatagagaatcactcacatagtggcagggaggtaagtgttgacggtcccattctgtgccccagtgtcgctcctgttgacaaaggcgggtcaaatcagatttagaaaaccatccaagcagatttcagaatgagcctaacttacagatagaccttgctttcatcagggctcaatgcaattccattgacgtgtccaaagtgctcggccacagctcgaacgaggccagtctcggggttgaaggaatacacttgctcaggaagctgtaagaaatagtgtaatgatcaaacggagcatttgatttaacgaaatttgtcagatgttttcgatgcaatatggatcaaacgaaagaggattgaacatactccagggtatggcttgaaaccctgcaagtagccatagagagtatcggtgaagagaatagatcccgacttgttgtgaacgacaactatgagagaacggaagagaagaaaaagtgtacaaattgttattgtttgatcgtccaagagaatatagttataccccaaaaacagaaaggttcgaaagactgaccatcgttcagagagttgaaccttctaccaaagaagttatcaactaggacagtggagttgtacggggcctcagggttgaccagagtcaaagaagctgggatttcgcctcgaccctcagcggcaagcaagagctggcctttgtaaggagttccacctaagacaaatatgatcacttagctcaagcatgagacaacatttctcccaaatatgtagacttaccattcgtcatttcaacagcaggcgatgcaacaacttcttcaggaatcaaattaagggtctcatttccactcgtcaaattcgacaaagcgatcttgaagattctgttgttcttatagaggccagagtctcccttggctttgattcaacgatcgatcgatcaatgaaaaagaaagagtgtttgtaagtgcgaaaactgcggaagagaaaacaacatggtttgctgagacatacgatttcctgcgttcgagcagaagaagctgaacaattgtcaagaagcggttgtccagtcagcatgtcatcagattcatgaaaaggatgaatgtgcaaacccacagctcattggtgtccggcttccagatagcagcttcgtgcgcaaagtagtaaccgctgaagttctcagaaactgtcaagtatcaacaccagggaatcaagttaagccgttgagtttgtcgcgtctgtcttttgtacatgatgttcaaggaagcaacacatactgattcgtaattgaggagagcctcctagaagtttcaggaagtccgcatgatacgcctggaaaccggccgtaaggttaccattaggagtccagatatctgtaagagacctcgaggagttccctcctatgatagcgaaggatagcgggtcaaagtactttggagcccgacgggacgcatactcagtatcaatatcatgtcttcgtcaaaccattcttcctgacgaattgtatagacacacctgaacattctctggaagattagcgacatcaactcttgccgattgtcttcgcacaggaagagatgaggcctgagccaaagcgaggagagaagaaagcgcgagagtatagcgcatagtattgatgaacaaaagtcggaggtgatggaagaacaactatgtccaactcagatggacgcctcttcttcatatagtgtacgattgacgggccatgcctaaccatgcccacttggtcaccagccttggcgacggccggacccaatatggtcagacgaacgggcatatatagtggggaagtaaggattcgaaggtatggggaacatgtttcagtctagcgtccagatggtaaaagagcgaaagcaactgaggatttgtcgtcatcgtcgggcaacaatctatagaccaaccaggctggaagcgatggatgaactgggcctccgctttggttaagatccgactgtcggacagtcgggaaaagaaggacactccggtaaccgccaagaaagtccggccgtccgggccggtctgggacgagaacataacctggttgggtgcccaatcagaacttgtaatcgagtaactaaaagtaaatatatagaatcttcgaacgtccatccagtatatgaatcgagagtgtgaaagtgtcaagctagccgattcttttcacatggggcttgtttctcatctcctgaaattcctttcctcagaaattccttgccgctgcatatgatattgaagccgctgatcgtcaacaaacagctcagataggttcggggttcgttctcttgtcatatttgttgttgatatcaagatagataatcctcatctaaaccaaggagccaccaatggcatgattgatcaacatggaagtctttcctttataaacttggccgcgctgaaaaccggacctcttacggatctcaaaggtaccctattcctttcccaactagacctcgaggaacgagcccatcatcccttaaccatggtgcaactgcccacaagtcttcggcgtcgaaagaaacatatgaaccacgattaggcaatgtatcgattttattccatttcgaggcttcatcagagtgagtcgatgaatgtcgagacggtaaagctgcaactactctgttttcatgttatttaaaaggcccaataaaagtctcattagttcatcagtaattggacagagtatcctttggccgagaagacggcaacgagagcaagagctgtggaagcatggcgacgaaattcagaacaattaaagagcacatcagagactattacgcacatcgtcggcccaacccatcgagcagtttcctccacttctggccattcctctcttaaaatttcattgtcctcttccagttcgttctctccattgagatctaaatcattgatagtcaggagctttcttggaggaatcctccgcgtatcctctccgccgggtgtgtggtttggatagaatcggtgactatctctaggctgcggatgcttcatgattggatacggaagccgtacaggatcagagctcctctgggtgtaagcatcttgtttgggagcagtagatgtcaagctagagcgcggagatgcttcagaagagaggcgcgcagatacagatggagatgacggctggaaagatacagacacaggcacaggtggatcgacagtcgagagagaaggtgaggcagacatgaaagaggatgaacgtatgcggacgatagaatctgagttctcagctctttcgctagttgcgtgaaacaaagaatgtctgagcccaaagaaatttccgatagagccggctagaccaggacgggtccaattagaaccagaagcatgagaaggagatgctgcggtggcggaggaccttcctccactcaacgtccggctcaaggggataccccgtcttcgcccacgacggctatcgtcttcgggatgatccactcggggcgcaagattggataacgatgacgatgggcccgcccttgaaacttccccgacgagaggttctattcttgattctgcaatccgcctcaaaccttgaccgataaactcatctgaaggggattctgaatgtagatcacccaccagcctgggtccgccctcagaataacttcgtcctcttccaagttgcccatcggacctaacaggtgcccgagtattccatgaaggaggattcagcggaaacgctttgaaatcttgccaggatcgatcccacccagatgacacgactggatagcacagtggaggatgcaagagggcatgggcattcgcagagggttgataagacgaaggtttaccaagagtacccaacacaaagatggaaatgtccgtcaaacggacgagaggacggatagtcgctggatagcccgtgagatcgttctgagaggaaaagggatgagcgctgatgaacgaatacatagacggagatctttgatcgcgacaccatgtgatgaatgtcgcagacatacctgagctgtgagctcccgaataatggtttctgggttgaaggtgtcactgtacagcttattagttgtgacagtgccttttcgatctaacgtgatccaagaggtaaaaggttcgtccttgttgcaaggtctttgagatcgatgatgaatctttctaagtgttctactcatcgtagattgctgttagtgatctacctggctgaaaagaaaaagagatcaacggacatacctcatgtatagacttctccagctttgccctgcagtcttgtccctagcccagctgggtagaaacctacgaaggaagacttcctgccagtccatctccttcaatcctggagggatgacgagttcatccaacacccaccccgcctgagctctcactaagatctctacccaaactgaacgagggacaaacgagtacacgccgagtgtcctcaagctcgaaggataaggtataccggcgataagggtgcgaagaactataggtgtgaatgggttaaggatcgacgcgatctgacgaatgagcggatgagtttgagagatcgagagaacatccaaaagagacagataggtaagaatctgagagatgatctctggaggcaaagcgaggagcagggactttgtcgatggttgtggcatatctaggagggtgatggtgctgagagaggtgatgtttagatacgaattccgtgaacgatcggtgatgagtgccggccgaatgtaatgagaaagcgagctttgcaatctcggctactgagatgaacgatggagattgaaagtagttaaaattgcctgcagatatgttccatattccatgaagaggtgttttctgtcatgtcttgccaatccttgtgcatccgtacaatcttttgcccctttgattctggaagttgtcgatacccttcacaagcgacaacaggtcgtccatggaaatcaataaaatacaaatggaatcacttctgctatttgatgacgtcactaccgctgctcaatccggctttgggtatatgatcggcatctcataccacgcacacacaagacataagaatgaagttatggtacgagatacatataaaaaaaaggatctatcatttccatgataacaacttcatcttgaagaatacgatcatccgtttcattggccaaaagagagtgaccgtagggtgaattgaacacccgtcgtccgcgactttgcgtttcgcttgaagaaccacaagcggaagtactaaccactatactatacgatctatgagtgtcggttcaagaaagacagtttgatatctgatgaggttttaattatttttgaaattcatcggtcttaacataagtttagctatgatatatcgtttctactttaggcaacaccctcggttcttcttcatcacagggtccctagattcttatccccaagacttgtgagatatctagttggttctcttctgtttccttggtttctcaatccattttaatgaaaggacctgggaggtgtgtatatggctctgggcaaacagcgaggacttgattgggatcgaaaagttcattttcgtccctttgtttcggtagatctcttatgctaatttccaacactggttatctagacaactggaatttacagtcttacgtttagacacttacatccaactggcagttcaagatatgggttcgaatgccattgacagacttttctccgccatgttgcgaggttccaatcgagactcaacgatcttttgaccagagtttcacatacggtgttgtcatacaagatctaacgtctgattgtttgccttgtgtctcttcagaatgattttggtatctggaacagctctttatgtgtccaaaagtttggcccggctgatgatcctgaccatctgccatcttttagttttctcatgtatccgggtttggtgagttatcgataaactcatcttgattgtcaaactgctggagaaagccaaggatctctacgccgctcctctcagtcatcacgccctttggatttgactaaatctgaatgaggtttttctcaacaccgtttgcaacttctccttcgttcttctttcctcaagttgcttggggttccgtctcttgcgatccgcctgatccgtttgtgcaagcttttccacataatgattagatgttttttgcttctgtccattctcctgttttagaaaatcagatgatgatttaggcttatacgtcggttgtcagtaactctatgacgctaatcgtcctgtacaagttcccctccttgaacagtcaggtttcttttcagctgctcccacatctgaccaatccggtcccctattgtcttgactcataattttcttttatcgaacacgtcttcttacaacgaaatttcttggggtttgacactcaatctctcttccggactattttcaacaatcgttctattactctctagaagtcgacgattctcgatcttcgctttcaaccgtttctgaagtagggattggtactttctcctttaacggaaaatgatctgcagctcaaccgttgcctcaagacagtcagtggctgtcctcacattctctatgatgaaaggacccggcttacttactaagcgattctgaagtattcctaaaatttgcgtgtggtttgctgctgaatattccaatgactaacgaaacgctgatctagcaccatcaagcatcaatgctccaggttacattttgtgccatctttctcgcagtttgatccgttctcttagatttgatgaccaaactagagttgacgtgtcctggaagaacaagagcaaatatccaggccttcggaagtgatactgtctcttctctcttcaacaagttctcaaattcctcatccttttctatctttcaattatagtatcttgatttcaaaggacttgatccatcttcatatgactaagctatctattatatcaaagagaatcttgctagctttctatgagccatccctctctgatcagttaccctcccgtctattactcacaccagaccatttaaatacagtctcacggacaagtcattgcattaattctagatacacagtgagatcgccaatcacagtgaccttcacagaaggcgatgttgcagtcgaatccctccatgatcctggcaatgtatatcttgtggtttgtccttttgttcttcggttgtcaagtctagcagagtccatgccaagcttgcccgtactcatgtgttgttcgtcatcagccttggcctaccatagcctacttgtagagagaccggagccactgtcttccgatcctgatgtctgaaatgacaacaaccgaatcgtcgatgtaagtaaaacatgggggatctttcagaaagtatacgtcatcagaggcatcgagtggcccgactccgaacgtggttggcggtcactgagcatcggcctgatcgcacatagatctgtgtcgaggatcgagccgagctggctgacacatgcattccatgcctcacggcccttgtggtggtcagtctcatctatccttgtcgccttcttgtgttccaagccagactgacgcgggcacgtgagtcacttttcttcggttacgatgctgatggatgatgtatccgattactgatcaagtgctttccgtgtgcaggttgtgtccgactacgatcatgcagcgatgcttcgagactgttgttcggacgatcttggtcagctcgctgagtgttgggctaagctgccggtctttcaacagagtgaacacgtttggatgtgatcgtcaagagtagagtcttcatctggatcaagacggcgtactatatgtgctctcgagttggctatgatctcgatggaggatgctgtgggtgaggtgacagaaagagctgggacaaactaagctaccgacgtgtgttttggaaaaggtgaggtaggcgaacaagtataggctcttcgcatccctttgcatcgtcatcgggatgaagaggggctctgtgtgtgggctgtcgactacggtttggtgggcgcaaacgtggatgcaacgtctgtagactaggatgctgttgagaccttggtagtgatgtttctgtcggctaggaaatgttcattccatctgagcgttcagaacgatgcgagtggaagccaccattgtatacacaagcctacaagacggaaagagacatatccagctgcggcggaacaggtaggctaccgacgagcagtcaaaagatggaaagatggcagcgatgtcggacgaaccttggtgactaacgtgagagaaatgaaggctcagacaaggtgaagaatagaacatcgacgaagacgacacaatgaaaagaaagtgaagagcagacagaacgaagccagagtcggaacatggaacgtatgtgcgaagataagagacgaaacgtggaagccaagatagaaaaagagaaggagcatgtgtcctgacgggcaccaagaaagacagccacgaccaactgaaccttccattgtatactgactaaggtctgaccatagtgaaattctcgacaactaaacagtcttggtcagagctaaaagaaaagggaaggtagaagtaaggagagacggaaaaatgcgagactgatgaagaacatggacttcagatatcgtcggctgatatcgtaaaaatccgaaatttgagaaacagtcaagacgcatgatattcacctgatcccgtcatactcgaggaaacctatgttaagttcccgtacgttcttttgtccactttcagctcacaacagccagtctggcgatatacaaactgtgtggtgaaaaaatttggcaaaagaaaaatcgaccgctgtagggtttgaacctacgccttcagagaagagtagctatctaaaattgaattcaaggctaccgcgttagaccactccgccaaacggcctcatacatattgaaccacacatgaattccaatatgtaaaatcggattccgtgttgggttttgttggagtttcagcagtcttgacataatttcatctgtaattggttatctcttcttgagacatcaccttccgacctccgtttgcgcggagtcccaaggctctctttccgaagagctataaattttctagcgggtttcttcctgttttttttttcttttctggtttctcaatccattttactgaaacacctgggtggtgtgtatatggtttgggaaaccagtgaggacttgattgggaacaagtgccagaacgaaaagtccattttcactcttttatttcagtaatcatctttaggtgatgagtgttggaatgattcgttcgaattcagtatgttaggtttatttcctacaatccttctgtttcatcttcgactgattctgtctcagtcaacatcttggcagatatcttcttccatcctggctgtttctcttagtgtcgtctta

SEQ ID NO: 1840 - DNA, 776 bp, Xanthophyllomyces dendrorhous
ttccccatagttctttttcctcttttctcttttctctcaagtttggattttgtcatcttcgttcgaagtatcttcgtcctatctaccagtacacctatgcctatgactttggcatcttcttaaatcctcgagagcctgagctttccacatacatcctcatctgaaaatgttaaaaccaaccaagtcgcaacaatcggttgccgggcccttccgccctcacaggaactagagaatcagattcaattattcaaacaagtcaactgtctcggaggaacaatcgagaagatcaagatacattccagccttcgatttccccaccaagtgctcccttttattaaggtcatgcaaagctgatctcgaaagatgtcccatccgtctgtgaacgacatcgatctcgatctccggcttgcagggcaccaccgaagcagccaatgccggcggccgagccgtcacatcgagcgaccacaggctttgcaagtgtggtgaagcggtgagaaagatgccgttcttgtctctgaacacgatccgatccatgtcgccgctgaaagtgatgcctttgatccggcaaagctgactgagagacaagagagacaagcatgtcggacgacatccccagcacatggaacacatcggtcagtgtgagcccgcactgttcgtcacctgtcgctggcttgctgagcaagctgatctggcctcgaccgacgactttcatcggctggccgttggctacgtgaatcgtctcgtcgtatgagtcgtatgtcgaaaagagagaccgg

SEQ ID NO: 1841 - DNA, 419 bp, Xanthophyllomyces dendrorhous
ccctgtgtgtctttcggtgcatttgcgatgatgcttcttctgagctgtttgccttttgcagttctgggaagggcccgaagaagagtaaagctccacgactggtcatttgtattgcattcacatatcactctaagatttcttatatcattcactacgtccacaaactgatccagctgtgcacgaaggtcatgagtataatcaatctctatcgagtccaagcgctcatacaatagaaactcgcccgagaccccttccagtcgatgaacagacctcagaacgtccaggcactcggccgatgtccggcatggcttcagccgcttagcctccgcgatgtcgatcttggtgtggatccagcccatggctgtgtcgtcgtcttggtcccatgcatcctgcgctctcggatggctggcagatggccg

SEQ ID NO: 1842 - DNA, 6647 bp, Xanthophyllomyces dendrorhous
  misc_feature (391)..(400): n is a, c, g, or t
aacagatatattctaactcaacacacaaacagtcttttgcgaatactgaggaaaggaaaaagaagagaagagaaaagcaaaagaaaaagaaaaaaaagagaaacaaaagtgtcgagcacagatataagtgagaacccaacgtgcttggataagaagaaagataagaataaagaaactaaaaagacagcaagagaaacagccacgatggaagaagatatctgccaagatgttgactgagacagaatcagtcgatgatgaaacagaaggattgtaggaaatgaatccgacatactgaattcgatcgaataattccaacagatccagcccatgactgtgtcgtcgtcttggtcccatgcatcctgcgctctcggatggctggcagatggccgtnnnnnnnnnngtcgtcttggtcccatgcatcctgcgctctcggatggctggcagatggccgtggcctctcaccagtgacgatcgtccagagcttcatgtctcgaagagcaaaccggagtcggctctcccagacaccgtagtcgttggcaggatggttcggagggtgaaggttctcgaagttggcaaacgacgcctcggacagcttggtgtatagcagcacactcgacggctctgcatcagtgggctcggctgacttgacatcggaagacatatctgtagcagtagggttagtcagactcctaatctaaaggcgtatacggtttcgtatcgctgtagaatagaatagaaaatgattccaaacacagcgccaacaaagcgttggtagatgctgaataaggagaaacagaatacctgaaaaaaaaagaacaagaaagcggaggaagaagaaaataaggccggctggcagagtgcactggcagaggctgaagtacatagataatgagcaaaaactgatgcatcatactcaagtattctcaacacactctgctagcggcctacgtttttgcttcccccgccttctgtttcgtttttttttcttcaggtttttatgtttgtccttattcagcatctaccaacgctttgttggcgctgagtttggaatggttcatctcatggtatccgacagaacttacaggcctgtattggatgtcattttttctctcgcaagctcgaaacctcatgaaagtcttcataattcttcaacgaccatcccaacccttcatattatgtgatattgtatcacccttctgcatccaagagcatgagcgcgctgtgttcactacctactcagcccctttgcctgcgctcatggcactgctgactgcgtgctatcaacatctaatatgtctattttctccctttctccctttctccctctcttccttccgatctttgttgtcctcaatgtgtatccttttctttttctttttcttttctttttctatatgacatctattctaggtggttatgagctgtctctgactcgcttttttgagctttcagcttcgttcaatacagtagttcctcacgtgatcatcatccccgttgagattatcacccagcaatactgcgttttgtcctagtagctgagagcttgtactggtggacgctactcatcgctcaatctcccctcctgcgcctatatacttcaaactctaccagcttaatcagaatattgttcatcgtgtctgttattgtaccaacattttcgaggctgttcgtatcctttgtagaagctgaagctttacatctcttcaacggatatacgcaacctatctgcattatcatccgttgtctgtctcgataagcaaaacttttatttcccaagatcgacttgttgcatgtttcttcaatgtttgagcactgttgcttgttcattaaaaaatcaccatacatgcaatgttaagaacattttgcatcatgtcctaacagcttttattctaaaatttgatgatacttcaacgctttcacgtaatcctcattcattttgcttccttcgacattcattgttcaaaagaacatacggttaccagtattcgttatcaagaatggatccaacaggaaacggacagagtacaaaagcatctgtatttacaagagtttttaagcatcatcaactggataactgtaaattccagcaatacacgtcaaaaagatataatgctgtaagattaacctcagaatgcactagtgctgctgctgaacggacaatgttttgtctttctcaatgatcgataccacccgctctgttgtccaaagttgaaagcaaacataatattcgtcaccataaataatggggaataaaccttgtaacgaccattaatcagaactcaagttgagcagcacatcgaagagcatgatttttgacacaaaaaggccattgatgagtatagtggtcaatcagcttatctcgatatgtactataaactgaaagacttacaaagaagaatagattgatggcaaaatcagctttaaacaacgctcacaaatgcgtactcagcttgaagacgagttgaaatgcagaattccaaatactctgagtcgatcttctcggatgatatctgattgcccagaagacaaagtcttgatatctacagatcagactctattcttcggagttcatctccctgcaagcgtgatccataaatactgccattttgagaaaaagcatgccttatgatgaaagtgatatgaattgatattctaattgaaacacgtatgaactacttcgaaccgactgctatgtaggaattcattttgtggtatctgaagctattctatggtcattgttgtatcgagcatgttcatattactcggtggactttgatatggaaactcgatgccactttctcatttctcgagcagtccgaaatatatctaaacatcatgagaattaaatgtctcgaaagaagagaatgaatagttgtaattgatgcacagctagagcttgttcgccaacattgagctacatacgttactgaaatctcacgacgtaagagatggatatcagtttaggtgtcgctttcatgcaaaatataaaaaaacaaataactttgagattaatgcgtatgttcagataatagaaacaaggttttaagtcaaaaacccatcattttagtatgatggcattgatctctatttgagcggaaccactgctgaaagatgcattgaaattcatttggtatatacttatcgaaatcatatgtcgcatttattatgtatttgattagtaaaaagttttccgttcacaaaacacgagtgatatatgataacctcaaattttgaacgaaagaccagtatatcatgatttcattttttgcttccattcgtcacgtgagataagtcaacgtgaagtcatttccaatacacgaatcaatgcacttactttttggcagctctgatcatcgatttgtcgtttatgacttgaataataatgacagaattaacgatgactacagagaaaaatttgacgaactttgactttgttaaccagactgtgtgagacagcgattttgggactttgctgtactgaagaagttgctctccatttcattacacgttttttcatgtcgtttcatgaacaaatgagtatgttggtgccgctatgaggttttgctttatattgaagagtgaccagtctccattgaaaggtcacgaaagcggacaaaatagttacaacacatattgaagtctttcaaccagttcgactatgatacaaacatttgctgatcaagttatttcacaatctaaactcaaaaactacaaatgatagtgagcatatcattttaaaaaacgtattttgatgtggagtatgagacatttgtgatgtgttcatatattgattgaaagttttgttctggcctaaatcaccatcacagaccgtcaagtatttatcaataatcatcatatcattgagttaatttacttgatcgattgatgaatgtatcaccctgcctcaacagtttgtactattgagtgttgtatcatatgacgggcaataaattaaatatttatacattgtgtggttcagcatcacaatgttagccgataaacgtgttggtggaatcgcataacttgtagcagaaaactaatgtatagtgaaacatcaattatatagttgtagatcacatatctagacctgacagaaaagagtcaatttggaaaaagactgtttagtgtacggtgcttcctttacctcgtacataacatatgagagcaagaatgtgccaattcacaagatttttagagatctgcaatgtacattaatacgtttgattttgtacactgatatgtgagttactgatatttgtattcttgaaaaaatactttctttgctgtgaaaactgctgatgctagttacctgctaaatttgtgcacggacgaccttactaagtagtgcatatgtgatctttcaaaacagttttgaaaactcgtaaagatagacgttattttcgactctggaatctgctcatctttgaggtttgtatgcatatcatataatagaatgtcgattcaatgtctagcgttatcaggcgatttgttgcagatatacaattatatatgctacttatatgctataacatgttttcaaggcttatgctccattttttagcgtcaggatgatgtttaatcttcaacaaattcagaattgaaatgaagctttttggacaatacagcattgtttgtcatggcaaattgagtctccttacaccacctttatttacagatatactgtcgcggccttgtatctgatcaaatcaatgagttcattatcatgtcatcatatgtcaagtcgaagtcaaaggaaacgacatcggtagaagttttcacaaagcatcactcaacaagctggattactggtcatcaagcaacagtgtaaaattacaagattatcatgagtgatctcgcagcgttattgttcgattcttaagaagttctggtcaacatatatatttgactggataatgttgaatcctgataacgattgatgaatgtttctcgagctgtccatatgttagtttgatcaacacttgagtgtttccgtttggaatcgaaacgttcgaagcataaaaatgattattcagaaagcttcagataggcgcttgatgaatcgaaaaacgcttacaataggtacaattctagatatctattaggtagaaaacgaaattgactatctcaaaactatgcatcatgattgcagtccaacgagatatatgaagatgcatggccttattcacagaatacatcatatggattcaaagtgactgattttaacagatcgaggcgttatcatcagccacagcgcataataatcctgctctaaaaatgaacggtattgtatcccagacaaacaaatcatttacctgcacaacaacgaacaaagtatgacatcacgatttgttatgacttttgtgcgatgctatagcatttgaatcagaagtcatgaatttcatcattcgtttacgagctccattagttttttttatcagtaacattgtatagatatcttttacaagccattttgagtcagaatcatcatacttctgcaaacgaaaagtgagtatccaacttccccttttttctggacaatttttattttctcaccagggtttgtcatgatatttgcaaaattcgacgaatctcggaaacaaatgagttcttcatcatcctctctgtgcaaccgaaaaaacatgttgatgtgcgaggatacgaaaaatcaatgagaaggaagtcaagtcagtacgatggctctactatgataacagattttgtttgtttgataatcgtaattcacattcacattcaacacctgaatttacaaatggtgtcacagtctcttgactggttggttattcatcagtactgatttactacttggtagacttaactgcatttctcatataatcaaaactggcaaactcacagatcgagaatgacaacaacaattcatgacataatgaaccgtatttaacgcttatataattggccatgattgtttcagagtctttgaattgacctacatagactacgggcaataagtataacgttctaccaaggttatcggcatataatcatttttccaggcttcaatatgagatgccgcgttttgttgtatgacgaaaatgagcattcattttaaacaactatttctattccaataggcctattaacatggagaaatgggacaacagcatccgttttgggcgttcaaagacgcagagtaagatgaatgaagtgaaacgctatcactgatcacaagaggaagtgaagattaccgattccaaaccaaaattgaaaacgatcgtgttaacaaagatgtatatatgaactttccagtgcatgatttcatgacaataatgctgagttggtacatttctgtcaatgttgttatttcaatctgtgacagtgatcggaaaaggcaggatccggctgctcagcaagccagctaccggcggtaaagaacagacgatcacactcaccgatgtgctccatgcgcccgacatgtcttccaacatccttgtctccctcggccagatctgccaggtcgaaggcgtgtcgttctccggtgatcgcagcatcttcaccatcacacgaggccgagacatcatcctgactgcttcggcctatgcgcgcaacctgtgggcgctcgatgtggacgtgcttgttccgaacatggctgcctcggtgactgtttcgcc

SEQ ID NO: 1843 - DNA, 845 bp, Xanthophyllomyces dendrorhous
ttccgggcggaaactcgagtatttttgtaccggaacagatcgtctggtgcttcttcggagtgcgggcgtttctgctgctcgggcgagttgttttcggtatgtaccaggaccgtgcgttgggactgggatcagactttgttctcgaggcgaaggtgctgctattctgacggagatatcttctgctgtggtttctacaggcttttgtgatgcgttttctgcagtcgttcctggcgccttttcggatacggcgattgatgcattttctgacaccaaaccctgagtgattgccaaagtagtctctggagaaacacatgaagaaacagctgaagaaatagctgaagagacagctgaagtaagatctgaaacaccttctaaagcggttcctgaaaaaccttctgctctgactcctgacaaggtatctgcagcagtatctggattgatatctacagaatcacctagggtgatgcctgaaatagtctctggagaaacatctagtacactttcttcagctgattctaaagtagtctgtaacccaggcagtgaagtagtttctggagtagtttctgaaacgcatccaaagacatttactttcccggtttccgctgcatcttcgagtaagtcttcgacttcatcactttccgccacacttcgcgccacactttctgatgcattctctgatgcactctccgatgcaccttctgatgcgtcggaaacagatcctactgccgggactacctgaactggaacgagatcatcagtaagctctcttacaatctttctcggttcatagatgatggtaccctccgagtctgactcttctactgctgcagactctctatccgtcg

SEQ ID NO: 1844 - DNA, 14001 bp, Xanthophyllomyces dendrorhous
  misc_feature (370)..(379): n is a, c, g, or t
  misc_feature (587)..(596): n is a, c, g, or t
gtgacggactaggcagtgagttgggcagtgagccgggcagtgtggccaggccggccacatgagacgtgacctggatgcggtgtcgttacacaacgctgtgtaattccaacacttcggacagagtttggtccggaacgagagagtgagaattcttgcagccgcggagttcgaccaagagcagatgccgtctccttgaccggaagtttagtcaagcgagaggagaagggaggagagcctcaagctggaagcttggaagatatcaggggcgcaggcaaggaggctgagtggggacagtactcagtgcgcttgagctctcaagagggaagagatcatgcaatattgcagagggatatgaagaggttattgaagnnnnnnnnnnggaactatgaggatttaacgaggttccaagcttgggggagaaaaggggagatagctaacgactacatggtatatatgtcattcgagatgttagaccaaggaaacacaagcaagagcgaagagataccaaggaggagctgagagataccaaggaagagtcaagatataaccaagagagagttgagatgtaccaagagcgagttaagcannnnnnnnnngtaccaagatactgttgcaaaaatcggtctacattgcgcaaggtcaccctgcacggatcaaacccggatcagatcatgacagatcatgacattggctcagtataactatgcaggaaggacattagacactcgagtcagaccaaatcccaaacaaggaaagaagaaaggggaaaagaacacaacaggggaaagatattggcatgaagaaatagagagagaggaaaggaagaataatgaccacagtagagatattcataacgtattcagaaactatcctaatcaaactggtcgatcttgtgctagttaacttgagccggatctggaccctgattgagagcgaaggtaatgagtatgatcaatcacaattgaatatatttgctcgcatgtcaaggacttgctaggaaaggggcggtgaaatgaaatcggatataatcaacaacgtcgtattgcttcactgaacgtgattctcttaacacatcaattcactcaaactcactgtattctagccgagacacactaacacaaagtaaaggtatatctattaagagaactagggatgtgaagagaagacaggagagaattcctgagtcattgcagacgaggagtagagatttgaacgatatcatgatttaagcgcccatcacaaccgatattcagactgtgacgtcctatacccgacatgatgcacatacgctcaagagtgtgtagagccggtgtatcttgctgctctatgtaatatttagtcagcaacatttagtacagagttgtgatgagaatgactatctcaagcatggtcttgttctcattaagactatgaaagatgtcttcatatacgaaatgttgatcaatcgacactcaagaacgacaacagtgagccagatgttcaacctcactctgaccatggctgttgacatctaaacaacaacgcggtccttgttgaccaagatgaattagaagaaacattcgcgatttgtaatcgacttataggcaacatcggttcgaaaggctacggaacgatccgatgggaattgaaatcttgactttatcaaactacaaactatcaacatcaaatttctacgaagccgaatgccgactatgtctccttcgcccacagtattgagaactgacgtcccttcttctccgatttcggccgacctgccatgttccaagcctaaaggacaaagcccttcttcaagaaaacttctgcgtgcacttaccttcactcagctctcatctggcgttgtcttctcatcattccttcttattcacttaatcccgccggctttggtggctatcacgggtgatgatgggattggcagtggcttcttggttcgtattggcaccttctcctggctcgaggttctttattagattcacgtggtcaacctcgttggcattcgtcttgctatagctctttgcgagatcaaatactcaattattgattggttgatgtacaacagacgctcggccgagtatactaccagggtggaccagaaccactcatcatctacacatcactcaccgcccacgttgtgtcctccatcattcttcgagcattttaccccaaaacgcttccttctccacggtctccccattccgtatccggatttgcattagtacctctgatcataactcatctgcttacccatcggctcattccgtcgtccacatctaacaaactcattaatgctctctctccggccgagctcgacttgtcttttgtgactcatacactcacccggtatccaatatcttcttcgctggcttatattggtctcacgttctttggagtgtggcactccgtaggagggttgatcatcaccggtcgaaaagcgggtctcatcaagattcgcgagggtggaacgaagtactggcgaaagattacatctatgagcacatggggagttttgggcttggtagggctaggatgttggaggcttagaggcagctgggtctctataggaatggggaaaagaatcgacgaagtttatcgggttgcttatggattgataggattatgacatcattcatattggcatgtataatagcagagtttttgtagccggcgtttgatacaaagaggctgatagataaggaatggcacaagagagcatcgagagactggaacagtatgcaagatgatcttgaatatatgctaagacaagcacatgcacatgcacgaagaacattgaaccgtttatacgcacatcactcgcaacgagagtagattaagattgcatatgagacgtaccttgactcaatacaaggcaaagaggaaacataagaaggcaggaaggtcgacgacagctgtcctcagagcgtggatcctgagccattgacctgtgagacctcttgtgtccttcggattaccgtataccaatagtttgatgatgggagcgacctatcagaggaaagagaatacggaccaggcgtgtgaaaggaaggagacattttgagtatcaaccacagcagcttgcgtttgtaaagacggcctatcactggaggactttgatggacagtcaaaaagaaactcactgaagggacgaatgcgaaatgactgagagctaaaccagcacctgccaaataaaaagtacgcgatcgaaggccagtggatctactagccgcccaagcacctgttccaacccccattaaacctaacgtaccaaccgtaacggttcccgagacccaccagccttcaaaatagctctggatagcctttcctggaatgtctttctccctgtgaggttgtacgagtggccgcaaggaaaggaactctgacaatgagaaggtaagctgagaggttgccgccagaagaggaatcaaaggtagaaaagccggtgagctcggagctgttacaaagggagcaatcgaagtttgagagatgatttgagagactgctgggttctggtctatagcactcttgatgtatgtcacaccctgggtgataagctggtctaaaggggaagatgatgatgacattctcaggcgtgtagtaggacagatgagatggttcaattagcgacgtcaacagatcaaggtgaaaccttaagcagctacaaatcagtcaccctagacaaagcctcagattgtttttaattttccagcatccgatttttgggcttttgttcaaaacgattccaacctcttttctcttctcgcttttctctctttcgtttcttttctttctcttgtttctctctttcttcttccttcttccttctgtccgtgtgttccttcagtggttgtttcgaactttatctcaagtaaaagacgtcggatggagagtctttgtgcccttgcacggcactcttcttctcttctccctctacaaagctatctttccttacttcgcttccaaaggctggatttgcggctctttctcctatcaatgagatcgacccttcctgaaccagccaagattacccttcagaccctctcccatcttctcgccctcgtttctaagctcatacttaggaccgagggtttgtttcttgactcttctccttgcgggattcgaggcgagcggatccgagagacagaccacttccgcttgaggagcagttctccgtgccttcacgaatgctgctcccaatctgaatagcctttctttttctcttgtgtcaagtcgagacccagtcttgcttctgtctctttgtgtcctgaatgaaaacgatagatggatgtgcaggatgcacaacaagctgtccatccgctttcaagaagcaaagtgaacagtgaaagcagtaggcaagatacttgaacggttatccgcctgcccacattactatgcgcgttaatcagtgaaaaacatagcagcctgtcgtcgttagcacatgtatcttcctagtcctagtagaatcatgatgaggcattgggtcgatctacgaagcaagttgagctgaccatgcttcaaaattaattgtagtgtatggacggctcctctgtatccttattgattaagctcctatgcaaagaagtttcatctgtagatcaccgtctgaaccaccaaaggaccacaaatatccacacaactagcacgagaaacatcatgaaccagcaccattttccactctggttgcgtgccatcgaagtcatacgacgcatcgttcctttgagatagtaggacgtttgtgcaaagtgatcattctgtcatttagaagaatggacagaaggcgggatgagtatttcaagatgaaacccataagtagaggataatgctgttcaatcgtacggaccattgtctgaaggtccatgttcccatccttgacttcattccctatgctcaccgtgatctaaagtagtaagccgagcgcaaaatccagacccggttgagcaaaagcacgtgtcatgatagtcagctggagagaacccttcgatgaaaactccgatgctcaaaagctcgaatttttatataagaaggcagctgtagagatatagatgagaagtcaaaagcaaagaaaatcacaacatacgtctttgagcattttcacctttccaaacaggccatccaatctctcgtcgttctgtccttctaaatcctctggactctttctccgtttttcataactaggtaggaatccaccgccacctgtgatattcgatgagctcagcccgaggctcccagacgatgctttcttaccccatcggtcctcatctgacgaaggtggcaagggagatgaccgactggaggagggtacggacgagtaaggtgtggcatacgagttgcttgcctgcggatataacggggacggatttgtttgtggatacagtggttgacgtttggtgatctggcttcgggatgttggactatggacgagtccatataattgtgggaaaaagaatatacgttagtagagtagccggggcaaggtgaatggtttctgaacaagaaaccaaaaaaaggaaagtgaagatccttaccgactcatggttcaagatatcacacctcttttctcggtttgtaatcgaaacagacttgttctcacttatgcctcaatgatatgaatgtttagaaggtcttaagtggaggcgagatgtggtccgatggttgaaaatgaaagatgggaagttacttgttcgttctgtatacaaaacagtactgtcaggccaatcggctcgctggcatggaaatgatcctctcggcagagaccggcgaggatactcaatgcaagtgtcttattctcatcaatatctcctgactgtatattgagccaattcttctctcctgcgttttcacttgcggttggaaaagagccagcatgtgtggacagaccttttctttcatcggtcataggagcggaggtgctgcagagaaaagcatcgtgtaatgcgggtggagatagagaagacacaaacagacaaaaaaagaaaacaggaaagaaggagcgagagctaccaagaaacagaatggaactaaggaaacctaaagagggacgccggaggcaactcggagaacgtaatgaagatggaaatatagatagaaaggatcgaggattgatgtcaaaataaaaaagcagtggacgaaaatacgccctcgagtgggaaatgagcgatgtaaaacgactcatctcgcgttgagacaaaaatgtagaatgaagcgaaacaaaacaaagggcgagcgtgtatatatgcacgcagcggatgatctctctatctaacagcagttggcctttttggaaccagaatcgtccgaggtaggagcaattgtgatgttctcaccccctgcaggtcggacaatatcgttagatgattccaaagccttggatgagacgatgtggtagatttctgaatataggaatataaagccaaaagggcaaatacttagcagtctgatcagtgacttccaagatgagatacgaaaggataaaacaaacccgtcaaaatattctggaaagcagcctcgacattgttggcgtccagagcggaggtctcgataaaagataagttgttttcggctaaaattgagtagaaacgttacaagacggaacagaagatacgtttcagatcaatctagttctttctggcactctgattcgtataccggaacagcagcatagaagacataccagcaaatgccttagcctcatccgtgggaactgccctcaagtgcttgagatcactcttgtttccaaccaacatgatcacgatgttagaatccgcgtgatcccggagctccttcaaccagcgtgtcacattcacgtaagtggggtgcttggcgatatcatacaccaacagagcaccgacggctcctcgataatacctgtcaaccatatagacggattggtcaagtcagcttgacaagtcacatcgatagaaagccactgaattgaataggaaacgcacgccgaagtgatggctcggtatcgctcctgtccggctgttaggaagacaagagacacagagtgagttagatgtcgactaatgtgattcgattcctgcgatagatcgtcaagcttgatcgagaatctgcctcaacaacgtgatatgagagatcatccttctatcaagaactctaattttgtcgttggaagagattgtctatgttctgattatacatggttccaccaacagaatagcaaaggatgcagggcagagaggaaaagagagaaggaaccaaccagtatcccagatctgagccttgacagttttgtcgtccactttgatcgtccttgtagcaaactcgactccgatcgtcgatttggtgtcaaggttgaactcgttcaaagtgaaacgcgaaagcactgattgagaaagaaagtgttcgatatgctccttcagcggctatcgtgcagtagagatagagaggaacaaaagagaggaaacattgtcgacaaaaagtccacgtacaattactacagccgacagggacatgaggacaatcagtaagacaaacgacatgtgtcagcatgaccaaacccgatggaagaggtcatttgggttgtttgaattcatcggaagaccctccaagagatgtggttgttatcgtagacagtctacgacagatacagatcacacgaggttgataactcacgattttccgacgccagaatctccgataaggacgactttgaacaaatagtcgtagtttgatgattcagccatctatataaatcagatgatattgtagaatggcgaaagatcagtggtcaggatgatgaacgcttgtagggacatgaaactaaacgaaacactagatagcaggtatgacactgatgtggaagaataccggagcttcagtcaaatcaattcgaaaaagaagaagcagacatacgatttgttataataaaagaactttttatctgatgaggagtgtaggatgagtagtctgtaattcgtctgatggagcagcagttggttgttgatgttgatgggggatctttcccggaaactcacgggacagtttaacaaagaaatcactcgctaaggcgtaacaggctgtgccattcaatctctgatcagtttaactctatctactttccaatacgtttactcagatctgtagatacccatctcgttagaaaatattttattaaaatcatcaaagtcatcaagccggacgtaatgttacaatacagacgtagtttcaaatgaaagttaaggaataacaggtataaaagaagaataaacggcgaacggatgaagtttgtatactactagccaagaaaatgtctaagaaaaacgtatttaaggagatgagttaagaaggggtgtagcctctgtaggcgcttcattggattctctcccggaattagaagacctcgtgagcgctggactatcatcttctgggatggcagtgccggttgtgaaagataacgtgttatgtgactgagaagaaggctgctgggtgatatcgaatttgcatgttgggcactagttacaccatacacagatttcagtccagagattctctatatgtcatgagaggtatgtggagagaaagtagcctcacaagttttttccaacccttcagccagctatcgatctcatctctgtgaaaactgagaacgtcgcaggaggtgagacttggcccggtcggtattagaaagcatgctcaggatcaggtgttgatcgactcacatgtggccacaaggaagaatccgaacaacctctccttttttaaagttttcaagacagatcgtgcactgtgtcatcgaagtggcagtcaatgatcaatactgtcgatagttacgagagaaactacatacctcttcgacgccaaaatattcttgggggcgagcaaactgacggctcccgctttgtgccggtggttgtaatgatgatgacgaggatgcatttggatttgaatgatccagtggaacgttagtcgtttcgctatttatggctactcctgagaccggccgtccagtctgaagcttttcccaaccgtcctcggtccacaccctggtctctaaagagtcgacgacttccggtcgagctcgatcttttcttctcttacggatgacgccgagttgatggcatcccagagtggtgatcgtcagtaacgagggaagcaaaaggatcaagagaagaagatccatcaaaggccgctcccagtcttcatcctgggatagcatgatttcaacctcggtggaagactcttctgacggcggttgttcggtcttggccctaagttcgtcgagaagagatagataggtcgatcgagagataaagactgcagggatgtacaagtcagaagtatcctcaggagaatacatcgtgagcaagcttgttcgttccctacccaccgagtctggctcggatggatatgctggagcatcaccaacaagaacaacatccgcgcccagtgattgagcgaggcgaaccttggcggcaaacgagcatgagcctcgcatggttagagcaatctttggcagctccgagtgtgaagtgacgttggtcacacgatgggatggagaacgcgagagatgacgggcagagcaagcgagtatagttgtgtttttgggagcagaagagaagtctgttattgggaggagaagtcctgcgagagggttggtgatctcatgagcaggaaggtttggtggagaagatcctagacgctgggtgaaggaggcgaaccggacgggaaacgctgtacccaaagggagtatcttggggttctaatatataaggaggatcagaaacactgtactttcttctttgccagtgtattgatacttcaaggaaagccatagataggaaaatacgaccaggatgaaagtcgaacgaaccagaagttgtacccgacctcctccccatccccacccactcaaccagccgatccatccgacggaccccgatgttgtaaatccaatggatgaagcttcgtctggtgaagaaatagacttggtatccaacaagagtggagacgcaatagatactaaaaagaatgctagatggcagagccaaacgagagagacctttgaggaaagcatgagtggttgaggtggaagggatgaatgcgatccagcagttgttagaaccgctggatgacgtgagggacgtgcacaaaaataattatattaggtgatccgctcgactcattacatctttttgtagtcctatggaatgtatttttgtaatgaacgtctcggccgagtcatcggcagtgtttccagacaactatgatccgaccgagtaaagatgttgttgatatcttcagataccctagggatttttttttgatgaataaggagatctcgctcggcaacgatacggtgggttgatctttatcacgcatcaccagagactattgactgagagggtatcgtgcatagaactgcttcacatcagaggggttaagtgatgcttcgtatgacacaatctgctcttcctgccaatctttgagaccttactaaatagtcactgttttctccaatgcttcctttcttcaagttcattctttggcgacttctctgcacccttcgcgcgctctctctttctgtctctctctctaatgtatatatcttcggtctcttcaatggcgccggttgtgtccttgaagaactaggcctaaccaatggatgcgatcgttagggttgaagaaggtgactaaccggaaacggagtttgaatgtgccaaattaacaaaccggcttaactgattttttggttcttgaaaccttctctcctctcgttcgttccgtccattgagaacttttgaccctcttcttttcaagcaatcatggctgctacagttccagccagcttgaacccttcgcttaccgagcctcttgataaggttcggctcttgtcaaactccaagctttctcatcaatccaaaccggccaatcttctcaaggcgctcgagtcttcccttcctggtcctatttccccgacggcctactatgctgccttggtgtccacattacagcagacgattgccaaggagatcaaacagggtgagatctctgtgtccgagggtgaccttgtccctgccatcctgtacctccttgctgtagtagtcgactttgttccggtcgccgttgttcagagtcaatctgaaatgggcctgctcggaccgttgttccaaggagttatcatgtctggtggtgctgccggaggcgaggatgctgatgatgagttcaagcaaaccaagactatcatctctctcttccctccttgtggaccttctgctccctcacttcggtccctcattcacctcacccgacacgtcctcctgaccgctcccaccccagcactctctactcaaccctaccagaccgctttgtcctccctcctctctttgaccttggatccgagaccaagagtcagaaaggtctcccaggaggctatccgagatgttcttgctgcacctcacccacccgcggtcagacatccctatgctgagagggtaagcaaaggtcttatcaaggtgcttagcgagaaggttttcggagaggactcggagcagagaagaatctgggcgatcggtttcgttagaatggttgcctcttcgtggcctagcgaggtgagcatttatctatattccatctgacgaaaaaagacatctatcatctccatactgaccctggcatctgttcatttcttttcgccctcaagctaatttcgcctttacttgccgtcctcttgcccctcccgtccgccaacccccatttgcaatctcaaactctttcccttctctcacatcttctttcccaatctactacgtcaaactctttagaacccctcaaggtccctgttctgctcgccactatccttgcctctcctcccaaagacaaggaggtcctgccatcctggctcgaagtcgtcgagaatggaatgatctcgtgggctcgagaggattctgctgcctgttctgtcgaacttggcaaagtttggtccatggtctggggttaccttgaggacaaggactccagggagaagggagccaagattgctcaagccgcagagaagtgcttgattggtttgagcaggtactgtatcgatgaggacaccatgcgatccgctttggagttcaagccgtctgctgaggatctcgctggctcgactaaagccggcaagaagggcaagaaacagcagatccatcctcaggatcagaagacgcccggttctgaatcgcctctactcgttcagatcatcagcacgcttcaatctgctctgcacacccttagaacgcttcccttcttgccatcaacattacaaatcatcgcgtcattaatttcccgaatgagacttcggttgccgacatctaccccgtcaatcaattcttcaacggatccccgggatcctactgttgccgagaagcttttgctcggtttggtagccgaggtcgccgatctcagaactcagaagggatttgagttcagggagcgagctgacgaggtgcttggaatggcggtcgaggtgatgggaccagctgtgcttctgaatgctttgcccttgaacgtcgaaggcaaccgagatccttctcagcctggtcgagctttcttgcttcccatccttcgaaccaggacgaccaacacgtcgttgtcgtacttcaccactgtgtttgtcccgctttcggagagactcttcaacgctaagtcggctgtggagaagacgaggccgatagaggcaaaggtttatgaggctttggtcgagcaggtttggggatgtttgaagggattctgtgatttgccggtcgatctacccaaggttcgctttctctatctacatttataccataaacttatttcttgtctggttctcaccagttctaatcacatacttgcttccattgcttcgttttcgtctaaaaggctttcaccaatgactttgctgctttgattactcaagtgctgtacacccagccttcgctccgaccgtctctgctccgatcccttcagacccttgtggagacttcactgtctctttctaagtcctccgctccatccgccgagcttttgacctctttcggacttgatcagtctcatggaaaagccaatttgcttttccttcaagggatgagcaagaaccttctcgccgttctcttcaatgtgttctctcaagttggtcgggaacagcgaggaatggtcggagaggttatcgcttcttacttatctgtctctactgccgaggacatctcggccacatatgagaaggttgtccttcatctaggacaggctttggctgtcccttccgccaagcctgcccctggctcgactacttcaccaacgtcacacactatgcttgatctcctgatcttactcattccgttcctacccgccatctccgctcaagcgctctttgctcacgcgtccggggctgatgcgaaactcatcggaagtgacgacgtggccgtgcagaagaagagctaccgagtgttggctaggttggttgagcagggaggcaaggtcaagttgagcccgaccgaactggaacagtttgtagagagactcagcgacggaaaggaagttgtcttggctggtgctcgaagagtgagttgactcgtatggtttaggagtacgtattatgatcgtgactttgctgattgttttttctcataatctaccacgttcaggaccggatcattcttctgtccactctcattcccacgttccctgccgatcaacttcatctcatcccgtctcttttgcccgaggctgtgctcggtactaaggaggtcaacgaaaagactcgagacgctgctttcgacttggttgtcctcatgggtaacaagatgtcggagggtggagtcatcaaaagaaaccagcttgagggagcagacgatgaagcaatggccgatggtacgtctttatcttcttcctaatcataagcttgcccatctgggattcatactaaccggacgttgttcttctgagtcactctagcatctgctaccatccctgaatacttgacaatggtggctgctggtctagttggaactactcctcacatgatcagcgctt

SEQ ID NO: 1845 - DNA, 5327 bp, Xanthophyllomyces dendrorhous
ttgccaaacaatctttacccaacgctccttcgctgtgaagtcttccttgagctcacctggctttcacctttttctcttcaattacaagacgacgtgcctggagagatgaaatccgagcttatcagcacgcttgtcgttttcctctcctccaccaaccgagagatcgtcaagtctgctctcgggtttgtcaaggtcatcgtggtgatccttcccggttctgacattcagccccacctcgacaccttggttcctggactgctcttgtggtctcacgatcacaagaaccatttcaagggcaaagtgagacacatctttgagcgattgattcgaaaagtctcatacgaaagtgtgaaggcagctgctgaggaagctgcgctcaattcggaggaagcacctagcaagggaaactcagatggggtcaagttcttggagaacatccgtaagaggaaggagcgaagtaagaggaaaaaatcagccgctagagaggctgctgatgagaatggagatagggatatggaggacgatgacgatgatgtgagttatccttcactttcgctgtggtcagtatcaacagtttgccctcaaactcggatggctgacgttctcgcttgtttggtcttctgtggttctaccaggctccgtctaagtctcgagtctcgactggaaatgccttcgacgatgctttgtatggatccgagtctgagttggatgactctgaagacgacgaaggaactggcgctcaaaagggcgaccaggctggtcagcgagctgccaagggcaagggtaaggggcgagcgaaagacaccagagatgctacgttcatccgagatgatggagacgaacctatggacttgcttgaccgaggtatcgctggtcgactaaccagtgagtcttctcgagcttggtttacgtcacaaatgtaaggcaaatactcattgacttgattcttgtctttcttccgctgtagagcatgaccccgctgccaactctcgacgccgtaagcctgggcaggaggcatccaaattcaagaccgatgctgataccgggaagatgatgatcaacgacgactctgacaatgagagcaagcccgccaaggtgggaggtgccggagaaatggatatcgaaggtatggcctatcaggagcagctgactgccaccgagggtcagactagaggtgcccgaggtcaggtcgtgttcaacaaagacactaagcggggtcgagctagggaggccgatggagaggctatggttagtgttcatatattgtctagcttgttaccgcagcaacagctcacacaaactgaatcctgaatgtctgcgtgatgttaattagctggtcgatgcctcggaaggaggtcgaaagaaggccaaaaaggagaaacagaccaaagttcccgtcggaatggattacaaggccaaggttcgttcgagcgttgtctagctttctacatctctttcgtctctaatctctccttctctttattctgacgtctgctcgatgaataatctacctcgacccgatacagcgagccggtggagatattaaacgagctggagcgcctgatccgttcgcctacgtccccctcagccaggcccgagggtctggttcccgacagcacggcaaaggacaaaaggtcaacatcactggcaagaagaagggctctgctgcctaagcaggctgttgtcatctttgacttgtagtttttatctttcttccctcatatgtcttttggtcaacccctgttgtttctttctcttttcttttcgtttctctcttttcgtttgtctcgtctttttccggcaaattaatcctctgctgtttcacctgctccgcccttcatcttcccaacatgtttgttctcgacatttctctctaactccctatctatctccttatctccctccggtcactagatgcatgtgtctattaaattgacgtttctcaagcatgatgatatgcaagagcaccaaataagagctcgagaaagaacagggttgctggctgcaagatcacgcgagaggattagtcatcctattcggccgggcgagcaaagaatcactcactctataatctgtccggtctaaatcatccctttgacttccatcccatcccgtttccttcctcttacatcccagtttcacactctttctctttggtccaactgtctgcttgccttgtcaagcgtatacgtatctaaactctcatcaaaggcgtctgttagtaccgaaaccatcatgggaaacactccgtcccatcctcggtcggctccatcggcttctaaccagaatccttcgtcgtcgtcggcctcgtcgacaaataatcatcacatttccgcctcgtctgtcgtgtcttccattacatcccgtaccatccataagaatcgagatcgttcaacatcctctccgcctgtgctgactcctcagcagattattgaaaccgaagccctgatcgatggaggccataccgtgcctatgggactctatcagcttgctcctcaggatttctctcagcccgtggtcaagcagcttattcttgaccggaagcttggtccgttttacactggcctggatgactacgaagaggacgctgagccagaagaagtcctcaagtctcttagagaggccagggcggctgtggagactaagcgaatgcaactcaaggcaggtgatgatgaggccgctgcggcagtccaggcagtgatcccgaaggaaggctcaccgagtgaaagagagttgagggagctcgaatggtaccagggtgcaagtgaatgtcctttgtgagttatagaccgttccccacgcacacacgcactgcatgactgcatcactttttctcaacgcaaaccaactaaagcttcttcctctcttttttctgactcacttgaactgttttgtctaccctcgatcgccaacacagatgcttcctggtaaggtttcgcaaatcacgttctcacttctctggatgctcttcttacccgctttgaaacgcttgtcatgaatcattcgtgcccacagttttacccttccaacatcaacacttctcgttgctgtgatcagcctatctgcaccgaatgctttgtccagattaaacgggcggaagccacattgacccacttggtttgttcttgtcttctcttttcatcttctgaagctatcttgtgcatgaattgtagtctgctagaaactcaagtcgctactccgacaatccgtatgacaggaatccgaacctgcttgttgtcctttctgtatggaacccaattttggaatcatctataaccgaccaagggtcagtctctccatcttcattattgtctcattttgcctgttgtgcatcagcacgaacacgatcttccgctcacttcatcatcaatctgtcccgcggttcttgatcttgtatatcacaatcagcctcgtatcaccacttcacatcaccaaagctcactttcaactatctccgcaatatctactggagctggggattcttcattctcgatggatgacggcgctcctagtcctaggcgagaagatcggatgagaaggaagagtataggtcatactaattccggcgttgtcacgacaggtttgttctatcatcttgacctctctgttttcgactcctcttcttctccttcttctccttcttctccttcttctccttcttctccttcttctccttcttcttcattcagatgattgcgcacttgtgatacacagccgactgactgacttacttcatgatccacccttcatagatgaaatccgaccggattgggaagcaaagttggatgctgtcaaagctgttgctgctaggcgtgccaatcgtcggattgtgatgcgtcaggtatgttcttctcacaatctgaattactcaacttttatttgacgttatacccatctgctaatatcgaactgtttcatcatctgaaggtgggtgatcgattgattccggtaggagtaacatcatctcgaaccccaatagcgcccctacagcttggagaaggagaccagccgcaatctacaaatggaagaagaggctcaagaaggatgactggtgagatggcgatggtcggtcccgatattgaagaggtacgtataatcatccgcaaccttgagcacaccatgtaattcgactgttcttgaatgctgattccactcttttttttttcggatacaccggatctactcagatcatgatgatggaggccatgcgtttatctctacttgagcatgaacagcatcaagctcgtcaagccactgaggaacagaacaagaacaaatcttccgctatcactcctcaaaccccggtctctcgagaggatcctcaatcaagctcgagaggtgcatcttcctcaatcaccaatgcattaccgccaccgttgatcccaacgataaattcacagcaagagagacgaagagacggagatgaggaatcgcttttgtagaggaaatataccgagcgattcgttgtggaacgaggacttgaagagaacaatcgcatatggagaaatagacgttctcttcacttggcatctctgtaagtaccttcatccttgggcttgtcttctatcttgatactatctccgcctaacgtctagctgttcagccgggctgtctgtattatcaatatctgactgttttgtaatcttttaactgtcctcttctgctctgctgcttcagatcgtttcatactgtttgcccgcccagtctaatgctttcttcacagctcatcctgccaatcatctcgttgtacatcgatccatctctgtattcggccggtctctttttctcccctggtacatcactactcttctctgtttctgatacgtttctctcaaatcccctcttgctatctcgtctactgtccttctttcacgtctccgttatctcttcttctctagtgttccatttccatctgtagctcgtatgtccctctatacttcaccactctcttattttcttatctacccttcaagcctaagcgctatatgcctctacgactttactttcttttaacggttgccctccttcctccagccggtttgtctctctatgacctgtgctgatggaagcctttattgacatactacccaaatcttgtcactcttcatttgctcttttccttcccctccctttctgtcagtcgagatagctccgatggcgtgttttcttccaacttcttcattctgtcgtttctttccgtcattcctttgttctccattgcctatctgtcgggtgcttcatctcattcggcgcctttttctcttcgcctcttcttcattctctttgttttctatatatctctttctctcgttctatagatgtggcga

SEQ ID NO: 1846 - DNA, 8814 bp, Xanthophyllomyces dendrorhous
ctatagatgtggcgacgttgacttcacaacacatgtattcatgagcctcttccctcttccatttcgttcttcctactttctcttttctttctcttcatttcatagaaggaccacgtggctaccataacagaaccaggtttgtaagaaaaagaaacggatatgatggtttgcgctatgaacgaagaaatttgatcgaacgacagcgatagacggagcgacaagaacgagagaacggatcttggaagtcctgcgatgcttcgagtgcttcgtatggagaccaggctgagggcggaaaggaagaggcgacggagagatatacgatgtgacgtgttgcatctgcaagcgggtttgttcttgattaaagttacattatgatggaaatgcgtatagcacttagatgtccgtttggaaatatgatgattttgagctggtctagtcaagagacacaagtcatagggttctggaaacagaagtttgagaccgttagggaacgaccaacgattctgttgatggtgtatagatagtgacggcaacgactgaccttctggttttcgatatgttacaatgcatatttacaataacttattctgctgagacatcgcttaatctctaaggactatgaggaaagtcgacggtaaatgcgggtctgagctcgagcacctcaagaactggaagggaggacaaaggagtagaccatggtagaatagatatcactcactcttcacgagagcgaaggactgttctagacgacggaaagaaaactcttcatgtcacctttggttttgacgtcctgatgatcatcatccctccgatctttccttttactttattctcctgaaattgtctcgccttcaacatcttcaatccttcttccaaaagcttgtacatgtcggctgaatatgtcctttccgctttggataacccgaatacgggtcttgcttcttcttccaaaggagaaaacaacgacggcctcctcgacgttgcagcagatgaaagaacggctgtcgagactgagaacgatctatgttttgaacggtcggtcgggatgaaacttgtggccgaatgtggaggaagcatgaaatctctcggttgacgaggtaagatcaatgtgaagtctgcgagaggatcttcttcggaaggatcgtcacctgcttcacttgccgttggggtaggtaacggtggtctgatatggtcaccttcgatcgagtttgaagaaagcgttgacatccttgatgtgaggtagtcttccggttgatttttcgagtagaccgacgtccagccgtcgccgatatactgcttctggtatggttccagatgcatgggttccgaaacgggtggaggtgacggtaagcaagaggaggatgacatggacgggatagtatctcgggtgatttgcggatgaggtatgggactatctggtagagctgttgtcgaccggtgaggttggttcttcctctcaacactgatactgacaacgatgatgatggctagacgacagagatagaaggacaaaaggccatcagaattaggagatggatgggaatgacaacaattagtttttggggtttggtctgcgcttaattatgacgtttttctttctttccttcttgatagaaaaagaatgaaacgaaagaaaacccgttgctacatctctttctatctattgagtttgatatcctgatcttgtcatctatacatcgttcgattgacttgccgctctcgcttttctatacacaaatccgagtctacacgattctggctcgcccgacaagttttagaactggagaaaacacattggatctctttcttttcttttctaaacacaaaattccacgaattatctaaccaaagactaaaagaaatacaaatcccatctagagccactcgattgtgcccgggggtttgctggtgatatcgtaggttattcggttgataccagtcacctcgttcgtgattcgggacgagatctttcggaggacggcaggagggaagtggaaccaatcggcagtcatgaagtcatcagtagcgaccgctcggagggcgatgacctgatcgtaagtcctcttatcaccggcaacaccaacagccttgacgggcaagagagcggcgaaagcctgcgagatctgatcgtacaagccggcggctcggatctcttcgatgtaaattgcgtcagccttctggagaagagcgacctggtcccgagtgacaggtccaagaattcgaatagcaagccccggtccagggaacgggtgtcgtccaaccaagtgctcggggatcttgaggagtcgtccaagggctcggacttcgtctggaaaagaaggggagtttccatagggacggccacgatcagccattgagctcacgaaaacagaagcagagaggaggaagagataaccaacccttgaaaagctctcggaggggctcgatcaacttcaacttcatgtcggccaagagaccaccaacgttgtggtgagtcttgatagtggccgagggacccttgaaactcagactctcaatgacatcagggaagagcgttccctgaagaagccactcaatctttcccttttcaccggcgtaaccggactcctcgaacgaggcctcaagctcggctgccttcttctcgaacacctcgatgaaggtgtttccaatgatctttcgctttcgctccggatcctcgacaccctccaatcgagacaagaataggtcggacgcgtcaaccactgtaaggttgacaccgaggtccttgttaagcatctcgtggacctgcttggcctcacctcctcgaagcactccgttgtcaaccatgatagcgtggaatcttgtgaaccgaaagtcggaaaaaggaagagaatagaatcgaaagcagactcgaatcgactcagtagatatacacacggatcgtcacatggacatgttgcaagacctaccgatctccgatggcctcgtgcatgagcttggcggcgacggaagagtcaactccaccagaaacagctccgatgacctgtcccttctctccacagatggctcggattcgctggatctccttctcaatgaaggtgtcctattgaaacgagaatgaaggtgaattttggtcaggtcagaagaacagatttgaaagaacagagtgagaagatgattcagacagaccatgttccagttggttcgggcctggcagacgccgacaacgaagttcttgatgacctccttacccataggcgagtgggtgacctcggcgtggaactgaattccatagatgggcttggactcgtgggcgatggcagcaaagggtgcggtaggggtcttggcgatagtcacaaagttgggagggcaggcggtgacctggtctccgtgggacatccaaacctgtttgtttgtttgtttgtttgtttgcgcagaagatacaaaagttcagagctggactttagtggtgttgtctaaagaaagtcgatagagtttatagtgaaagagaacgaacaggcatggactgggcaagtccctcgaagagagcatcagcggaagcgtgtccggtcttgacgacctcaatatcggcaacaccgtactctcgcttgttgtgggcggcgacggcctcctcaccaccgaaggtgtatgcgatttcctagaggttcacgtacaataagacgaccaaaccatcaatatgaattgacgtgcatgtgaatatatgagaatcaaatgggacgcacgtgaagaccgtagcagatacccatgacggggactccgaaggtgaacacctcgggatcaactcgaggagcatcggcctcgtaggcggagtaaggggatccagaaaggatgatacctggtatcgactataagtaagctctctgactcaatagaaaatatggaagagaagagaagagcgagcaacttacccttgggcttccagccgagctcagagatcttctgggtgcacggcaaaagctcacagtagatgttgaactctcggcatcgtcgagcaatcaggtgcgagtactgagagagagaattatgatgaaatagtcgatagccatgttgataacgaggaaggagagagataagtttgtatgaagaaaacgaaatcagtctcaagctgatgtttgctcaaccaaaatgtccaaaagagagtctagacacaaacctgcgatccaaaatcaaggatgaggatggtatcgtaggcggtgtgaatagctgtgatggaacagagatcatagaacgagagttttgggcttgagtcagtcttcgtacgatgggacgaaaggtgagtcaggctgagacttgagggtaacaatcagccctggcagtgtcggctgccctgaatgcgtgttcaccggattgccccggaaaacgtctaaatccagactctttcgagaaaataaagcagaacaacatactgagatcagacccaaggttgtccattgtgaaggagagagacagatgtacaagggaagggagctggaggatggggaaaagggtgtgggtgggatggttgtcggacgacggaaacgacggcaaaagaggcccaaaaaaattgtaaaattaaaaccaaaatcagacagataacgatgtttggttacatgtttagcctggtccggccgtaaccacactccgaccagagcgctatacgtccgcttccagagagcacacacaacaacgcatacacacatacattgagggtataaaattcatatcatagcagcatcttgttctctgaccatctctcagtgcgaggggagagggataacttccattttcgagccagaaagagaaagaaaagtcgttgggttacgagtgaattaagcggacgtctgttggttcttcttcaccctgactgcaatcacggtgatactgaatagatcaaacatgagagaaacacaaacactcgatgcatccgtcaatatcggagagcacagaaagataacaggagaggagaacccactcatccgtcttgcctcctctgaagttcaagccttccttggccgcagcgagtgtgaagggcgagaccttctcggtcgaacccatacagacctgaccatatgtcttcaagccatctgccaacttttgagcgacactcaattttttagatgcggtcactccaaacttgggcgatggcggaggagtctctatctgtgcttgcgctaagagaaggagaacctcggagttgtggacgttatcgcctagtccgtccgtctatgtcgggcccgtccggatccggagaagatcaaatagaaataaaccaagagcgtcggtataaccggtcttttttctttttctaatcttctcttccatcttgatgactccctatctgtctatctttcccctttcttccaatacctgaaacaaggagaaggagggaaagaacgtacaaacaaaatcacaacatctccatcttccaactgaacttcaaacaagtccgcgtccctaggaagatcagtgatgtttgtctcgtatcctcttcgatggggaacctttgctaactgcctcgggcagctaacagcgtgagaaatgaaggaacacaaaaccagatgcatgctaagcaaggaaagaaagaattgccatgcaaggcccgaatgagaagagaagcctcacttgaagtaatgctgttgtgctccaggcacatcaagaaactcattgttttttcggataacgaggtatcccgaatcacccaagctgagtcaagcaggagaggaggacaaaaagaaacaaagagcgaacggagaaagacatgaagcaatcatcagactggtgcgctaaaagatgtcaagaactctcttctgggaaaggacgtactttgcagatgttaacttgccgtccgacccatcgagctgcaatacacaagccgtagctgaacctttttgaatgaaaggcagaacccgcaatgtccaactctgttaacagctgcccagcacgcaaagatgagatcttgattatatgcaagacaacgataggcggacaaacccgctttgacctcggcatcaaccttaacgccatcataagccttctgaagaatatctttcggctgagccgatacatcaccctgagcggccttccaggcgtgatacatcagcgcttgagagaacacggatggatcgactccactctcggcccaaccacctactccgtctgctactgctaacgtcgtcaactgaatcgttcaatcgagccgatcaggacgcaagaaatcagtcccaacaaatccaatttacagatttccatcatgaaagaattacccgaaaatgatcagtctcaagacctatctctggtgcgaaaagcgggaatcactcttgaagataaaagaaagaatgaaacaaattaactggaaactaacctgatcggccggtctttcatgtatcatgaagaaatcctcacccgcatcctttttatcttttttgactctgacctcgccaaccttgcctgacgatgtctctccattgaactcagaactaccttccgtccagttgatcatccgctctctccattcacccttctcgccgcctgatgagatacctctgggtatttgctcgcctcgtcttctcggttttccagcgaacgaaaggccgatctcgaatgtgaagtttggcgagtctttcagagtccgtgcgggattgggtgaggttgaggagggtggaggagaggaaaagtaccggaagagaatagggagggaggtcagagttgatgatctggggaccgagaacgggaaaactaaaggtggtcgaaacattcttctctttctctttcgcttttccgagtcttgtctttatttgttccactggtatcccctcagatggtgaggtcgaaggttggatagtgatgtttgatcaaacgcgaaaggccgcatgaatttctgtacaggtcaactccgatagaaatgatgaaatctatttctatgatcaaccctaacattctttcgaggtattagaatcaacctataatgttcttttctcttcctcgctattcttcaagtgcaggcgaaacatgaggactgagcttgaaaagagaaatggccgttctataatttacggcaagttgtcaagaagcttcagctaccttttttttgttgagagaaagagaataataaagaggagagagaaaacgacaggcaggaaagagaggaaatgaaccaagggagaagaggaggcggggagggaaaggagatgaagggtatctgagcaaaaaggaaaccgactgcatctgtccctctttatgggttgatcttttagtgtgcgcgtcccctctaggaagaaggagacgggtaaaggaagtagggacgaagggagggaacaaaaagagtgagggagacaaaagggtcaagaaatgcagaagagcaaaaagagaaggaacaaaaaacgaaagaatcgtgactcgtgaaattaggatggggaaggaggagagagtaaagagctacatgcgaaagaaagacacagaaaacccccttggggctctcttgtcaatttagagatactgggccaactgggaagatctaatctttccgtcgagaccttcgacggtggtcaaatgcctgacgagagcgatgagctgttctctagtctctgtggtgatctcactctcgtgctcgctcgagagaacgtacacaaatacatgaagcaaccggtcgatgtggctcatcaggatgggaaggaccttggggtccgaagatgaaacctggaagagctggaagatgcactggaagacgattcggttctcgataaagtcattcttgaggggcaaagcctcaaacatgatcggaaggacctgatccagaggaacaacgtgcatatccttgcagatgattctggccaccgcaccagcagcgttatctctaccctgtccatgagcggagctttcaccctcggcctgggcgaacaacggtcggaggacggtcaacaatctgacggcatcgtcaaactgaagctgggcatccatgttctcaacaagaattccagcggcgaacgcagcgttcgatcggacctcggcctccacatcagacaaaccctgatagatgagctcgaatagagcaggcacgtaaggagtcacgctacccttcaggccagtgatgatctctcccaaagatccgacggccatcgatcgatcggatgacgatcgcttggcgttctgttcaattggttttcaacgatcgtattttatcagatactcattagcacggaacgaactgtgctttaagagaggatcgcaaaaccaaagactaacgtaaaacttcttgatgagaggaaggaactgtccaaagggctgagcgaaatcagctccaaggacactggcgagggcgccgacaatgtcactggcgttagagatcaacgcagactcgtactccgagctttccccttcgatagcatcttcctcatcctcatcaggatcctgctggcaaagggatttctcctgaaggatctcagaagcatacaaagcgatcttctcgacgtctgaaatgatagttggcaatcggttggtaagtaaagaaaaatgtacatttgtgcagagacgctttacgtacgtccttcaacaagtgcgggtccgcatttgttcatcgcctccgaaagctcattagcgcacatgataacgaccgtcctaaacaatcaccgacaatgaacaagaagcaaaggaaacaaagatgaaaaaaattccagtcagaaactcatgcaaaacgaataaggggatcgatagagaacgaaaaggtttttgattttgcatggaggttgccgatggtcaatttagacagaggagggaataagggggtttcagatacgcaaaaggtaatcaagttcatttctttggcttttcctaggagcctcgtagtgagctgagttgata

SEQ ID NO: 1847 - DNA, 91877 bp, Xanthophyllomyces dendrorhous
  misc_feature (42656)..(42665): n is a, c, g, or t
acaagacttgacacgatcgagagaaaaactcacttgtcatcttcggcatcccacatgttgaagatagcgggaaggacaacatcaacgagctgcttgacgttggagtgaagcggcacggtctatatccccaaacaagacatccatccaagtcaattacgtgctcaagatgcataaaaaagaattgatgaaattactactcacgacgttcaatccgggggtccaaggggcaggctcggagagatcgtagaaggtgttgatgaacttgaacaagctggacaaggcagattttcggataccctcgtagtagtgatccaaaagcttgacaagcacagtgacggatcgttcaacgtagggcaagaaagcttgaccggtggcggcaaagacatcaccaatcgcatcagcagcgacctccttctcgatcgcgattccagagttgacaccgccaaagagcttctcgagctcgtctgcgtcgtcctcaatgtcaaggaactcggaatcgtcttcgtcatcgatagtgcccttagagtgaccgccatctgaggtgaaagcctcaatagcggcggcgacattgtccgaaatgtttccagtctcgttgaggtactcatcggtctcgctctgatcgcacgagctcaagagggactcgagcacgttgggcaagtagggcacaaactcttcttcgaacaccttggccatggtggcaaagaaaatgaaggagcattccctcaacctggggttatcgaggatgagaccctcgaaagccaacttgatgcatggctggaagtaaggtcggaagacatctttaccgacggcctcagcgatcgtaccgagagtatcggtggcaatacctcggagatcagtctcctcgccatcgttcttgagcgtcaagaaaggctgcatcctggtgatggtggcctcgaagtaagggatgaaacccgacttggatgcatgagcggctgagccgatcgctcctgtgactgtagttcggacgggaagaggcgcattttcgagaaggacgatcagtcgctccatgagcaaaggaaggtagtttgagatgtcgtctccgaggatctcgagatacgagtcgagagcagcgcaagcagacttctgggtagcagggtccgagatgtggttgaaaaggatggggacgatggcctcgtgcttgagtgcacattcttccggcaaccactcgcacaagcatccgagggcaatgcaggcggccttcttgaccttgggatcctggtcagcaagaccggcctcgataattggccagagctgggcaacgtggggtcgaatgaattcagagcaaccctcgacagtgacaccgagcgccatgagcgcagcctttcgggcggaagggtcggcggaagccatgtcagtctgaatgtgtctagagagagaggggaagatctgggtaggaggaagcgtctgagagagaacatccaaagttcggaaggcgagctaggagagaagacatacaaaacaaaaacaagtttaatggacagtcgtagtatatggggttcgataaaataaagatacatactcttgaaggagaatcctcatcggcatcctccgattcatcttctcgaccgatagggagcaacctggcgagaatatcgtcacccaagtttgcctgctggaccttcttggacttgtacttgatcgtccacaggagggcgttcaaagcgaggactctgatgtcatcatcgtacgactgggtctgaccaccagtaaggaagaagttgacaaggtcgggcacgttcttggagatcaatggagtttcctacagagggagaagtacgataagcgacaagagagtcagggtcagtacgagagcttttcggtaagagacagagacagaaaagctgagaaagacgaacaaggatgagaagagtctcgaaaacgtcgaacccagttcggcaggcatcctcattgccggattccatggcctggtggagaacgttgaccatagcaggaatcatagattggaaggcggcaatatcggccttgtcttcagtatcgatgtactcggcaacctttcccaaggccctatgggacagagtaaagagagaatgtacaggttagtgatgtcatgatcgcttccgacagagaatggtctcaaacgctgtgcatctcacttcaaggtagttatcctgacttcctcgctctcggcgtcacccaggctggttcggaagatagcgaacatggtggtcaattcgttttgaagacagtcagccacagtgtcgaggagagcgtagagcatgtatagaccaatctctcgatgtccggcaagcggagcggcggagagctggtagaggaaaggtaggagctcaggccactgaggaggggagagctcaagctcgtaagaggcgatggcggagatgaccctggaggccgagtgtcggacaagagtgctatagaagacaaaatcaggagttagctatagagagcaacaggatgtgagatgaagtcttagacgcacgtctcctccttaacaacggtctcgagggagttgtgcttgatctgtgttcggatgttttgaggaacttctttccacatctttccgtccttggcgaccactcgtttacgaagctcgacagctgccagttgccggatctgatggatagggagatgtaaccgaatgaaagagaagcaggaagggaagggggagggaaaagaagataaaaacaaccatcagaaattctttcaagagctcgtctgttcaaaggcaataaacctacgttcgacataggcgaggttgccatgatctcgtagagagcgggtatacattcggcgctcttatagaattgagtgttgagcgtttgggttgcctgtggatgggtgtatgcgtgtatgtttagaatatggaataaggaaaaaagaaagaaaagagaacgaatgtatatggtaaatggcaggcaggcgttgcaaaaaggaacgtttcatattcggcccggactactgacctgctggatgacgttggtatccggggcagaggtctgctccaacagggcgtgcaggttctgaacgaaagactggaagaaaaggcagtgacgacggtgataacagacatcgacgagacttgtttagcgaggaaagatcaagattgcggtgagttcttggtacacagttgaataaggacgaacggtcatttctaaatcgagaccagaggcagagaggagagaaaaacagagattgaaagtgtgaaggccgaaaggaaaaacggaacgagagacggtccgggtggtggcgtactgatgggagtaagcctaccgatgtgggtatgtaggagggttggaggtcaagagagaaagaacacaagtggcaacgtccaaaggcgagagaagggatcctcaactttcgaccgagtgaggagaaaaaaaagtaaaaaatgttgacaggttttttttcctctaggaacggggctgtaaccaagaagaagctgtgttgggccaaaaggatgcacgtgctgggtaagtgtgagataaaactgtcagggatgtgaccggagtgttacaccatggtaaccttctcctgcttctgtcgcttgtcctgctttcgtcgctcctcctgcttcgttattccttatgctttctcattgcatcatggtcttgcagcgcaagcgcttctagcaccctctgtgattcatcctcatatgcacaatcgttgaagtctgaggaggatataaaagacgggactcctttgccaaccatagtatagtctcccaagcctggatcctttgtcactcctctgttccctagtactcttgttcccagtgttatatcaatctggttcttccgatttctccgccttgcgccctcgtcacgactactagagccagagggcctgaacttccttcttgtcagccacatctcctagttggttacaaccatcgtaacctctccattacccctttgaaaccgaaccctgacaacagccgccacataagcacgtgagacaagagcatgtatgttccatctttcctgaaagacccgagagaaacgaggcaggaagcagctgatcgtcaacaagaccaatggatgacatgccggtgtcagtcaggctgtgctcttggtgaccggtgatgacgaccccgagggtgagaatgagagagatctgggtgtatgtgagtgagtatgcgcatatgtgcgctcggtgccttgggcctgtcgtctggtcttcccagggcactcttcaaccctgttctctgttcagtgtgtcaaggcacacacgcgcttactcactgacctactcacatacccagttgatcatctgatatcgttcctcttctctcatctctgtctttccggtatctttctcccgctcttattggactgaactctctctttgttgatctcatgctgtctttgctcacactgatctcacaccaaccttgatcgctaacctcactcatctacacacattctctctcttaccatctcatttatattcccgcttcctctctctctatcatactcttactcatacactcactcacactctgtccatcacgatggtatcgaccgtattctcttctaagcattttctcacaccatgttcacgctcagttcggtccatcagatccatgtccagaaaggtgggctgagcttctctcgccgtctcatggttcttgtctcgtccagattgttttcctcaggcctgactctctctccccacaatgccgcagatccttgtcaagaagatggaagaggctattccaattaaacgggaaaaggttgctgctctggtcagtttaatctctttgtgccttgtcccaatcgatatgctagtctcccatcgctaaccaatcggttacatccatccggatatctccgacggacttatcaccaaacttttacaacttcagaaaaagaaccatggctcactcgaactagagaccatcaagctcgatcatattctcaacggtggtagaggactcaccacattgctctgggaaggatcttccctcgatcctaacgaaggaatgtgagacaatcttacactttcctttctcttgctcatcttacctttcagaagttcacttcatttgaccttcaatcgttttcgtgttcatctctcttcgtatcctttctcttccgttacttgctcttcatccacttctcagccgattccgttctcgaacgctccccgagattctcaagacgctaccaaacccaagggcagagtcaatgttttggtatctgcttactggtgaagtgcccacaaaggacgaagccgttgggttctccaaagatctcgcgaagatctctggacttggcagagaggttgaaaacgtgatggataggtgaatctcgctctctttatttcgagcttactaccttgattaacgtgggtacttacaaacatgcttctttctccatttctccctatttcttctctctctcttccttttattttaactcctcctatcagtttacctcgggcgacccatccgatgacccaactgcagattggagtggccctcctcgccaaccagtctgctttctctcctctttacgcttcggaaaccccactcgcaaagtaggcactctctcttttctcttgattctcttcacaattaaaactcaacgcttacctctccacctcgttcccaactaggtcagagtattggcgatcaacattggacgactcacttgcgcttgtagcgaagctacccagtctggcagcaagaatctatcgaaatacatactttcctaatagagagctcgctcactctggcaaacaggccggtgatctaatccgtttgtacaatttccttctcaaggcactcatgtagtacccatgtccacagtaccgacgcctccagttcgatgtaaacagacagctacgcttcgaccatgaagtacatgatcagttcagacaaggacgcgccttgtcgatctgtaaccttcgaagaatatctcggcttgtatatgtgcgtcccctcttcaaagtccttacatcgtttctgcctcttcatggcccatctcagaagctcacgtgccttctaaacttcagcgcactccattcagaccacgaaggaggaaatgttagcggtcagtccctctatctcgcatcatttttcatcacttggtccgttcatcctcctttctctattgaaatcttctccgcatcaaaatagcacatgcgacgcaactcgttgggtctgctctggtcaacccctttacggcctattcgttagtctcctctctctcgactcgaattcatcacatagttcgaaacttttagggctgacgctgtagacaaacttgtcacctctagtgccggcgtggcaggtctatccggacccctgcacggacttgccaaccaaaacgtcctcaagtttattctccagatgcaagccaagctatctgcaaaccctacagaacaggatgagagtgacgagcaggccccgcccaaacaaatcaccgatgaagatgttaagacttatctatgggactacctcaagtctggtcgggttatccctgggtttgtgtcttctctgaaggacttctctatatacatggtttggctggttcctgtctaatctccacatgggactctttcttcttctttcatacagatatggccacgccgttctccggtcaactgacccccgattcaccgcgcttcaagactttacccagcggcacgccaaagaatttgagaacagcgaggttgtcaggctcgtcaaagtcctggcagaaatcactcctggagtgctcaaggagcacggaaagacgaaaaatccgaacccgaatgttgatgccacgtctggttgtttactccatcattacggtctcacccagatagactactacacgggtaggtcgttcctttctcacgtctccttctccctcttggccccatctgttcttgtgacagtaaaactaacatctttcatcgccttttcattgtactttctgtccatccttcccacagtcattttcggaatttccagaggtttgtgaaacttgttattcatcgctgtcacttttgatcattaagaagaactaatttcgaattcacgtcttgttcaaatctacctcagcaattggaacgtccgcccaacgtatgtctatgttctcttcttcctttataaaaaaaattgttctttcattcattcaattttgaccctgatattcttcacttcttcatctgtgtcttgcgtccggacagttgtttgggacagagcgcttggcctaccaatcgagcgacctaaatcaatcacactcgatggactcgaaagactcgctagagccaagctcgaaggcggggctgacgggcagtgaggaatacaggaaatctcatattctgatctttggtcttgatctgtacccagtcattcaggcagatggcatgcaagtccaaaagatgatttcccctttttctttctctatctgtcttccgtccccctcatcatacactatcctttctcagtctctcttccacaccccatcactttctcattttgctcctgcccctttgtattctctcgcatgtgtcttttttgtatttcattgcaagtctattcatgagttttctttgttaacgagtattgggttgtgcacactgttgtgaggcagtcacgtgacaacgcatcttcatgtggctgtgtcttcggcgttgagcgagccgggatgccgacgtgattcgcaagcgagttgtggcgaaagatggtctgtacaagaaacctcaaaagcaacgacaaagtctatcccattttctcttctctcttcatacacaactaccatcggataaagataaacctctactctttcaagcttctttctctggacagcacatattagctcgtccaaggatggcgctcgtaccgaaaggacgtcttcggactcctttgtctcttccgagaccaccaccattaccagtcccacccagatcaaatagatcgttttcctcagcccaattccgactcagagctcgattgaacattccttttaccgctagaccagcagctcagtcgacctcgggaggctcatcctctaagagccgctcgagtccactgtctgcgcttcagaacttggctaaatcattgtttggtaaggcacccaaaaggtttttcaactcgagcgccacttcgttcaataagaaagctttcggccacaaatggttgccatcggatatggcatcccgaatcagactcgccaacgcaagtccaacatttcatcccgtcgtttccggtctacgagctgggacgttcagaggtccaatgggtccgggagtcaagtatggcttcaaagtaggcggaggggtcgcacaggttgggttaggtagtgctaggggttacgcgacagcggcgagacctctgtttgagaatctattgggcaatgtgcctcgtgagtttttctctctctttaatcttgatagggcttagcgcgtttccgttgtttccatcgaactgatgtgtaccgtttttgtttctgggatcctttcgtaagtcgtcctccgagcgttgggcaattctctagaggatgaagccgagaaacttgcaaagaagagggctcatccaaggtccacccattttttcaagaagacggcttcctcttcttcttctggaacctcgtccctacttggccgaacttttaagatcgatctcgcacataagaaggctgttcagaagtccttcccagccggttctgttgctgttgaactcgaggaggaggtggtggtggagacagacggagaagagcttacggctagcctggaggaagagtttgatgcattctttggtccttccattatgcacatcttacctgctcctcgatcacccggaaagaagacaacactgtctatcccttttaatattgatgaatctatcgtcccggatcatcagacttcgctgtcccgtcttgccgctttccatcgagagtcttaccgtgcgcatgcagctcggattgatggtttgttgactgcacttgccgacaggggtgtcttcctagacgatcacgtccgggaggaaacgatcgttgatgagccaggaggagatatcactgggctgaaggtcgtctggctcgatagagacttggatgaagttcggtcgatcttgcgtcgagtaggagttgatgtggaaggaaccaatggtgaaaactcctggtggttcctcttgggttcggagagagattgtcggatgaacgatttggttgattcgagtttcgtctacccgactctgtccttcgctgcctcctctgtactcgtctcccaggcgaccgggcaacacatgtcgacggctgagaggtccgaacgagcgctaggatactcgaacgtctcatccggtatcagtttctccagcggtttcctcagtcaggtcgaggagagtgacatcgagtcggacgaggagactgacgatgagtggagtggaagtgagagcggatatggttcctttgtttctttctgagtcgctcttctttctcttttcttctttcttctctttgcttctgcccatttctcgtcttcttgccttttcgccttgtattttctgtgcttccgggatgttcctttccctgttggccttttcctctttcttctctctggttcacattctgtctcgatttctctacatctctgcgctactgctctcggcctgctctcatatatgattttacgactccatatggcaaagagagacgcatagcattatatgggatatttgtattttgattaaaacctacagcgcatcactctcatgtgattctcacatccccagtacttgtacctagcctgtcatacaacagagaacactagtactttcgatccatgacagtctgatggacgttgtcctcgcagtccttcagatccttgcttcccagcacgaccgacgaaagcgggggcggcgatgccagtaccttatttaagtagacagcgagcacagtaagtgaagacgagtcgctcgtccatggccaagcgactggtccttcttgatcaagggatgattccttgacgtgtcggtcgacggcctagttgagccctcgttcatatcccaaacagacagaacatacattgtcagcatgagcaatagacgacagcgcgagagtttgtagcatacactcacctcatcgatctctgtctttaagtgaagtactcctagctcaggtttgtcaggagatctctgtctgcctgttgcgcaagagtgagaaccggaagagagatgtagatgatacgggagacggtgagaacggcacatctgtttacgtatgaagctgggccggcggatctagagatggagagtgtttacttacacaaggtctattcaatatcggctcgacaatatcaaacgtcagggcgacttgatgcgtatgacaacgagcagagaggcatgaggaccacatccaagagccaaaacaacgtggtcggttgagatcctggtctaaaccgtgtagcgaccaagcagtacgaagactatagtcgatcgagagaaaacgtgaagatggatcgactcacacagactattgaccacatccttcatcatactctgagcctggacatcacttctgtcaacagcgcgttcaatttcttgctgcagcgcatcattcagtcctccttccgtgctcatgagcgggtcaaaaatcagctgcttccacttagtgtgtattatctgagatttagatgtgtcgatagaaccaatcatcagcgcctccacatttcggacaaaatcagaagatcaagaagagaatgtgtgacataatggcccatctggtatagaacaaatatacgtacttgattcaaatccaaaccattcaaatccgaagggagtcgggtcggaccgcaacatctatcaagaaatctgaacaatctcaagatgtagctcgtaatcttaatgaatgcagttcgttgttccaagtacgtccgaatcatatccgtccctgcgcacgtggagaagacctacatgtaaacaatgatgtcgcagaagagtagaacaacgtatgcgcgcataagggtgagtgccgagaacagcgtaagaccaaggtggaatctattaaattaaatacagtaacctaccggcttaacaattgtttccagatgattatcaaagaacttctgaaggtcttggtgcagctttatgtacattggtattggtcgcccatcgacaactagatgaagagagacaaaggagagtgaatatgcctacccggattgatgtagtgcggggatgttactgacaaagtaccgctgtcgagatagtgcacatgttgtgaatagcagtgtagctgtttatataatccttagtgttgatgggtctatagagagaagatacagtgagcgtggcagatgtgatagtgtgagtctcggacttgatgacgtcgtgggtactctcgcttacaaagttgagccgacttagaatatcaggagtctatagaggcaactgaccgttcatgcagaacatcgtccaaagtacgttccacataattccactgatccaaataaggcgctttgggactgtttgtacaccgatagaccgaagcaagttagatatcagtagaacggctgttgaacacctgtatctattttacgatcttcatccaagaccagcggtcttcatcaagctggatgagtagaggctttgcctaaagacgtagagtatgtagtgactcacgatggtgcagaatcgcgcgaagatttatcagtctcagaagacatcgcgaatgaaggtgtgttcgacatgagatgagatgagatgagatgagatgtggcagcgagaacacgatgaagatgagattggaagtttggggaatgcttgtgttctgacagtaagcgcctgccaagaagtattgaggcacgtggttttatgtcacgtggtcgcattaagcacagccacactactctttctatccctcaccacctccatcatcatcacccatcacccatcacccatcacgctcacccaccatcgccgtgacctcagctaccgcttacgatggaaacatctctgccaacagatagcacagtaaagtctgtgatagtagttctgggaagcataccgataggtttggctgttatacttctagtttggctagccaaggtttggattgtgcctgttccgacgagaccgacaaggaatgtcgtcttgcttgttttaggtgaccttgggttcgttctggtcttcctttccttctactttaatctctgatatacgtagctgacgctgaaagttcccattttgttttcgtatccgatcgaggtaggaggagtccaagaatgatgtatcatgccaaatcttttgcggaccatgggtttcagactactcttgttgggttttcaggtctgtctggtctcagtcatcaattgtacttatcacttccgacgagtttacattgatggtgatttattgaaatattcagagaaaggatcgaatatccttccctcactcctctcgttaccgaattttcaatcaattgtcctacccaatcctccaaagattctcactaaagcgccccggtcagctttcctggtagtcggtcctctaaaagtgctgtttcagttggtatcaatattggaagtcctgctttggaaactggaagatcctccagaattcatattcgttcaagtcagtctcgttgtctctggagcgcgtcgctttgctgattgagtgagttaatggtaactgatcgtcgatgacctctcatttcactcttgcgtgatgtatactatcatccgaaattcaaaagaacccaccgtcaatcccaacattagcaatcgctcagctagtttgtctcgtgagagggtccaagttgatcattgactggcataacttaggttactctattcttgcgctcaaattgggaccagatcataccctggtaaaaattgcaaaaatgtacgtctatcatactgttagtacggtgattatgatctagctgattaaatcgttcattcttgaactgttacgcgcgttaatggaaacggacgggtgaacggtaggttcgaacggatttttggaaagaacgcgtatgctcatcttttcgtaacaaaagccatgagggactgggcttgtaaagagtggaacctccagttcgttccagttcttcttctttcttcgtctatttatctcattataaattttagcaatgtttgtgttccttgttttaattataacgaaaattcaaaaaagaggaaaaaaagcagtacttcatgatcgaccaccggaacatttccattcttgtgatcccgctgagactcacgatgtaagtatgctctcgttgccgagtttttctcgatttaacgaatccaaagaagcacttttaacatctactcgagacttccccaaatagcttttcactcgtctgtttcctacgtttccatcgaacttgaaatcgttcctacctagtacatctctcccccggtcgacccctttgacagaccttcaatcgccatcgacgctctcaagaacatcagcttcctcttttgcttctgtcgaccctattcccgtgtttagaggggacagaccagctgtattgatttcatcaacttcttggacgccagatgaggatttctcaattttgctcgaagcgttgagcttatatgagcagactgctagagaggagggaaagggagaacgcaggttaccgaaagtggtcatggttatcagtggaaaaggacctgggagggcacagtttgaaaaagaagtcgcagaaagaaaggagagcgaaggatgggaattcgtcagagtctggtgttgttgggttcacgtagaggattatccaaagctgttaggtgtgttccacttttttccttctcttctttcaccatcgtacttttttccttctgtagaatactgatatagtgaacattttgagtcttcaggctcagcagatctaggaatttctcttcattcgagttcttcagcgcttgatcttccgatgaagattgtagacatgtttggctgtggtctccccgtgtgctcattgaattttgcctggtacgtcattagttttgcagcgctaattaagtttagtacttaatcatgttttttctcttcccctttaatcttcttctccttggggatgtggttagcctgagtgagctcgtgagagatggacagaacggatatgttttctcaacagcctccgagttggcttctcgtctatctgttagtcttttctctcgcttgtgctttcagtctatctattatctctatcttggcaaaacgagatacgtgagcgttgacggttgtcgaatgtcgagacgtgatttgatcatataggaactacttcgagattttccgagttcagcacagtcgactggcaggctctcagaattcagacaagttattcaaggggatcagcgcagattaggatcgtggtcttcaaactgggatcgcgtcgttcgagtaaatctttcgctttctcctctttcctgatctgttgtagactgttttggtttaattcgactatttgttttattgattcttgcgtgtgttgtttcctttggttgaaccgatcgtagccgctggtcattaaaggtactgctggaggtgtggaagtccttagtgaggcttgagcttaaacctgggcccaatatcgtctgtcttatgaggcaagaacttttttttaaagcaagatgaagcaatttgtacacaatcaatgtagtcatggctcttagcattcagtcgttccagtctatgttcttttttcgctatctttcctcagctcgctcgttttgatgaatgacagagtgatggtcttaacggatatccattcgttcaagctcctccctggccaactccatcagtctccaactgtcttcttcatcgtctacctcttcctcccttccattctcgtctatacctccaacctcgacttcgtcatcatcattcgtttcgtcggaggtgaagttcatcgatcgtccaccacgtgcgatttctgcgctcagatcggttctcatacctgaactgacgagagacgaggggactaaggaatctgaacctcctagtctcctacgaagcgcttctctggcttttattgaagcaggggatttgatgacatcgttaccactgacggcgatggtggtgttgtggtgcaatgaagaaggtcgagacgatgttggaacggaaggagaagaaggaggggacagtgtgggaggaagaggaggggtgagaggggttgggtgttcgtaaatcgttagtgagggtatcttgtcgacgagaactctcggaggcgcaacgagtgtcggttgaggtatcgaagatgaagatgatggtgatgttgtccgttctgaaggccgggtctttgagacttcggctggttgagagggttcttcctggttcttcgattcttgatctaaagcttgatctctttcccttttcagtctttcttcgacctcttctaacagctcgatacccacggggtcatcgcccaattcgtccatacccctaccggcgctctcacctctgagcaacccacttcggatgacccactctgatttcttttcacatgtctctgagcaaaatccttccaaatcgtttcctgtctggacgatgatacgccttcccgcaggccctccagagatgatctttgatcgtgggacgacataagacctgtaagacttcttggacttgttgggacataatgggtaagcgcattggtcggatagatgccgttcatgaaggatggatcggtatgtttctaaatgaacatattgacactggatagcaaagtcgtcagaaatagtaagagagaacaaataacgctccagaagtgaggacgagctcatccaaagaggaagaaactaaaaagaaatgaggatgatagaagggcatacggcttgtttgaaggatgaccgatcaaccggttcatcctcgattagacgttctgtccagctgagagctattctttgtagttctgctttaccttccaggctctacacatgaatgatcaagatccatcgagcacagagaagctagcatatgtcagagtttatcgaaacatgaaacaaggttgatcgtccaggaggatgggatggttggattgacctgcctgagagattctttgtcggaccggactggtgggccatgatcatcggatgtagcaacaataaacgcgtccggttgtttgagtgtcctagtgggagtcggtctagatcttgatgaacgagatgacgaagacgaagctggaggaacacaagacggagtgatcggttgggtcgtcatcgttgggagggagaacgaaggaaggatgatggaatgaatttcggtttgttcgctttccaccatcaccgacgacatcaccaacaccgatagcagcatcgttcctcctctctcgggggtctgcatagagccgatatcatcagcagagtgtacaacactgacgaagctaatctctcaagatgaccagccgattgaaacgaaagctcaatgatctcgagccgacgtcgaacttgaacgaatcattctgcatggtccgtcctttcctttcctttctttcagaaatgatgatctttgatcacattgaatcaacttcttatatcaatgtttaagggtctttctatctctcttatctatgcttaacactttctcttctttgtttcttctggtatctgggatcgatagattggaacaccgctgcctgctttagcagacactaagaaggataagggagagttcgtacccgtgtggaaacaagaggtcggtgacggtagcttcctcttcttgttcttatcataaatcgttcatccttgactctgctcataccttgaagcatcgtgacctcgcccactgacatctctgaataaatctgcctacaggttcgagatgaacaaggtcgccgtcgtctccacggagccttcaccggtggcttctctgccggttactttaatactgtgggctcaaaagaaggctggacaccttcgacattcacatcgtcaagaaatcagagggcgcaacccactcaacgggcagaagactttatggatgaggaggacctggcggagctaagggaaggtcaaaagatagaaactaaatctgggtttggacttgatgaggtcgtctcatctgctgcagggtcgaagaaagagggagagtatgtatccatttgtctcttgcccgtccaacatgttcaaaaaatcagaacgatctaatgacttgtcttcgttccttttggtgcccactctatagtctttcctctttctttacgtctttgatccaaccttcctcttcgaatattggtgataccatccttaccaagctaggatggcgtccgggccaagggatagggcctcgaatcactgcccgggctcttcgtctagcagagcgcaaagagaatccgaatgctgtagttgatgatccagaagagggtgacgaagtaggtgaggactcggaggcaaaaaaacacctattcgcgcctagagatacaaagctgttgcttttcgatcaaaaagaaggatcggaaggacttggctggatcaaaggagacgggttgaaaaagacggatcatatggatcagaaagataactgtgagtcgcttttgatgtgcgcttaattccttcactcgtgcgatagtctctcatatgcgtgtcgccatctcatctggtctgcgttcagcccgctttgcttacgaggatgaagatgatgatgaagatctcatgcgattgggatctacatctactgtatgtttagcaacccttttttcttctatcttgctctattagactctcatctatagtagcgcttgactgattttcccttcgaacatgaaccaattaaattgaatgacgttacagcgctcgtcatatacatcctctcatccatcctttccaaccgccagctcatctaccgtctctacctggcacgatggtcgccctgccatccggggatttattgtcgcctcccagcccatcttggaggacaaatggttcgatccgcctgccatgcctgcaggctggacaccaaaaccaagtcgagtctggaatcgaggcagaaaatgggatgttacagtagtgggagcgactttacctgaggataaaggaaaaggaagggaagctatcagcggagaggatgcttggaagagaagacaggcgatgaccgctaatgatgtgagtgtatatcccttctttcatcttccctctacacgtgacatcatcatgtgaactcataaacttgttgttttctcagagaggtgtcgctctcggagagtctacagctcaaccctcagcaccttcctctaccgagccagttgtaccgaatgctgcgaaatctgtgtttgagtatctctctgccaaagaccgagagcgtctcgcctctctttcttcagcctctgcttcttcgttgaaaccaaacgcctccgaagctacatctgtagctcgaccatctgttcccattcttcctgctcttgatacacctaccgttgatgcagtaacggccaactctgcacttcacggctatatgccctttgtggacgatcctggaaaacaagctcgctatcgagcgtatctgtcttctcaatccactcaatcggatccaacaggcgtcctacaaccacagccaggtcaatctgcctcggctcattaccgagaactgtctgatttccagaaagcagcacagatgtttagaccgatgtcgttttcgatggccaacagatttacctcttcttcccaaccaatcatcgaaggaccttcggctaaagcaggtctatttgtcatgacacccgaagcgaaagcttcacttgcccaggcgaaagctgaacgagaagccgaagaagaagctgatcggtcgaaagtcaagattccggaaaacgagacacctgttcagcaagcagccaggatgggcatgtacggcccacttacaagaacgaccgcagagtttttcccggttaagctggtctgtaaacggtttggagtggcagatccaagacctgaaggaccaaaagattcgtcagatgcgggcgcgtttgttgagcctgggtcgaacggagcaggatcgagctcgggggctggggcgactccggtcgacccgaatgcatggcagacgcgattcacacatgtggtcgatgcagccgcagtaggctcagctgaagagaagaatgcaaaaccaaaggaagaggagcctagtgtgaatctagagattgagacccaggctagaccgtcgatggatatcttcaaggtatgcctttctctcttcctttcttcgttttacttgttcgttgtttgctctgcatggattgcccctaaaactgactccttctctctccgtcatatttaacaggcggttttcgcatctgacgccgaagactccgactctgattctgattctgaccttgcgcctcctccccctccatcacgccctactgcacccacgcactctgatcctacacaaccttccttccaaacgcaaacgcaatctgcccctgtccgatcgactcttccagctttaaccgattcaacagggttcaaacctacgttcacgtctaaacttgatcgtcagaccacctccactgcatcgacaaactctgatcctgttcgatcggggaaatctggaaagaacggaactgggaacgggaaaagcaaatcaaagtcgaaacggaaagcggttctctcattcatggatggtgaagaagaggaagacgaaacgggagaggagaacaaggaagaacgggagagagaaaggaaagcgaggagagaagaaaggaagagaaaacgggcggaggaggatagattagcagcagccgtcgatccagcggcgggagatgaagaagaagaggtttgggtagaaaagcctagtgaggcagtcagacttggagggggagcttcgggaactgttgggaagagacagaaagctttggatttcatgtagttctcgtcgttctttcctttctgttcttatcgacaacttctcttactctgcctgtcttctaggtgctgagaataggtgcaagtgctgctggccgagagagagaaggtctgattaacctcagtagtccagtaaattgtaaaagtgcagttgtttagatcatgatctgatacctcaaaggtggacgatatcagctatcacccgtacgacaaaattatcctttgcttcgagctcggcattctaagcccaatctttgtcacgtcatcagatgaagctcttatcaaaccccatcttgagagttcatatttaagtctcagaggctcacgaacaaccgtcaaacgtcgctctcttgttgtggtttgcgcaatctgcagctcctttccatgttgtcttcaactgtgactaaccctcctcttgattggccgtttgttgacccaattccttatgttcttctcaaattgatgactcaacccaagtcggtcttattgtgaacacaagaagtgaagggttgatgaatgaggagtgaaacgtgaagtgaaaaattgaaaaatgtataaccccagtctctccatctcaatccatgctacacactacacatctcctacccaaccatcaactgatctttaagaaggcgaaccaatgatgatcctgccaaatacctctgagatcgtttgaaaggaggacgtatatttagagctcctcagggtcgtaccaaccgaggtgcttgttggtctttcggctatataccaccatcagtatcatcagagggccgagaaagcgacgcgagagaagtaaatggatgatgaaagctttgtcagagatagatctcaaatcggtctccacatgaagacaaacaaatgacaaagagaggaaggacgtacagctggtactctataaagacgcggtatcaaatatgattccagattgagtgcgaaccgaaatgatcaacgatcagtaagacattcacctatcaaacccatctctacatgtcctcgatgtcctacacatcatacagtgaaaacagaaggatgacatacgagaaacgatgaaggggagagcaaaccagaatctatgttatctcagttcggaaaaatggagaaagaccagtcaatatcaacccgaaaagtaactcctgtctatgcagccgtggagcaacagaaagaacggttagtaacagaagaagacaaaacatacccgcaagttccgaggagaaggaactggaaagtcttgggcttcctggaagcgaaagtggaccaaggagtagcctgtttaggttcgaattaagaagaggcgaggattaattacgagctttgactgagaaaacacgtcaattctctctatcaccctctctcagcaaggaggaaaaaagaggatcggatcggaaagacaaggatgacgatccacagatgaaccagagaacgagcacagagtaggagctcatgtactgatatatctgtaatcttttgtcgcttccgaacttcagaagaggagaaaggaaagaaaaaaacgtacagtgctatttcaagataggccgcagaatagtccgatcaagtcaagaagcaaaggaaaaagggcattttgttagcaatccttctccatgatgatcagtgcttagttcgttctcctcttgtatgatccatggagccaaaaagatatgcgaagaagacataggagtgaaaggagaaaagtacgaatcacaatcgaagaaaaaaaaaaagagaagaaacaagagaaagagagaaaattaacgtacgtagcaacgttctcaaagtgaagggatcgaagtccaatctgggagacagaggggacaggggcccttcgggcagcagttcggaggagagcagacattgcaaggatgatcaagatcgatggtacaaggatagatagaaggtagaagtaaacgtttaggagagagtttgagagaaggaggaggaagactggttacggtgatccgagcagatggttacgtgatgcttaggtaatcattcgagggcagtcaccgttgttcacacccgtctcagtataagatgtttctgtttagacatgctttgtgcgcattcattatatatcgtagtatccagttctagttcctccagctcacaaggacttcatcggtcctgaaccgctgagtggtggtcgtctgctcgagtggcgtggtctggcccattcggtactgaagtaatccggcctgagcaatcatgattccattgtcgatacagaacctgcgtttccacaaggcaagaaggtcagaccgagattcagtaaatgagaaaagagacgctgaagagagaaaaataagaagaagcgtaccgttcgtccgtagcatagagtttgccgccacgttcggaagccattatacccatcatctcttgcaatcgtttgttgcctacacacacaaagaagagaagaagagaaaccgcgtgagtatcacaaaggcaagtacattccttccttcaatcaaaggatagagatactgacatccaacaccaccaacaatgagcacctctccaccttttcctcctacatgagccaaagcccgctcggtgatctcgaccaacatcccgaacacgcattcctgcaaactgaagcatagatcccctactgtgatctctccctcgtcaatcgactggccagtatacgaaggagcttggttgagcgccttgagggtcgacatgtttggttttgtcgtcggggtgaatgacgaatctgacgtgagcggaacaaagtttggaagaagtgtgtaggcttcgacggcagtcaaaattccggacagtgtaagatccattcctttggtcgagtacggcaacggcacgagtcggtttcctctgcggcgagcggtgtatagatggataagagtacaaagatcaacacttattcatcacaatggttgaacggtatgattgcagcttacttcttggcctccttttcgatattgaaccctgggtttggatcattagataaaccgacagttcttgcaaatcggtccaggcagtttcctacagcgatatcgagcgtctcgccgaagattcgatagcgttgttgagagtacgcgatcacctgggtatttccacccgacacataaagaacaattgggttcggagacgaggtgatgaaccgagcgatttcaatatctggtttcacatgtagaaagagggaaataagtgactaaagagagatatggcagagtaacaagagtggacaaacgggcgacacagtggttgacacctataagcggaatgttatgcataagcgataacgttcttgccaccaaagagaacacctgtaatgggcctcccattcctgggcctacagatgagtcaaagaggcatgtgagttcggaagctctgtcttgcacacttggacgaaagttgattgaccttttgtataagcaatcacatcgacgtccttccatccgactccagcgccgaccatggcgtccctaacaacactgacagcccattgtctatgatgtttggcggtgtcagtcggaaggaacccttctcctggtggtgtgatataggtgtgtctaacattggaaagtactgtggtttgaccagaaggatgatggaggataagaccggcgcctagtttgttggctgagccttccaatcccagacagatcaacggtttggctaaagagaagaactatgttagattggatcataccatcgaaatcagcagcatcatcacaccatatactcactgagaggaggaagaggattctttcttgatcgtttctttgttgtagcaaccatggttgacggtgggatgagtgagctaggacgaggatcagaaggtgagaaagtgaggatgaaatgaaacgcttacgtaaggaaaagatatcgtcagcgtccctccgagaaaaagaacaggagctctatcgccaacactcactcgtctttgagacatacacacttacttcgtttatcctcccttcttctttctagaaggatatcgacgatgctgttcgaacgaagtagaggcctcttcaggctgtgagtttgacctgttcttagtgttgagtttttttgtcgagaaacccgttcattaaccgtatcgcctctcccacgtcattatttctcaatcgttactcgtcaacccctacaggctcagagacatgatccttccttctcccaaaaggaagtctatcatcatcattcctggtcctgcagatccagaaatggtgaacgtccatcgagttggatcgggcaaagagatagagtcgattagtgttcatgacgttcgtgccctcgcctactcctgttcctctactgactgcctgctctcttcacatgcgccgcttctttccaaaaggctgatcataatcaattcgttctgctctccttcatccttcaattcgtctcataagtggatcagagattcttgtccctctcttagaggaattttcaaaccctcttggtggctctggagtttgtacccgtttagctccttttgttagctgacgctcatggactaatagttgaattcactgttcatttgaactttctcccttctcaaaggtggcgatcttcaaacaatttacaacgtcctaggaaacttcacacttattgatccagtgacttactcccggactcttcttgaaactgttgataatggtacactcggtctcgactttgtcgtcaactcgttcacgccagctgaagacacccccgtactcatcatcgcccacggactcaccggaggatcgtacgaaagttatgtgaggaatgtcatggctcatgctacgaaagataaggtacttggtggtctgggtctcagaggtgtagtcgtcaacgtaagaactttgctctcattcttgaacatgtgtggctggtagctgactttgacgtttgggaaagctagttcaggggatgcgctgatgttcctgtcacatccgctcagctctattcggccggatataccgatggtctgtagtgttctcttgattgggattcatcttcgccattccttccttcttctgatcatgtcctgccgatatctcaaacagacttccgaacggccgtattgcacatctctcagaaatatcccaacgcacctctattgggctgtggattctctcttggagctggtgtactcgctcgattcgttgccgaggagggcgcgcattgtatcttgaaatctgccaccgtcgtcagcgcaccttgggagtgagctcttccttctactctctgcccgcacaaagacctcaattaagccgtttgttatttattatcgtttctccttatttagctgccctgggatgtctgccagactcgacgccacattcttctcccgacaggtctactctcgatcgatgggtaccaacattctcaatatctttaacaaaattattaaatctcccgcttcggcagagattttcgctcatccagaatctaggattgcccgtcatatcgcttttatcaaaaagatgtggagaccaacattgagagagacagatgaggtggtcgtcagtaccgtaggaggtagcccggaatgtttccctttccctaatgccgaggcatattatcaggttcgttttctttgtattaaatcgctcagctggatgtgacgctgacaagaatccgttgctgcttccgaagtgggcgagtcctcaaaataaacttcatcagattgctatgtgcgtctcttcttcgcttctcctccatcatgtgtatctctgtcttctttttctctcggtactgattcttacgctaccaaacagtccgacattgtgtatcagcgcattcgatgatcctatcattccgggtgatatgcttccgatcgaaaaattttcaaaatcctcgcatgctgttctagccgttatcggcggtggtggtcatctaggatggttcgagaacggattccctctattctctccgccagatagatggctgcacaaaccgatctctgaattccttcttgcctcttctgaacttgtctcctcttcctcctcctcttcttcgtcatcatcctccgacgacgagagggagctgaaatacatctcagagggaaagtacgtcgggttcaagattaaggagcaggatgaaggaggaggaccatttaagtgggtcgccaagaagagggtctttgtagatgtttagcttgactttcttccttccctccttcctccctccttgttcgtgatgggttgttgaattggaatgaatagaaataggtgtttccgtgatagatgctgttctgtatctgtttgtttttttttccttttttaagatgactacagttacaccaatcattcactccgttgaccagcgaataagggggagagacaggaactcattcagattggcattccttgtcacatcaacatcaacatcaacatcaacatgacctttacattgattctctgcaaagctgccaaagaaggagacggcgtccagatccgcgatggccgctccaagcaagataccattaaatctcgtcacagcatggcaaattacatcccgagcgtcccccatacatgctctcccattccagtttgatttccgatgcagaagagcagatgggaagactttgagaaagacgaaacgaaacagatgcatcagcaaaaggcaagaaaaaaagacgagagtaagcgtgtgtgcggaggtcaaccaagcgataagcgagtgggtgaacgaggagcgagagtaaaggaaaagagcaaggcagaagggaaagagaagggcagaacaactaagctgatgtctgttttattagagaataatctaccgagagaaaatcgatgggtacaagatctaagggatttgaaagattataaacgcgccaggaacgataagcagagtgaattggtacagaaggcaacagtcaatcaaatcggttagaccgggatgttgggtttgagaacgtcgttgtttggatgtcggaacgaatgttctcggactaagtcatgattgtaatccatatgaaagagaggaaagaggttagtggacgagtatgagaaacctgtgaaatagatagacagatagaaacatgactcacgtgaatctatagtatcaacgttgcaaaaggcaagcagcagagacagacaagcaagagaaaggtagactcagtatcttgactcagaagtgagcaatcagacgaaaatagatgactcttgtcttcgagcttgctatacgagatttgtagagggaagaggagaaagaaatcaaaactgactataatgtgctccaagaccatacatcctgaaagttacaaaccataccaagccaatcaagagggtcaatccattatttttttcctcaataaggtaagcaagaagagggaaaacaaacttggtatggaagctgattttgactgatcgggttgctctcgcttcggaaacagtgatcgttccacttccctctggtccaggcgcatgagcgacgatagttggaggaccttgttgaatcacatggatagggatgttgtaatgcctcgagagcgccaagatctgtccagtccaagtagtcacacacaaataagaaaggattaaggaaacggaatgagtgtttgaaaaagaaagaaacgagaaagaggcaaaaaacaaacctcaggctcgcctccccaatctccgctctctctaactcggtcggtgtactcctttagtccagccgcgtccaacattccgtcgtctagtgcgcctgcagtatcctctcctccggcagcagcaaggaaaggaataaagtcgtctgggtgggaagcgatatagtctgctgcggcgtgtctggtagtctggtacaagttctgaagatgacatacacctcaaaggaagtcattacttcctctgactctgcaagcgagatacgtagaaggacaggaagagagacgaactgctttgggtgatattaatccaaggatggccaactgatccgcaatcgcgctgtacatacactattatccgattgaagattgatccagacgattagagttctaatcagtggttccaaaacataatggtaattgtggggcgtacatgtccatctggggagatctgaattcacatgagtacgtagcataagtacccgttgtcctcaaagatcctcgcgtcgcgcgcccaatcaccacgaaagaaggagaaggaaaagaggggcacccacttcatgacactccaactttagctccgcacacgtctttgtgagtgagtccttctcgagtagcttctctctagtgatcctagcatcctcctcctcgttcggagggggcagcgaagcttcgaacgcggcttgctttcgtgcctgtcggttgttgataaaaagccggagcatcaccgcgccaaacccagaacagaccccaaaaaggacagatgctggtgagttctctcgtgaagcaaaagcaaattccgacgcaatcaagaaagatagctcaaaaatatacaagagagcgaaggaaggagaagaaagaagaagaaagaaagaaagaaagaaagaaagaataacgaacttctcgttctttgaaccgatctctgcttgatcccttcttctgtccgccaaggttcgcatgcgcctggtccaacagagcctcctgttggtcaaccaccatctgtctatcctccatctttttcaattcctcttcctccgcctgagcctgagcttgagctttagcatcctcttgagcttgttcggcagctaacttccgtagatcttcttcttcttgctcacgttcgattcgttcttgttcggcaatctcggcaggatcaagttggtatatcggggctgatgtctttggtgatccggagggggagaagcaatcctggactttctttttgaacgacttcttacccatcgttgatatgtgctcagtaatgagtaaggatagccaggtgaaaggttatgaagatggatgatgaatggatgatgatgatgatgatgatgaggatgatgaggatgatgaggatgacaaaacccctctataaaaaaaaataaacagatgccgccgagtggttacggacggatggtaactggcaagcggcatcagtacaacctttaagaaacatatacatgattcaatcaaacctcaatgaaaggagaagaggatggatggatggagagagtgtagagggctaaaggatcagaaactataagtatagagaaggaaggatacgcagacgcagacggaggaagttgataataaagacaaaaaagagtgagattatcaacggaccgacactttatatagacaaaagaacacaaccgtcgaggcaagacaaacgccagacgtggagaatagacacgtacaaaaagaagtgaacgaaaacaaacagaaaagaatggaagggtacaactctggagaagaatagcgcggaagttcttgttctcgcgtttacaatagacagaagggagagagaaatttatgagatgacacagataagagaaagactgtacaatgagcaacaagcggaaaactaagagacatccaactaggacgacagattgttcagagaataacacaaaaaagcaaaagagagaaaaggaagggaaaaaatgattgaatgatcaagcatgaggaggagaaactgtcgggtcgccaatgatggcgactagaaccgagatgtctaaaaaaacaagtatatccactgtctgtcagttcatatttcttccagagaggaaaagaaaaagagcacacgaaccatcttccttcccaccccagaacttcaatccacatacactggcctttacgccgaacggcgaatttatgtctcttcctctccaggttccatttccgattcccgccccatctacaccgacatccaaacctggacttggtatctcgaatcgctcgttacctagtcctcctgtacctccttcgccgacgaacgaagaagtctcttgcttcggaccgtagggcgtgcctcttgaagccgacatcgctttcgctctcgaacagagagcttcagagattcgctgaggagagatcggaggtcgttgattaggctggtgaggaagagaagagggagaaggtgaggaaggtgtagaaggtgatgagctaggtgatccggtgttatcgctagcaccgttaccggtccccgtcgtcgaagaggatgccggcgaagaaggtgttgacgaatgggcagacgtcgatgttgaagacaaagacgaggaagaaggcgtgctactcgatgatacagacggaggagagaacgaagcaatctcttccaaaatttcctcatcatactttgtaaaagaagggacgatataaagtcaaattacatctcttcactggcatttctcagagccattcgctcttcgaacttacgagattatcaaccaagccatccgtacagagcaacacaacatcgtccttggcaaccttgacggtatagctctttgcatctttgatgggagtctcttttgagttggttcctagttggaatgggtagttgaactgatacaatccccatgaaacattcaatcaagggtcagtcagtgcatcaaaagagagtggacatgagaagaagacgaagaaggaatcgaagcgtacagcatgctgcatctcttctgtcctgaacaccatccgaccctctctgataacccaaagcgaacagtcgccgacgttggctaccctgagttcttcacctttgagaacggcgaggagagcggtgctggagcctacgaagccttctcgagcggcttgttcaagtgtacgttcgtacccggcttgcatgattcctaccgggtcgggtgccgactgagagagaatcgtctgaagcgtcgacgaaggtggaagcaaggaagcgatatgggacatcagcaatgctgagaagcggcctgtaagaagatagaggaccgaggcacacgacatcgttagtagcctgcaagagggagggaacggagaaaaggagatggcatcaacgaaaggaggaaggaagacagaacaacactgacctggattggcccctttgattcctttgcggctccaaccacctactccatctgcaatccccaacgcctgaacaccaccgacgaccggaccggccgaggttttaacaaaatacgcgtcctcgcccaccctgacgctttcactctcgccctcgctgttccatccggcggaggaggacgagccggtgtaggaatggccgtgtggatggctgccgtctggaaggccaggtccgatggagaaaggagtgcttgctttatgaatatcccgagtgagtccaccggtggtggttttggggattccaaacgctcctgcatcaaagaccaagcgtcgcctcctgaggccagccgagacgtctgaggaagagccgagacctatggaccctggattctcaactagggaccagatctcgagcgcgcttggtgagtaagcgggtgaggcgttcgccggatatgtcgatgtaggatcgaacgaggaaagaagggacgaaggcgagcccgaagagggcggtgatgatcgaggatgtttatttccggcgtgcgagggggacgaggcggatgtgctgtttgaagaagggggcgaggtcaccgggttgccggtagaagaaaaggttgaaaactcgaagaacgagagcgaaggaggactgttcgaagacgggccgggaagagaagaaggaagtggagaagaagaaggcggaggggacggagcagtcgagggatgacaatgggttagggatggttggggacctgcctgtccggcagcatgattaacggttgcgtttgattgatagaccacctggagtccacctctggaacttggtgaggatgacaaggtcgatgttggtacagcgtttgcagatgaagaggatgaagtagaagaagacgaaggagaagaagacgaggaagaagaattcgtgagagacaacgagctaagagaaggaggattggaagatgctgatgacgatggcgaggaagacgctaactgagtcgacaggggccgtctaggggatgtccttgttgacctggctgcatgtctctggagctgaacgagcgaacgggaagatacgttgatgagtttttttgatgaaggattctgtgcgagcgacatcggtggtgaatgcttgaggtccttccgtcgtcgtcgtcgtcgtcgtcgatgatgatggtggtggttgaaggttgagggttgagggctcacgatgatcgaccgttgtccgaaacgatggaaagtagacagagagcaaagtggccgaaaacgggagatttattttctttatagtttcttttcggatgtctctcttgtattctgatgggtatatgcaccctttttctgtatccctgtagatgatattcatcgtgtgtacacatcagcatgttctctttgacatgctgtctgagctgttcaacgggagccaagcactggtggatgggaacatcttccagctgacgatgtgtctccagctgacaagggtctcagtgatgggactacaaaagttctatagtcgcctattaggccgggtttctaatcaatcgaccgtcagcattcattaggatacatctgtagtgtttgattagaaaacttttctaatacaactaggcacactcacatctctttcttccttcgttccctttccgctcacatctcttactctgccatccactaacccgatctttcttatcgctttcttacagccatgtcgttcgttctgaatctattttttccaggcagtttatcatatgtgtgtggctaacgttccgctgtgtcgttctttctatacaggctttgtcctccttacgcacctttcctcggtttcggtggtgtggctagtgcggtaagtctctttcctcggagcgactctttcctacatgttttctgagcttgctccaatgaaaactatcgtctactgaaaactcacggtcttctggtgaacacacttccttactgtctaccagatggtacttagcagtacgtctccgtcgggtttctttgtctggtctggctttatctccaccgatgatcttgtgtatctgatgtgtttcctcgttgtatacgcaacactcggtctttcctccttcttattcttcagccgttggagctgcctacggaacatccaagagtggaattggaatcgctggtctgggaacgtttcgaccggacctcatcatgaagagtcttattccaggtttgtccttatgttaaaaggagcctgtctcaatctctgccctcttcaaccttttcctgatcactcttgagccctctctctcatttcgctctcccttcagtcgtcatgtccgggatcatcgccgtttatggcttggtggtgtccgtattgatcgcaggaactcttgctccaaacaccgggtattctctctttgcaggctttgtccatctcgcggctggtctggcgtgtggaatgacggggctcgcggctggatacgcgatcggaatcgtaggagatgccgtgcgtaatggtgtccttttctttctttctcttttttcggagagaaagagcacgaagctgagctttgatcgttttgatcttagtgtgtccgaacatatgtctatgagtccaaagtattcgtcaccatggtcctcatcctcattttcgcgtacgtttccctctcgtttctgtccaccccgctctctctgtgatattctaggacagagttctgatctggccagatatgtcgttcctttctgcgttggggcccgttctttgtctctctcttgcatcctacagcgaggttataggtctttacggtttgatcgtctcgcttctgctcaacaccgctgtgggagagttcaaggtgaggagtcggtcttcataaagagaatattgtcttgtgtgcggaatcaatcatcgtgctgatgaattcacctgtcttgtctttctgttgaaccggtccggtctgtcttatcggtggattgtgaacagtgctcttactaggatctatatatataatctgttctttgattctttctttctctcggttgttcatcccatcgtcaattcacaaggaaaggaagagagaatgtgattgtatatcggtctttagacaaggaaagccgtgaaagggatgacgcagagcgacggtatcagaagagacaagaatcagagagacagaggattacatctgttccatggtatccattcaggagaaagagaaagaaaaaaaggcagacgacaaggtggagaatctattgtcttttttatttatttattcatttagtcattcattcctctgttcattctggagactcctcaggttgtgttcttcttccgacgttttgaggcttgtttgtctgacgaattgcatgccgatgtcgatgtcggtgtcgatttcgttaatgatgatgatgatgtctttggtgccgatgacttctttgatgatgttgttgttgatgatgaagatgatactgatgctggggtggatgcggaagagtcgacggccgttgctttagccacaggtgcagatggagaatcgtcgtatcctgaatggtttgaagaagagaaaactacccgatcatgtactgtctgtcgggaaaggagagggaagaagactgaaaatggagactgacctgcgaaagcgtcgactctcggtcgttttgatttctttcctcccttcttatcgtccccgccgacaacctctatctcgacctccttctccacctctttctcggccttaacctcgtcgtcatcgtcgtcgtcgtcaccatctttttctcgaagcgcggcctcttggtgtttcaatatgttgaaccgggtttgcatcccgatttccataggctcctgtccggcagaagaggacgaagctcgctgcgcctgtgtctgggactgaagagccgatttgatgaatctcgaagctgcctgtctatcaagctcgaatctacctgtttgacactcggattcaaggatcgtcgcaagtcagccgaatgaatcctttcaaaaccgacacgataccacacacgacgcgacaatcaaagaagaacgaacgtttctccgggttctccgcgttcttcaccttggcgaaatacgacttgatccgctcgagttccgggatgaccgggtgagactccgggtcgatcccctttgtacgaaggtagactgggttagggaggcgagtggaaaagaggagataattctcgtcaggtctgagtttcatcttgagggccttctaagtgttcgtcgaaggtaaagcaaagaaaaagagacaaactccaaattaaatcgagaaggacataaacaatgttgaccagaagcttggccttatccatctctgtcgacatctgcgcgagcgtctccttgagcggtctcgccaacaacggattcataaactcggagtcgaacgcggatagggaagaagcgagctcgtcgatcgtggtcgacaaagcctctgtctcatcttcagactcagactcgtattcggaagaggacggcatgttgggcgggtaaatgcagatgtggatatgctctaaacaacaggggagtcggaagagagaacgcagggtgactattgatgttgagaggatcctacttgaagagagaaccaaagagccacaggtaaatctttatgttgacgactctggttaatcacccctccgacctgttagggttaatccacggccgaaatcgtccccttccaacacagcccaggcaacctttgttcttgtaggatagcgagtgatctctctgcgctaggctttgcatatggtttacgtctgagcgctactctgtttgcagattcttggagtgatcagagatccttgggtagatggtgggcaagaggacggactgtacacccaccaacatgggtttcacctctccggaacaggaaaggaatgcgcagcacacgtcgttcgcttacggtcaaagtattggtccatggtcgcaacagaagaaagaggagacgagagacaaaaggaagagacataaagaaggagctggagctcgcgaggatcagagcgttcacccgtgcttcctctttctctcgagagacaaacacgggcttggatgatgtaaagagagaaggagtgaatgagataaactctgctttaacaatctaaaactatgacagatgtaactccagcgcaatctccgttgcacaaacaacctcagcggacgctatcgacagcaagaacacgagaaacaaccttcaacacggcgagcccaaggatgctgatgaggcaaagaaagcaggtgaggaaggaagagtgccactgctaggctagcttacctaagtatcttaaggtgatataaatgaaatatcaacctgaccgacccttgcgaagcatcaacgcccaacgggggggagaaaaaatctgtcgattttctcacgctggattttctagtttttcgctttttgttccccaagcagtcaagatgttcgtcgtgtttctgttacttttgtcctgtttgcctgtctttctctttccttgttcttcgtctctccaggctccgtcagcggatctattcgaaaccggtgcttttcacgaagaaaaaggaaggaagagagtgggttagaaggaaagagagaagaaaggatgagaaacacacgacataatcccacgattcccacggacgccacgctcatgtggtttagttgagttgcacgccaggtcggaaacggagggacaagagaagagctagagcgagaaaactggaggaaagtttgtctgcagcggtcaaggatggagacagtgaaccgtgacgaggctcaaagggactactcgtaaaaaagcaccgattcgatagatccactcgacagcccttccttccagcatcttttctggcacccattcttcacacacatccctccagagaaagacggcagactagcagagaacaagcctgctgacaaaaaaaaacaaatctgttgttcgttatggtatctttcgtgtcggaatgcgattttttgtcttgttttcaggtctttcgtcgctcccgaggcccacgtccagttccagcacattcttcgtctcctcaacaccaacgttgatggtcgacgaaagatcatgtacgccttgaccgagatcaagggagttggtcgacgatacgccaacatcgtctgcaagaaggccgatgttgacctcaagaagcggttcgttttagatcgtctgatttagggggtagatcctggggatatgtgtgcgtgtgttggagagaacgatgtttgctgacggaatccgcttctatcctttcttttctccgatttcacaatctttcactccgattctcaattctctgccttccatccacccaatccgtcaccctttgccactttcccctattttgttgataatcccgattgactcctaatctagagccggagagctcaactctgatgagctcgagcgaattgtcaccatcatgcagaaccctgctcagttcaagatccccgcttggttcgttaaccgacagcgagatgtcaccgatggaaaggacatgcacgttgtttccaacggtatcgaccagaagatgcgagaggatctcgagcgactcaagaagatccgatcccaccgaggtctccgagtacgttcaggcttgttgctatgtagtgttgctaccgatgggtccctttcttctctttcctaacgattctcattccttttctccttttccgccgatcttatagcacttgtggcagctccgagtcaagggtcagcacaccaagaccaccggtcgacgtggaaagaccgttgccgccaagaagaagtaaattgggaaagatctcccccaaaaaaccttctaccttgctctttttccctccccccgtcgagagtggcactctatcgatgcatgtcacaccattttcctttcctttctttgttatctttttctgcaaagtacacgatagagattcaggaagtttggggctcgaggcgacaatggatgacacagacagagtaaagaaaaaaagagagagaaaaaaagacaagggcagaggagaacgagagaggtgtttctgactgactgactgactgacctacctgggtgagcgactgttgtctgttgccatgactgatatctctttcgaaagacggctatccgatccttccgagctaactaagatgacccggcacgaagctttccgatcgaccgaccggactggcttactgatcgtgtcgttcactcaaggcttctgggtcggctacccatggatgactcatggacaatgtgttgtctcaagccagctagatattctttgttctttctttccttcgatgagtccctccggtgaaaggtaagagaagaagataacggatggaggagacatgatcatctatatgtcatcgtcgatagtaatcagcggatctctttgagggatgatggtcgtgatgacgatacgaccataggtattaaaagagcagcagcaacaacaacgacaacaacaacgacaacaacgacaacaacgacactatacagaacaagattgagtgtacagtcaaggcagtccttctctcgttcaagaacgagcacgtgaggaaagatacacaaaaggactggtattcgtttgcttcctacgaacggccgagaggatctcagaaggaaagaagaaaaaagtaatgggtttctatgtgtacgatcgtacacaacgtcttccatggaagaccggccgtgtgcagatgtatccgatataggtcagtcggaaggggaaagacgaagaagaaaaaaaaagtaaaaaaaagaaagaaaaaaaagagaatgacaatgagtgtttcttctttttctttaaatgacggaatcgcccttctgtatcaacctccggacggtactggtccacacacacacacacacacacacacacacattctggtcgtgatatgttcttggcttgtacaaacgatacatgaacgaaatcccagcgaaggagaaaaggaacgagaaaaaaaacttttcgttgggtttgcggagagacctagatcgagtcccaacccctgttctcaagtcttccgtccttctctttcttgtctcgtctggccctcttgttgattatcacgaatgaattttttttcttacatttttatatgaataagaggagggttattgaaacatggaagggtaaagaaaagaagcaaacgagagacagagaaagaggaaaaaagaaaaaagaaattgaaggattaacatgttccgatagggaaataaggaaaagaaataaaataaaaaagtgaacgaatgcagtgagagagataaaaggtagagggtgaaagcaaaaaggaaaagtggcaagagagcaagaaaagaaaggaggaataagaaagacgaaggaagactataaacaagaggagaagggatcaggtagagagagagcacgaagcgaggatcctgtttacttcgagtgcggcaaccgcatcccctccgctagtgtacaacacagttgacttcttgaacctacaatgacgatcaatgcgaacgaaaaacaaaaggaggtaagcctccgagtcaaatgagccggcgagagaaagagaagcatgcacgaacccgttgaaggtgctggccgcacagcacgtgtaagcacccatctctccccatcctaaccaatcgccgacctccaacgacctgggcaggacgaccatgtttcggacacaatcgatcgaatcacaggtaggtccccagacggaggccatctctgttccgcccggtactctttggtaacccatctggaccgtcagatcttcctcgagagagatgttcggagggaacgatcgagggaacgggcaggtgacagttcccgcacgaagcgtaagagggaacggatgaactatctggtgatcaaacatgatgcagttgaacgagccgtaaacaccatcgttgatgtagtctatttgaaagaacgtcgcatgaagaggaggaggtgagcacattgtttccaaagagaaagcccagtaaaggcaagaacgtttcaagcataaaaggatatcggacatacacatgaccttcggggtctgctcgtcatcgcctacgtcgccaagatgcttgctgccttccaacgaaccgtcgagagagaagatcgagctggtcatcatgtctcctgcctcgtctccttcggaagtgggcgtagtggcgcctgccccttcggcagcggcagcaccaccaccgccactgaggctgttcatcaacgcatcctcctcgagcacaccggcgtaggtggtccgggccgatcgtctggccaccacgttcgtcgccaagacaaaagcggtggagacaaggaacctaccgggctcaccgatgatcctcaccccggactctaccgggaagaacctatccagagcccggttaagaacactggctgccgtttcaaagtattccttttcgaatccaccgccaatgtcgagtagaccgaatcggtatccgaactggacacctaggtcaaacactcttcgagctcgttcacaggcgtcctcaaacatctgagggtccttgcaaccggaaccgacatggaaagaaacaccgatgacgtctagaccgagacgagaggcaagctcgagcaaaccctcgcaggtctccactggcgctccgaacttgaggcccaatctgcagagagacttggagtcgtcggtcaacaaccggagcaccagctttgcggtagggtagagcttcgagatcttgagaagctcatccgcattatcgaacgtcatcatgtcaaccccgaacgatcgggcggcacggatgaacgacgtcggcttgcatgggttcgcaaagatgatcttactgggcgaagccgggaccggaagggaaagtacgctcatgatctccgcctgggacgcacaatcgaagccggtgccacagagagaaagcaagtgaaggacggcaggatctgggttgcatttgacggctatatatgtgcgtgtaattttttattttttattttgggagagaggagaaagaaagaggttggaaaaacatttcgactttatagaatagaaaggaggaaaggaacataccatagaaaggctcgaccctcgtcaggcatctccgccagctcatcaaggctttatagacttcaccgagatcgctgacgaagaatgcatcctcgtcttccattgcgttggtgagctcggtgatcctagcctgcatgactttttcggtcgatccttggtgaacgaaagggatgtccaccctaggcagagcctttacttgggggttgggagagcaagcgaacgagggaggggtcggcaagtacgacggagttggcatgtcacattggtctgaaagattggacacggtctcgaacggaggcaagactagagcagaagcggccatgtttgtgagtgtatgtttggtatggacgtcgttgaatgaggtggtagctggggagttgatcatccgttggagagatgtgagaattggatggaaacgatcggttgaagaaaaagtctgcctgtggatgacgagaagggggcctggattggctttttgaatgtgtggtttacgagtgagaacgttcgagcttgtggagtttcgttggttttcttgttgtaaagttgacctcagcaggcgttgctagggggacgccccggctacgcgtagttgtcttcgatcggtttggggaggcctcttctcaccggaagaagcaaagaaggggggatgaacggtgggtttctggagggaaacgaggggccacggaaacagaaacctaagaaaggaggaaggaggagagggagagggaggaagacacagggaggagttgactggagcagtgaaggattgagaagaaaggatagacaagcgagcaaggttcagttccgaacggatcgagagcaaggttcggattagccagaaaggagtggagagagagagagaaagagaaagagaaaggagtgggaaaagagtgatacttacgaggtgtacgactaaactagacgctgatcacaaaaggtagtttcaaggtgttgtttcagtcctgttagggtggttcgcctctgacttgggaccacctgaggatgagggagagaacgaggcaaggagaacgatggggaaggcgagaaggcgatgacgatgacgatggtcccaacggaaagtgaggaaaaaaacaaggaaccgtcacgggccgagcaagagagagaagaaagaacaagaaaaagaacgatggaaacgatcagccttcggcctttcaatttatctggatgcaatcttgggttcttccacatctctactcatcaatggcaatagaagaaaggagagacgtcgaaagaggcgaggagacagagaagaagaaaaaaaaagaaaaagaaaaagagaaaaaaaaaccttcaaaaggaggaggacaaaaaagaccttcacactcactctaaacaaaggagacggggatcttctagtcttgcttggtctgatgaaatggtaatgggtgagctagccctgtggagctgactctaacgacttgtaagaccgtgtgtatggtatgcctggatcggacgtgggagctgatggatgagattcaaaaggcgccgttgaaaaaaggaggaacagaattttggcccacgcgctttccagacttttcggtaaccctaactttaagagagtcatccgcccggtgaacgttctatttgatattagtgtgaccaacgtacagaatgagatgcaaacacttggcggataggccagtcatcgtatacagcatacagcatacagcatacatcatgctgaccaggctttagccaagatgtgtatatgatatagaaagagagaggacgggagaaagaaagatggaatggtaaagacgtccggtctctctaattatactgagcatactgagctgtactcgagaacttgctaccctgtctgataaccttttcaaccgcatccaggaagtctcgctccgtggccacctttcttctcgctcggatcgcgtacattccggcctcggtcgcgaccgaacgaagctcggcacctgtcgcgttcgggcataatcgagcgaccaggtcaaatcggatatctcgctcggtcgacatgctgtgtgtgtgtgtgtgtgtgtgtgtgtgtgtgtgtgtnnnnnnnnnngtgtgtgtatttgatatcaatcagatcagtacttttaccaaccaaccctaggctacgtcaaagaagaaaaaaataagcacttacgatcgagcgtggatctttagaatgtgagctcggccttcgttatctggcaacgagaactctacccgtcggtccaaccgaccaggtcggagtaatgcagggtctaacgtgtctggtctttttattattattttgatttcatttcaaagacgtaccagaacgagtcagcgctcaacctttcgttcttctaaggtacacgaaaacaaaaacggagaaatcatctctcaccgattggtagccatgagcaccttgatgttacctctcgggtcgaatccgtccaactggttgatcaactccagcatcgttcgctgcacctcgttgtcaccacccgctccatcgtcaaacctagctcctccgatcgcgtcgacctcgtcgaaaaagataatgcacgccttcttccctcgggccatctcaaacaattctcggaccattcgcgcaccctcaccaacatatttctggacgagctcagaaccgataactcggatgaacgtcgcgtccgtccggttcgccaccgctcgggcacaaagcgtctttccggttccaggcggtccgaacaatagcactcctttgggaggatcgattccgagcgtcgagaatcgttcaggctatgaatcgagaacaaacaagaaggcctggtcaacaaaaaaaaccacccgagaagagtgcatgaccaaacacgacgaccaacctccaacagtggcagctcgacgacttctcttagcttctcaatctgctccttgcaacctccgacgtcagagtacgtcacgtccggcttctcttcgacctgcatcatcgtcaccgacggatcaatcttgggcggtaatgggatctgaatcttgtagtttgttcggtccactctgatggtaaaacccccgatatgaaatgaccgagatgtcagcccaacatgtggttgtaaacaagtgagaaactctcaagactaacccaactcgcatgccttcttctacgtccgtaggagccactttgtctcctaggccgacgacaaacttggcaatctgtttaatgctgatcacatacttgtccgactcgtccgctccgggttgagcgcccggtccaccaagtgactgggcgaatggagatggctgggtagaggggtctaccgctgtaaagaattcgaagagacagagcatacagttacaagccatgatcaggaccggatgcacaaaataactatcgagtgacaacagaaaagctagaacaggacgaacggccagctttgatgatcttggtacaacgggcgacttgtaaagggtgctcttctccttgacgatgctacagaaccacatgaacggatagcgtgtttcaatgagttgaacgataggtcatacaaaaagggccttgattttcaaagcaggctcaccttgtctgattgaatatcccaaagattaggtgatgctagtccggtatcactctctttaatcccaatcttctcattcactcgcttctgaatatccacaatttctgactcaatcttcttgagctgtcgggcgtaaggaccttgaccctgaaaatgtgccgagacgtgtcatccagccagttcagcattctgcgtatactctgtatgatcacacaacatgaacaaacaaaaaccagacacacatatgttttgagaatctgaatatcatcgtcgtcgagagctaggtagagaaaagagaaaagagatgatgattagcaagaccagatctttgtcagaatgaacgagcggagaagaatgattgatcgtgaacgaaagactcaccgacaatctttgcctcttcctttccgtcgacctttttctcgtctgatgatattattttcccaaagagacaacagcataacctataagactatattcccaataacgacgatgcccagtgactgaaggcaaccacttacacttctcccaatcactttgtgaggtggaaagacagagtttctatcagcacatttgagcccgggtgatggaccgattgatgtctaaacactcacgcttttggcggcatactagcttagttgtttttgatgttataaagactgtcctgacgcttcacagatggcctaacagagagctcgacagaggacgaaacgaggcaaaaggtgggttggatgttgtatgtgtgtggtcgatgtatctggatgatccccatctcggtaggcgtaaccaagcatccgtggaggtttgggtggcgtgaccagggctatgacctgcacagctttaatcaacgccacacggcaatttccactttgcttaccctcaccactttcctccactttccttccactcaccgacttatatctacactcattcatccagatagccatgggaaaagcaaagaagacaagaaagtttggtacgtatggattcagttctggctgggtgtgattcctggtgggccaaagagctcaacgttcgaagaggatgacgcctagatgagggatagaccggacgacgatatacataccctctcacaaaattaacctagctcgacttggttgtatctggacatggttgacctctgttctgttcatggcgatgtttgtgtgtgtgggtgtgtgcttgtgctcttgatgggactattacagccgctgtcaagcgaatgatcaacccagctgatcctcggttgtacgtcctctcgttctccctttctttctgtcggtctttctgaatactgacataggcttctgttgctcttcggacgcgaaccctgtgcaattcactcgttaaccatcatcaggaaggtgaacgcggagaaagcagcaaagaaggctgccgaagccaaagaggcagagaagaaagtggtgtaagtcctacactgttctactctattcgccttcttaatacgctttctgtatgatatgcctatgagctcttctcacacgcataccctttccttatgtgcaccattccaattcatacaacatagcacccaagcaccttcctccttgttcttgtcccataacccgtcactcggtcctccttatcgagttttggtcgatacgaatttcatcaatcattcgttgcagaacaagttggagctcgtccaaggaatgatggacaccttgtttgccaaatgtatgctgctcttccttgtatcttgagggcgcgatagatctttagagttagaatgctgaaacaattatgattcacccaataatctcctgatattcgataaaccaggtatcccgacgatcacagactgcgtcatggccgagttggagaaactaggtcccaagtacagaatggcgctcaggttcgtctttgttcttctcatcatctgattctctctactagctcgtacaacatacccaagtgcgttcttctcttctgatgacgactatatagtattgcgcgagaccctcggtttgaaagacttccctgttcgcgtgcgtatcatggcttcctttcctatccatgctatcagccagagaagaagaggtatcctagatgaaaagcatcctgacttgtttgtatcttgcgcgtccctctctttcttgtgatgctatacagaccgaggaacgtacgcagatgattgccttgtccagagagtctcggtttccaaatgctacatcgttgctaccgtacgttctcatcaccattctcatgatatttcctaaatgcatcattcattaattttctcaatctcctctctccttcttcaatctttgggacgttctattgcgactgaaagtgtgatcgagatcttcgaagacgaattagaaaagtgccaggtgtaccgttaatgtatatcgttagcagacgatatcaaatcgagcgactacctgatggcggagtatgtatcttttctctcatcatctcgatatttctcatctgcgctacttggtatgagagatctgaccaaagctaacggacaaaacctatgttcaatcttgtcttccaggcgcccgcataaatacggagaaggaacttcttctgcttcgtatgagctctcttggttttctctgttcttttcttgtgtttgtacatataatgagccattttagaaattttctgctgccgatgacaagtgattggtcggtgtactgaagtcaaagcaaaagcgaaacgtcaatctacctccctctcttctctctactcgaagtgaagagttaggctgggaataaatacaacattgcgaatgaaatataatgatcacctcaaagaacactacccaacatatcatgtttgctttgaaaagaaatatatcatacatcatcttgtctgtttgggtttaaaaccttgacctttgattgttcattacatcttaggactttatgttagagattatctagttggagttatagaggggcggcatttccgtatgccgagttttcaagccctcttgccacctacagtaatccaagtcccagaactccggaaagttaagcacctagtaatctagaaaagcaacaaagagaggagagagagagagaacgcgcgaaaaagaaggaacgtaccaaagcaaactcattcagggcttctctgacacgtttggttgtccggctcttcaagacagttgcttttaatttttctttagcttttggtgttgccctccggtctgggaatccttcctatatcgtttcccgtcatcatccaacagtcaatccgctattctttttggttacaaagaacgcgagacaagaggaaaggaagagaaaagaaaataaccagacgaaccacagcaaggaccgatcctaaccatccagctgacaactctgggaaccgagtgaccatagccgccaataattctgttagatgaagaatcattgagcgaggagatcgtccacccgcaccgaggatgatagcatggatgaaggcatgaccgtatttctgaaggaccggattaaattcgtcaagcagatgagcttgggctcgagaccgggagatggccgtcgtctgttttcaagaaagaaattatgggatcagaaagacctatcttttcctatcctcgttacgactaaatagacgagaaggagaacaagcataccacaaaaccggtcacagcttgaagagagtatcgttcttgtaaccctagtccatcaacagagagtcccatcatcaaatcgaccatatccgttgggtttccaagtatcgatcccgggaatctagccgccacctatccgaccgttccccgtcaagaggttagccatcggttttcttaatttatgacaaccagaaacattgacttatactcacacagccaacaaatttgaataagctttcaacgatatctggatgtctaaccatcgcgtccaatccatctctcaagacgtccaatccagctcgcaccataactcctgccacgtccctcacaaggacctccatcgctgcttgattgtagcccccagcggaaggatccaatcctggtggagggagaagccggcctattaaagattctccaagagagagccagatgccattaatgttacgttgtgcagcaccagctatcaatctgatcagaggctcagcgtctagtgagagaagtgtaggagaggatagtgaagtagtcattgctttcaggaaagagctcagcgactaccaagtttgatggccagacatgtgaaaaatatagacgaagttagataatcccaagataaaaacaacgtcattacaaaaattattgaacgtacatcagctacttcggaatctgtactccagatctcgatcacccttgctgtgatcctcaacaggcgttctctaagctcaaccaattcaggcgcgctcctggcttgagcaatcgccgctactttgatctcatcctcctcctccagatcaaagtcaaagtcatccgagggagtaaggcctttggcgatggccgtcaaggaaaggattcgctgtatcgtttcagccttggcttcttctggtagctagttgtgtcaaagttacgtcttatgagtattctggcttagaagcgaacatcatgctgttgcagcttacttgagcagcgccttccaaggcctgaacgatcgtgttgacgacaggctcggtgatgttctgaagcaagaaccacaaagagcgtacgtcagcctcaaaattcagataacgcgccgtaggaaggaaaccagtatatgatggtgactcataccttgataggattgatggcttccataggtggcaaagcctgaacgaccgatgtaattgcttccaagaccctggctttctcttcaggctattcaagagttttgaccaaataatctaaacaagtaagcgcgcacatccttttgaattgaaatccagataacttcacaacctacctcaatcctctgctctacttttgcgtaaagttccccaaaagcgccgatatggtttgtcaaacttgctcgacaaagatcacacaatcgcttaagggattttgcggctgaagcagataaggccgggacttctagtgcaggaacgatatacgatacggctgtcaagacgttcgctggatgagaatggaaccaactactgtaatcgcctgtcaagtgtacgtatttgataagttgttctagaattccaacgccatacatcaataagggtggacgaggaggtagctcaccgatcaatgcaatcgctgtagctctcactcgatgatctccctccattggaagctttccgatcagatcctgcgagaagatccgaggcagatgttgatcttcttctactggcacagtctcctgaacacatcgtaaacagtgaagggatacctcaatctcttcccaattcggaccggatggagcgttgagactttccagtaaacagctcagaataaacgacagcgagtcggaacggaggatgtagtatctgttcgacagagagagtggaaatcccggtcaagtttcagatatttccctcatgaaaggacctccagagtgtatgaaaagaagacatacgaagtaaccatagcatctccacactcgaatcgataacttctgaatttatcgacctggtctttcatccacccacctccacccgacggcaacatgcacttcaatcgaagtttctggaagagctctgcgaaaatctgcttagcaatcgtccattcagtagcgggcgagtcactatcagctgtttctatatgaggggaggcagtgatggattcctggaagagactccaaaatccaaggggaatctaccgcgatggatgaagatgaaagagaaaattaatatatcaagtgagcagccgagtccgtcttgtaagcagtcgctgcacactagacattttctgacctcagagacctcctcgtcaactccataggagccttcaaacccagaaaatcctaacatcaagctgaagaagatctgaacttcaggtcgaatgagatgcagggccaaataatcggccgaatgctctcctaacgccaccagcaatttacaaactgaaccagcggtctcatctgcatctccagctataaaccgtcacaggagagacggtgatcgattgacacaagagaaacaagaaatcaaaaaccaataagagaaggggccttagttatgtagatacgtacattgaaataggttttccgagatattccgtcccgttcctgccacccaagcgagtagaggttcagtaaggaccttgctaccccttccatccttcaggattgagttgcaaagaacctcttgcatgcaagtcgatgcggggatcagtgtctctggtcggtccaaaagttgaatcaagataggtagcaaagggttcaagtgtctgttgaacgagaacacacacacatacaagccaacatgtcaaaagtgaacgatcgacttttttttatattaaaacaaggctttgccttactgagaaaaccaagactcactctccgctcagtccccaaccgatccaactttccaagcatttgagcgctagctccatctcgccttcgtcttttccttctccaccaggcacccatttagccaaaacggatccaacagcgccgatgacaatcccatcctcctcgttcaacacttggtatacgtctatctttcgttgtccaattagacctgtccgagttacctcttcgatcagaatctgaaagaactctagagggagggcataatctgaggaaggcggaggcgcaagtatccttagaagcgtactgagagggttgggaaaatgatgaggtgtcaggcgaagcaccaaagaggatagctgaggagcacaagagttggaatcagatgtgcccaaatgatcttatcaatattaggcaacagaaggacgttatcaaaatatagtggatagaacatgggaccaacagcaacaaaaagctttcgaacaacgattccattcccttgttgaaaagccgtttgagcggtccattctagtacagaacttaacaaagcgagctgttgatcttctggaagcgtgtccctatacatgtgttgaagagtcgaacagtcagccgaaaggacaccgagagcgaaccaataaactagatcttaccagtctcgagtgatcttcacactggctgtatgagcgccaaagaatcgaacggtcacgtcctccagaagtacagagccaggatggattggaacggtattcacgacagcttagcgacctttggttggaaatgcaagtgaaatggagaaatcataacgcgctcacttggtgagatatcagtggttcaatcagaccccaagaggcctcagacttttgggcttgaacgagctgatgttggatttgttgctgttcagcaggagccaacgtcgagatgggtgagtaggataattggacgagctgtttgcgaattgaccaaaaaccgagaaagatagtttagtcgagagggacgatggcttcgtagaacccaagctatcaaggactaacgtgaatgacctggtcgatatcttgttgagatatcatgctctattgaacaaacagatgacaccaaccgaggtcgatgttgattgatgttgatgttgatgttgatgatggttcagagaaagaaactcgaccagcgacgacgacacgatcaacaacgttcatctcttttggtcatcaacatcaacgatcatcaacgtctctctatcctttgcatctcgtataatttccgatgaatgtttgtcccagagatgagatagaacttgcctgggacgcttcgttccagtccatcaatccatcagcccagccagacattcatgggctcgttcaaatctccaaggtgaacacacataacctctcttcaagactgatctttctccctatctcaagttgatgacatcgaaaagaccgacacaccctgactgacaagagaaagcttggtaaaacatgtcgatcaggcctgggatttagccgtcggattcttgaaaccccgtaacctagaagggttgaactggaatgatcgaggaatgtggtctcgtttgtccttctcgtccacacactcgtccgtccgatatgctaactgtgttcaatctgttttgtctttatctggcctcttcttcctttgagcagatcatagcgggatccttgccgcttttaggatgctcaaacaggctaacttggtcgaggagctcttggaacacttctacagtaaggcactctcatctaagaagccagagccaagctgagactcacgccccggtctatcattttcgacacaacccctataggcaacgtcgaaagaaactttgccatggtcgaacaagacatcactcgtatgatccatagtatcgaagaatcaaataaaacctcaacctccatccaaacggaatcaacaatgtttgatttgttcgagaggttggtcgcctggcaaaaagcatgggctgctcctgtagccgcattcgagaagtgaggctcgtctctcgtgttcttagtgtgcgctcttcctctagcctatgttagctaaccttggtctacgaaacgtatctcctcagtcctgctcttcgccaacaatttcaatcgagattcatcttccaactacaccttcgtttaccagcttccttcccgaattatatgcacgcatacttcctctctacctttaattcttacttgtccctggtctcgtcatcttcgccagacttgtcacaatccaaaggttctccaatcaaaccatcaccgcatctccataggctcggattgatcgtcaagtttggatctgaactcatggcagtcgcgtgcgaacaaatccggcgcagagtcaaagaacagtgcgaaggacagtggggggaacggacactagaagagatgaggatatggggaagagaggtcgtgggcggttggtgggaaagtttgtatgaaggtgtgtcgcttcgttcattcattctctatgatcctgcgcgtgtgttctcattcgggactctctccgaacgcgtaggtgaaaaagccgtgaaggcagtgatgaaaccgatatattccaggttggatcattatgtatgcaaaacaatgtgtgagctaaggcaagtcttctctttgtacctctcttatttcactcgtttatctcgctgatccttcaaatcttctctctttctgattgggctccccttctcgactggcttgtaagtagaacgacagaactattcgatatcattgtgaaccacccaaacactcttcctgtcctcgaggatctccgtgtatgtcttgcatatttagaaattatgcccttcttatctgttctgcgagatgagcactcaacactcgcctcatttctcgctcattctttaggaatgtttgttccgagttgattctagagacgccctcgttaaagccctccacgcgtcgaacgacaagcgactcttacatccgggagcagataccaaagacattatctctcagtacatctcaactatccgctgtcttcggatcgtagatcctccaggagttcttctccaaaagatttcgtcccctatcaggtcgttcctcaggtaaagttctcctcttacccccttcctatctcaataagacgagcaaaatactgatgaacagggattgggggtaaatgaaacacgtaggaagcggccagatacaattagatgcatagtagcttccttggtagatgacgacgaaggactcgagatggatgacgtagaggatgacattaaaccactccaggtcaacgatgatcttgaagaagactattcgaatccaaactgggttccggaaccaatcgatgctgctcctggtttgttcccccatttttttgtcttttcatcgtaatcgtgtctgttgatagatatttaagtgcgcgtacttatctgttgtgtcggtttctaatctcaaagagttccgatcaggtaaaacaagtgacatcatctcgaccttggtgagcatatacgatacacaggaagacatcgtcactgagcttcaggctcttctcgctcagaagcttctgactgtgcaagattatgatctcgagaaagaggttcgttcggcatttccactttcccttatcaaacaacatccgactagtagagaaggaaattgaagcatatggaaacatgatttttgatcttcagatcaggattgtagaaatcctgaaacttcgattcggagaatccgcactccggtcatgtgaagtcatgctcaaagatctagctgattcaaaacggatcgatcagcatgttcaatctgatatccaggtctgtcttcctccgcctctgttcctcttccaacttttctcacatctaaacatgagctctctcctgtcccgtctaccactgctatacagagcgtgattcacccaaaaattatctcacggttgttctggccagaatttccccgaacgaaactccaacttcctgaaaagcttggccggtttgtctcctcagttcctcttccttccacctattctctttcgtctaacctctctctgcctacggttcttatcgaccaaagatcacaaacgaaatatgctaaagcatatcacagatttaaacctgataaaaggcttaaatggatccctcaactcggtacaattgacgtcaaacttgagcttgcagatcgaattgtggaggttgaagccaatccgatacaggctgctgtgattgagttattcgatggagatggtatgttccattcctattttcttttctctctgatatatctcttcacatcaaacggaaacctcaaagactgacattgtacatcgactcaaaaataaggctcggcatggagcacatcagccatcgcttctaaattatccattcccgatcaagccgttgtcctttccactcttaatttctgggcaaacctgggtgttctcggtagagatcttcggacagaatcttggctcgtgatcgaacgagtaggagcaagttagtcgtattagatgatcaaccatctcgatgatttcttggcgcattgaggatcgaaagcgcatctatattacaattcgagaaaggaaccagatgatttacgatcggcctcctcgaagctgtttcaccaaacaaaaccccatccaatatataaaatttgtaccaaatgtaatgagcttcttatgagttgatctgttctaacagcaaaggggagatatgaagtatacaaggaacagctagaatactgacagcgagcaccaggtgaataacgtttccggattgaattccatacgacttgagagtgttcgtatcgaccctatagacccagaccgtcatgtaatcccatcaacaagaaaagtacatcaattttgagcgattcctatcacacaaacaacagcaaagggcagtaaatcggacaatagatatggatatggacatacatagcttttccagagtagatcaatcgttgctggctcggcgggattccctccttctcttccatcttgttcttgacatctaagatctgattttgtttatttatttttggttttttaaatccgtaaaaatcgttcagtacgatcgatacactgtcggtctaaaatggcaggacaagaattcgagaagagaaaggaacagcacaaacctgatcatcttcgtctacgtccagttcgatctacaatcgtcaccaccatcgtcgagcgaaccatcatacagacagattgtaagttcatagtagcctaatatgagacaatctctaccaaacgtaggattgattacataggtcagacatacctcctttccagttaacgtctaccgaaggacagaatagtcatcattcaaagaagaaatgagtatcaagtatcattcacttgtctccgaagagtcttcgtataaaggacgaccgagaccacatcgaatacaagactgaagacttaccttgacctttaaaagcatttctggatgagttacgtgtatatatgtctatgggagatgtgatgtacagtggtcaggatcggcgagacttgatggagggtgtgagaaagaatacgccacatctagcacagctttgagattgacccaaacgtctcgagttatgctttcattcctctctgattcaatcttcatagacaaacggaataataaattgaatacacatcgaaacaggacaaagaaaaatgcagaaactacaataagctctagactatacatatcatcgtcgttccttcacaaagaggtagaggaatgtgtagctgagccccaggaagccgaagatggtagctattaaaactgcagtgtccggccaccagaaagcctaagagcggaggcaagaaaagaggaaaggagacaacagagttagatcacgatacttggtaaattcttgaagggaaaaaatacatacttgtgatcggaacccgctatgttatcagagaacaagacataacaaaagaagaaaacatgttaatacggcgagatttctgaacttataacgatgacagaacgtacaaagaactgagaataacagctcccggaacctccagatcgacaccatactatggaaggaaaatataagagttctattgtgagtgtttggcgctaggtcgacatgatatatgtgaaaagaaggtctcactttatggtctttcaactgaatagatcgaagctcattgactaatagagcctcgaaagccgcatggaagaacgagaaattcatcaagatccgaaccggcagagatgaaagactatagttcatcaagagacccccaaatagcagactatacaacaagaaaacacatgaagagtctcattagcataataacagaccaataccgaggcgacaactctatagacttacttgaacaacatgaccagacttccggccaagctagccactccattgtttgcgaccgcgaccgagataaacaagaccacgctcgccgttgccagattgaacagcacaagggtcaagatgaacttccagaactcggtcaatgttggcacaagtccaacagtactataaacgatgcaccctaatagaatggacgggatcacccgcagcggaatgatgtcaaacaagaccttagatacgaagtaggtaataggagagtagtatccgttggctctatatgtttgaaaaacaatcacgagtaagcgactggcgataatagcgggctgcactcggctaaactcaccgttctctcataaacaaaagtcgttcatttgcgaacagacccaaagatgacagggacgagaacgcaaacagtgccaaaatgaagaagaagagcccaagccggttctggaaagacccaagatcaatacctatgttccggtagagagcggcacagagaagagccactcccaatgctgtaaggtaatgacccgccattagcaagggatttctgtacaggttcttgaacgctcgcccactaaggatcgtaaactgggtccaaagtccagccttgtggtaccctttagagattcctctatcgacctcgtcaaaagccccttggtttcctcctcctccagttggtccatgcccattcgctctagccccagcgatctccgctctaatccgagcggcaagatcactcttctcaaatgacgatacaagtctctccagcttctccggtaaggccgatccgtcaatgttttccgaatcagacgaatcagcaggagaggaaggcacgattccgaacattcgaccagctttgctaatgaaggagctatcaccctcagctcttgtctcaacagcagtttcttgagaagctagtcgagaagcgccagcgaagccggcctcggcatcgggaggactaggattggtcgaggaaacatctacgaggctagacagatcagatacgattgcacggggcgggttcttggtggtaggccgggcagttaagtcaactaatcaaaatgacatttagatacatcgagcgcactatcagctcttgaattcatgaaggtttaatgcgagaacaaaaatcacgttaaaactcactcaggaagtcggcaatattaaatcccggtgggcaaggatgacctagactctcaaagtactcctgacatcttgcgtactctccggagtagacaactcgtccttttgcaagaaggacaagtcggtcgaacaaggcaacgatgttgctccgaggctgatgaatggtgaaaatgacagttctgttatagtctttggcgagagttacaagagattcaattacgttgaaggcgttgtatgcatcgagacctgaatacattattggagtgaagaagagggaacatcagtcacctcaccgcgaaacatataggcaaaagatacacaccacttgtcggctcatcgagaagaatgaccgagggggaagtgacaagttcgcaagcgatcgagactcgtcgtttctctcctcctgagattgatcgccgtccagactccccaatccttgaatccttgatactcagaatacctaattcctgcatcgtctccaacgtcctaaacttcttggcctccaaactcatttccctgggcaaccggagcagagccgagtagagcacggtctcgtatacggtgagggtactcatcaatgtatcctcctgatccacaaacccaacgactctcttccattcgtcctccttttcgccgttgctcacccttttgccattcacgtatacatctccacctactgttcctcgtttgcttttgagagccaggatatcgagcaaagttgactttcctgctccagaggcacccatgatggccatgatctctccatgtttgacagttccagagatatgagaaaggataggctgttcattgacagtatatgagagcgaggagaactgtaggctagctggaacgtgatcagccatgagcttggcggtctcctcagcaggtagtcgaattgaaccaaatcctccagattgcttgggtgtgcgagagaggaagaagaaagctgtggacaagaactaataagatcgcgtttgaacggaaacaaaatagtctagcaagcagaggacgtaccaagagcactgataagaacaaatgcacagacagcagctacactgatggccagccacgtgctatcgtccggtctttcaggtcgctgataacctggaacctgtgtatagtgcaaacactctccactgtcgcattgtaaggtgatgtatgggtctccaaagacagtgtcgatcaagtcgttcattgctggttccttaaactggcagcctttgccagtcgagcaagtgaacgttccaggtccagtgacttcttgttggaggaactcgtcgatgctggagtaccaggatgatttttcagcttgaaggttagcaaggagatctgttatataaggaagctagtatatcaaaaacttactctgggaaaccaatcattccgtagaataggcgatgcattcattagtactaaaccaaacaaaacttctgatgactgcatttaaaacaaacaagtgacggcatggactcactgacacttccatcctctccgcaaagcattcgtccaggcacacagtcgcattgtatcttctcacatttgtactcggtcacattggcctcgtaagtcgactgtatcttccagtcacaatcagacaaagtacaataaaaggattcaacggacgcgatccagaattggaacgcgcatgtcttgtccgtaggcgacatggatgggtcaccattcaaatgagcagagcccaagctggaattcgaggcggccggtccatcggtgcaagagaatgtgacttgaggttttttcgtaccaagctctcggatgatagcgggatcttcggagaaaaagaatcagagtcagcaccgatccgatttttttaatgagacagaacagaatgatcgcaaacttactggttacatcgcacatctgaaagttctgtctaacagcatctccacccttgtagcacgtcatattctctggaggaatctctcccccagaggagtagtcccatccaggaattctgaagtttgcacatgcctgatcggtctgacatgtgttgcagttgactccagaccatccatctgaacatttgcactgttccccgagagttcgttgatgtcgattcggtccatcagctaacgagtcacaaactagatcgaacgtgcgatgtaatcaaagagaagattcagctgaacagatcctgatactagagaaatgatcatcatagcgtaacatacgtggcgtaaggcaatcgagacctccccaacctggaggacattcgcactgtccatcgaattcgttacattgtccatactgcacgttcgaatgtgatcagatctcatcagcgacgaaccaagagcgttccgatcagacaaagaacatcacatatacctgtccgcagttgaatttgggtaagagacagttgaaacattcgcatggctcatccttgactttatagatcgatgaaggaattgagtgagaaatagttagccacagacaaagggatcgatagttgagacaccagggacggacacataccaggtggcaaatacagctgatcaaccatacattttgacaaatcaccgacaaaatcacacaaaagatcaggacgtatcatagaggactacaacaaagccgatcggctttatacacttactgaattcgacttccaaccttggccccaagcactgatgggagcttggccacctacagagtcggagaagagcgaaggtgaagatgtaggtgatgatcgattagagtcggaggctttagcagcagcgagtaaaggagccaccagagatgcatatatgatcaagggcatctgaagggacctcatgatgagttccgattcgatgtatcgagtggaaggatgtagagggtatgtaggtgtaggagagagcaagttccagttgagtagtcgaccggaaaaggagatgtagccaagtgatcagcaatttgtaaccagtttgtaaccacagtcgaagaggcataagacgcgggtgatctcatcagaatggtaacggtctcctagtggtacgcataaccaagcagcatcattcaatagacaggacacagtgtgagtagatacagtgactttgagagcaagctatagcaggcaatggacagatataatagtagaaaaggttcagatagtataggaaggaaaagaaacagaagaaacagaggagattttataattaaatgagtaaagcaaaaaaagacgagataattatgtattaacaagcctcttaggcagactcaaccgcactcctcgattgattgtaggcaacgataacccgctcaatattcttgaacaaccaaatcttcgcgctctgttccgccaaaggcaagaaagggcccgagactccatcgcgaagcaaaagtgcgattcctgatggttcgagcgaaatcgtctgtagatcccaaaaggcgacttcccaaacgaccctgagcttgattgaccgaattagaaggatccgggtggtagtgagcatgcagaccgagtcatcttgagggaaatctgtttcacacgtaagaagtcatacgtgaagttggatcagacgaaacgttcaagaagcgaccatagataagtgcagaggggcggacataccaagatgagcaacgtaaatctcgttgaagtactttccattctctaaatctttgagccacgattggcccaatgattctcggccagagaaaggctgtcgatacgtggttatgattgacacgatcagcctctttgcgaaatctacgcaaaactcatacaaaaacagatgaacgcacccgaagcactccgtcggcggcgacaaacctgggaagccgaactcggtcgatatcgttggcatcaaagacggtggtagtattccgaattcctatatggacaaagcaccataagtcagacaagcgagaactaataggcgagcagtagtttcaacgacttaccttgggttgcggtagaagcgaaatcaaacactcccaccactggcttcgtgacaataccgacaaggccctaagggatgaaaaggtgcgagggtgttcagaacagcgaaggcatttatgatcaaaatatagccaacgatagcttctcacctttccgacacctttgaagaatcctccagctccaccagactcagcgccttccaacggtttgagctatttcagtggtcaacggaggacaataatgaagccacacaagtaagtctctatatggattaggtcaagaaaatgtggtcaagacatacagccagtccctctaacccgcttgctacacttgtaccaaatgcttgagcaccagcagcgattccgtatctaatttggcgagataaaaagttttgttgtcagtttatagtatatatacgaagcttaatcaaacttacagagcgtgtctaggcttgttctttcgttgagtcaaccttcttcgagcttggtattctggatcgagggttgcagccgaaagtcctacaaaacaaaaatgatgttcgatgtcaaatcagttataaaaaccttgggaagttcgaaaaatgatctaaaacgataagtcaatgtctcacctttaccaatcgaaccagtcaacttcgaaatactgtctgttactccaaagaccgtcttcttgacaaaactcgaagcaccctgacaggaggcagttttacaaaatacaaaatacattcaacaaggattaggatgaatggtctttgcaaggaggagaggcaaatcccatacttactcgggcgattccactagcaagctctttgtttccgtgaagtacaaatccctgatagggctcgtaaaagatgtcgtgcactccagaactaacgttgttgaagagacctatagggttgccaattgcatctgcagatcccagaactctgtagagctgaactgtgaattgattggtatagtgaaggacgattcggttctgtagggccgggattgacagtcgaacgttttcgaccattagtgcatttagtcgaacaggcgcaacgttgacgtttcctaaagccatcgtcaacgcattaagaacaaagaatgctggatttcgagtactaggtctgctcgagcgcacatcatgggatgaacggtcagtcaatatatcaacataccgcacatcgaaacttggttcacgtactgtttctcctctacattaactcgctcagttcgcatgaacgagagctcgagctgaataggctggagagcaagagattcgaaatagaccggtggtccgccagcagctggtgttgggtccggaataggtccaggtacttcaatcaagacactaatgagaagagagaagtgtaattaaaagtcgtaagaatattgattggttgtaatgtaacaacggaagaagacgtactcttcggcgacctcttgccaagcagcgcccttgaattggaggaaatcgtagagagcgaacgcaaagtcctcgtcgagttcaattgtcatagcttgcaacaagatcgaggcactgggtaaagtatcgtcagtggctgttgacgacagttgaaactaggagctgatcggactacttactatttgatgtataaaactccatgggctgtggaacaaagcaagtggtaagccgatgccctctgacaaatattgaaattcaaggcagcttacactcatccttcaggacaatgaccgaagcttgtagtgtcggatgcgactccaggtctttgccgtctttaggtacaactgaaggatacaggatgatgggatacagccctccgaatagctgattgtctacctggatccatttgcagttgacagagaccgaatacgaagtagccgtatcgacataccgaagctccaatcctcggaaagagatgtagaccatctcatgcattcccttgttgaggattgaaatcccgataccttcgaagtcgacattgattgtcatggtgactgatgtatcaattgagatggcctcaaaagcaactgtgctgtccaatgctgttgagtaaacacgaataaaatcatgacaattagatgttagtcttcatattgcctaacaatccacaatcgatggacgtactgttggatctagataatgttcccctgcctgcaggcttgaatgcgctccgttcttgttcatacttcgagatgatcaatacttgagttggaccatccgcccgtacatctatagaagcaatttgtgggataccatcggtctaaagtgatataagatgatatggtgagctcttagtggaatggcaggtgaagcgatcaaagacctacatcagtaaacctaaacggcgtaagagctccgatctccatcacatctaccaatctttcctttccgtttgcgatgatcttgagtcgtttgtcatgctcggcaggaaattcccaagtccagttcgcggaacagaaaggcgcaaccttgaacactcttctttgtggtcgaggtgcttctcgaggattatcggccgttcggatttgctatgagaaatgaacagtgattcgtcaatcatcaaactgcgagaagatataatgcaggacagaatcttacgctttggcagaaactgatctcagtgctagtttcattctggattcggaagggccagggctcagattctttgctgaaggtgatgaaaatggctggtccctcgatgaccacttcaattcggacaagctcctgctcagagttttgaccatctttagcagcccgattcaaggtaacatgaacagaaccaatgtcggagatgttgaacggcgcagacctagagacaaaatcacgacatggtcagctggtgaagacgtgttttgaaatggaagaacgagagatcaccattcttcgttgacaccctgataagcgatgactactcgaagatctcctggtctcttcataaggcgatgcataggagcccgctcgcctggagtaagatggataaatccgtcactacgttcctgacggacattgatagtcgagtccatgttgttgcggaagacgaaacgaggagaaagagtaacgatcttcgatagtttgtactgttgattgtgaaaaagtggtgaatgattagccaacaaagtagaattcagactacatgagcagactaacctttcctaaaccctcaacataagaaacaccagcatggacttcttgctttccatttggggtatctactgtaacctcaaagtcggctgcaacagtctcgaaagagagaggctatgaataccatctagacgcaattagcatttgctcaatagttctagaaaggtagacatggtacgaaacgtgacacaccttcgaccatgtcgagtctccaaacttaaggaaacacctgtttcgctgatccgagttggcgaaagagaacactgcaaggatcagacaattaaagttaggttgagtatatccgaagtctaaagggttataagtagattatgacctactgagaggagtaggagtctcgttcttgtaatcagctattgagaaagaagtcaaacatcgtaagcttgctgcccagtgattgtcagcaacatcttttgagttatttcgagctcacaagtgaaaactgaggctccagcaacatctcggggttgacccatccaagtcttggatttgatagatactggaagcccaactttgttgagaatgatgaaaggactgaatatttgaaccttgaaagcgccactaggttcaggatatttgctatagatttgaaaaaccaaaaaagatcatttgtgttgagaaaccatatcatatcacagacacgcagaaagaacttacatataatgaatcttcaaattgagcttgtgaccctgcttgtccgctaggataagagtatcttcgatattaaaatcgtcaggattatcggtgttgatgatagcaaactcgctaggtttcaattctgcgcgatggaaagagctgtcaatcaactttgtcgtgatcaacaaaatgaaacaatattcttaccagtatcctgaacctgaacacttaataacaacagatgagagagctccacctgatgaactgggctggttccaccctttcgcaagaaggtagaggagttcaagctagtgttcttatcaaatacacggtatttgatatcgaagggtagcaggttctcgatctcgacaggtgcacgaagtcgtaaggtcatgataggatatcgcctatatcaaacgatacaaagtcaacactaaacgctggatatgatttgactacaatagaatcttacttggcggacatctcgctctttttaataaccgcagatgcctggaatctgaaaggggcttccttggaagtatgagatctacaatcaatggttcggacgggccgagcttgaagatcctccctgtgaaggagaaagagtgacagacattaacgagactcaattaggacagtcttgcgagaatatgacttaccagtgaaagctctccgtggaccatgagaagtcgaaaccagctacgcgagagatagttcaatcaagtcagtactcgaattaactaacaacatatttaaatggcgaaactcacgatcagggcggagcttaaatcttttatgataagcagcttcaatagggagagcgcaatcttcgcccggggctgttgggtcaaatagacagtgaacatatgagcatttacgatcgtcattcatcagatcttatcatggcaaacccagagcgtaccgatcttgtagactgaagcacttggcttgcctgtcttctcgataatgatgagttcgacaggtacatgggtcaagttttcgactcgcaaaggagaccggaatgtgacccatttgacgttgttgacaagcttgacgtcagaaatcaatcgatgtggatttctagccagcctgggtcgaagcggatgagaatattctccctctcgatcgacaaaaatgttcttcagctgttcccaatcggcaccattgatctggacgctcaagctatgatgcatgttgtcacccacgtgctataaatgatattgaggaaatgtagataaaaggtaagtcaataaatagaaccgcgcaggtgatagaatagtttgaactcgcctctcttaaggttttgtagtcttcaaatcgccaaggaacctcagagccgtcctctatcgtcgttctccctgcagagcctggagccacccctttgtcagcccagagttcgattggataacccgttcgatttctaatcaagtaaggagcgtctcctcctcgagcggatcggaggatccgttcactttcactcgaccattgggtggtagcggtgatggccaactcaataaatgtagatgtgacattcaactcgagtctctccttagaagagaagctgatggccatattgccagcttccccaccagcttcagatttagaaacctgatgatgggttccagaagccgcacgccaaaaaagtcagtactgactttgttccactcttgttgcatcttcagtctaagaaacaagaaagacttaccttgagcgtgaaatggtatggctccaacaacggctcccaagccgagttcgtcaagttgaaatacgttatggacggcttgagggaggtgataaatttcatctagaaatgcgagaaacaaagtgatatatgaacatatcagaaactatggaatagaaagctagtcagaaaaagtacagtactcacatcaccagaccaatcgctaacagtagcactgaaagccttagcatgcaagtgaagcaaaggcaattcatggagatcgccgatgagaatcaattggaagccttcaaaactcgctttgagctggacatcccgatgggtgtacatttcacgttttgaaaaggtaacaagtgaaggataagatattgaataaatctacaaaaaggctataggtacgaacatgttccgttgagattacgaattttggttgggcgttggaggatcgtcgaacagtagagcgggttggagatgtgttcgtgtttgtggacgcccttgacactcgtcgggcagccctgtaagaggctggtgggcccgtctcatcagaagaagctacatcttcctcattatggtctgccgtactcttagcaggagaagtcgccgaggtcagaagagatgttgctctattaacgatattggtgatcagtgtgatgtcccggtaagatgctcggaagatgatcggctgaacggcaagttcgatctctgtcgtttgatagtttgacacagatcgagagtcgatcgaaagggttagatcaatatcatccaagaatcgaacagattccgagggcttgtccattcgagacaatgacattccagctttttggaggtttagagcgaggataccctacaaagatggcaacacgacaacagttgagctaagatagatacaatttgaacaattcaacgtgaagccttacctgttgggacataagaagctgatcaaccgagagttcgatcgcttgtgactcagaattggtatcatcctccagaacgaggatcgcacagctaacgatctcaactcgataagctagtttggatgaagaagcaggaggagggggggattcactatccgcagaatctgctggtgtgggaggaggagcctcagatgactcggagccgcttgtaaagaattgtaagagtgcataaagcggatcgatagccaaaatgacacgaggactatcgatagtgatgatagccagggccgaaccgtctgttccgcccgacatggtatacctcatcatactacgccaccggttgatatcaagaagaattagtacatgtttcagtcatgatagactatagaaaaaggaaacaactcatacaattggtctccgttgtgagtagctgctggaatgatctgtctccactttgagtttccagctcgagtattcgacattgtcatatcccgaagcatcacctccaaatcgagagctccatccgatagcatctttaggctgactcttgtcgaaagaagtgcgaacttggcgatactacgttccgcgagcgaagcctcggttgttacttctgaatcaaacagctccaaacgaatggaagaaacttcaaaccgcatatcaagtttagtccagagtttgagggcttcaccggattcgcctcgagagatcatcccgagctctggtcgaagatcaactccagaattgttatttggagtgaggctttctgagacggaagaaacatcagttgaaggtacctcagaaaggagcttgggctcgatttttaagagatcgtctcgattgtctagtactcggggcatagactggacgagttgcataatcagattgtactggctttgtgtcaatgcaagcttaacctctgacatcttaccagatatctggagagacgttcgacaaaaggaaatatcagtatttgataatattggaggtagttgagacataaactacatactttggtatctgggtcagtgaagttggatgttcgatcaacatatgcttttaaaattcgatcgtaaaataggccacaattagttatatattctcatggagacaactgaggcaaaaggaggaatgtgctgagctaaccaggttgaatgacatcgaatgtgatgctcatatcactgatcacttggagagtagtaagggtatcatcatagtagaactcggacgtgagtttgattccatgcaagccagcagatatgatgttgtttccagccgctcctccgtcataagtgtttcgagcgacaatctctccaagcctcatgataaggacatccttcgaagtcgtctcatttcgaggcattacgatgatgggtgttttgatgagaatgtcgaaatgcattcgttccttttgaagctctgatgctcgctgcgttgctgcctgagaaactgcttgagatgtagcatcatacaccggctgcagctttgagaacaagagggcgaacatgtacaaatctcgaataggaccctccatgaagttgaatttgagggaacccgctcggaggtaaatcgaagtggaatatcctgggaaggtcgcgtggtcgttggcatcgaagctttcgaaactgaagtctacaacatcgtctccttcaacggagagaagctgcttgaaatccttgttcttggagatgatcgaggaatcgtccttcaaagaaagatgaccaagcgtggctcctagtctcatcgtcggtcctcgaagaagcagactgacctcaccggcggccattgataatgttgccaaaggtcgagttccctcaaagagggaaactaagatgtagaaattaggttagtatcagtgtcaatactataacaaggcagaatctaaaaagagaacttttactaacctcgagctcgagtgagtttgacccgaactcgaatcttgtctgaagcggaatccaccaagacttcctcttcggtcggctcgccctttgaaacagattttggcgaaggagcagccgaggcatcgtcctttggaacgaacgttgtcatgatgtaatcatacaacgtgagcactgggacgggtgaaaccgcgaagttgaatgtcgaaagctcgactgcgatcgtttggccgacaccttcccaaacggtttgaaacccgggagagtcagcttggaccttagagtatttaacccggacgagatcgtcgtcatgcgtcgattggttcgattttacgtcggaactgatcaacggactagatcgcacgccgttctcgatcatcgccaaggaaacagatctactcaatgcaaacttaccagggtcagaagaaagaatatttctagcaagctgtcttgaaagtgtgtaatcacttacctgaggaacacatccacacccagatcaaactttctgagagcaaattctagatagaagccctccaaaacagcatccaggagatggacatccggtccagacgattgagacttgaagaacgaggcttgaaccttcttgacgtcgaatttgaactcaaacatgatttggtgaatatcagaggtctatcaccccaagcaaggaatcaagcgtcaacaatgagcacacttaacaaaccgctttgattcgttataagacgaagtcccactatctaagcagaggtattaaaaagaagaaagaaaaaaaaagaagaagccttacatccgaggtaatttctggcgcttcgtagaattcgtctgtcccatcagcatcagcctctgcatcagcatccggtgtatcctcaatcacactctcgttctcgtccaagttgtattcctcaatattaggtttctgtctgaacccgccactcctagtgctgaggtgtcgcgattgactagctgccgagacaagaggaggacgagcaggcggttgagcaggatcatcatctccaaactttggaatagccacgtcgataaaacgcatcaaggtttctgtcgacaaacaacagacgttcagctttgaatacatatcttcctctttgttgatacctgtaaacaggttactcactgtactttcggtccgaaaagttaagctgcaaaaccggaagctgtccagacactttgaatttcgtaatattcggagcgttcaagatcgcgttttgcgcaaggaatgtcatgttaattcgttcaagcacgtgtacttcagtattactctcggtagaatctagtgcagatatacacgcttccaggctgttccccatcaacagctattgtcattaaaagggagcgacaaaaaagtcggacagaccagaagatatcagacagcagatctgagctactggccgaaaggaaaaaaaaggaacttacctgagctgaatccaatctgatagtaaaccgatcatacatgagcgattcaagtctctggaaatcttcctcggtatactgctgagcctttttagattcaatctgctgcattgcctccttggctaccaagtctgaagagacagcaatgtgtcctgcatcaagcacgatatgctggcagttcttctcgacaacgctgtcacgggcggcaaaacgaatgttccatttgtcagagttaaaaagatgctgagattattgatgagtaaacatacttttcgggaatgatgatgataggagcgttcatgtccaatttgatgtctatcgtcttgtggttctgatatacccaacatggaggaaggggatgcagttagcaatggttgatagacagatgagtaagacgagaaacccctacctgcaacgccagctccaggcctgctcgagtctctttccgaattccatccagtgtttcgctagccacatcctttcgaatgcgtaagtgaaaatattgacgattatcagcaacatatcaccgttgtcgaggaagagagaaaatcctgggtaacgaacgataagcgcggtgatactctccaactgactctctggcggctggaaaaacttgaacactctctcgacataacctttatggtagataatctcgagatgtctcatcttaaccgttagcccattatctgcccgaccgtcgaccggattgtgctcaaacttcaatgagaagaaagggttgcctgtatcaaccacacttccggcttcctggacactcaaatcggcaggccgtttgttctcttcctccttaaccctgacgatctgggggtagacggactcggtagtgaacccgtcgtatactctgaatccgccaagcgtgacggtagcatccatgctttcgtcgtactgaatgacatctgcctgtaatgcgtcccaaacgatcgacacaatatccagcgcctttccatgaggatcttgtcgaagggcaaacgatccggtttgaagtttggcggtgacacgtagtttgagcgcgtcgttaggtacatcacgtgtgaccgtttgagcatcggggtcgtaaccgacgaggcttaagagtcctcggcggtcggaatctgtcatgacttcttcctccgtggtatgggaggcatctgtctcggactttcctttggcgccaaacgcccaaccaatccaaccttgtggcttcttcgtagccgccacagctttcttttcctcctcaagtttctgtctagccgctgcatctttccgaagctcggattttgcaatagaacggtaaaaccggatatcctcgtatgaaagtttcctctcaagttgttgaaataccgagaggtcctggagacatgaaacaaaggagggaatcaactaatatcctgcttggtctgtaagttgcaaactgatgagaactaaaacctacttctccgactaacaacccattcacactagttttcattctcacatacaactcaacatacttctttcgatcatctctcctctctgcgaagtatgcccaactccacttacgatccctctcatgaacctcagatcggatggcatcgagcgcgaaccgaagtcttgatctagcggggttggttttgaaagagtcctcgattggccggaatctttggtactgtttatgtttatggagtcaaacgtcaagagattttctgaagcttgtacgcgagataaaagtggaacaaacttgttgcgttcgggtatagaaatggaacagatctagcatcgacagcgcgtctcgatactgatcatcgtcgacaacgaaaccgaattcttggaagagcaactggcagtctagtacgggtgtgttcttatccactttatgattcatgatgatctattggaggacgaatcggatgaagttagaagttgggaatcgaagcaactggaatcataactttactcactcttccctctcctgtgacgggcttcaagatgaattgatggtccttgagcttatgcatgtcacttccatctcctctcgtgatctggttatcaagttgagcgaatcagttgctggatacaactcgtcacggatatagggaatatatacataccagatcggaaaagttaagtaaggtcaacgctcgatctgacttcacgatggaccctacgtccgtatcgaaatagattgctagattggacagttgagccatctaatggcagatcggggaaagagccatacgatggaagaagagagaaggagaagagaaagaaaataagataatgtttacggagttcgccaggatgagattgtcagaaaaaaaaagaaaaaaaaaacccaccttgtgcaacgctttgtctgaattgtgaatgaaagtctccatccaattctcatcagtcgagatcgctttgaattctgccagtgtggctccaatagcgaaaggatgctgttttcgattttcgattttatgttgtcgaatgcaaaagttattatggaacatcgaaccttccataccaacgaaaggaactatgcgtacctcgggcgtgctcaacttgtcttcgtatcgaacatgaatgttcttgatagtgatctggacattgttgacgatattctgaatcatccccgctagcgctgactcgttcttcttttgctcttctattggaaaaagttaatgtataagtcgatcatatcgtgtacctgacagtggcagcaaaagagactgaccagcccctcctgctccagaaacctggctcttgagatcaaatgcctctgcggcatcaagtctttcttgcttggctgcctgctctctcttctcatcttcttctggcgtggactatcaacgagagacagagagggcaacgggtagagtcgacagagcgacagagtgatatcggaatcacgatcaggatatatctctccatgccgtagcagcggtacaaagtattcaggaaataagaccgaccttgttctgtccacttggaaccgcgagaaggtagacatcctcgatatagatgctgaccggcttggttcccaacgcagaatatggaacagataaccttagtgttccgagatgaccttcaaaactcaatgagatcacgagtgagccggtgtttctttgatgtgtttgcaaaaattgagagtgagggcagagacagaccttcgatcacatctaccggcaatcgaaatttgtcgagagcctctctctttagtttgagacctttcaaggcgacttcacctgatatgtgaggatcagcgagtagaatctcaagtcagttgatcttactagtggaatcaagagacagtagtacacgaatttgataaaaacaataataagagcacgggacgaaccactccatagactgatgttgagttgatcggtgttgagattctcgacgtacggagccagaaacttgttgagcaggccagagaccaggttccgtaggccacttgacggaccccaactactcatcacggattataacagagagtagagaggatactgaatgtaaaagcgaacgatttgactcgagaacaacgaagggaggaaagaaagaatatggtaagtgcacagatggtggcttgaaagagaggaaggtcagagaaagagacgacatcaacccgatctcacgcagtctagcgatgatgcctgttgcactttgtagttacatgctcacgtgaccagtcaaacttgttacgtcatgctagtcactcttatccttcaagtctatgagtgggaaaccatctatcgttcagtcctggttgaaccatgttgatatggcgctgagagtaaatggtttcacacaatttgtgagggaacagtctcagctctgataatgatgtgaacattttctggcttgcgactgatttcaaccttctcggatagacttccttggtatccgcggacgtgtcctgtatctgtttttgctcaacaacacccgtaagctcttgaggagtttacatttttttttgtaaagttcttcttagttgattgagtgtatgtatcggaggccgtggtgggtcgaggggaatgttgcatatatgaaggattgagcgcgatgatcgtgacgaaatgacttgacgattttagccgagaacagtctctgttggacagaaagggtttattaacaagcgcgaatttgaccgaaatcggaagatgcgtttttgcaaagaaagactaagattcgagattcagacggattcaatgtcgaagtagaactcagtatgattgtatatgtttccagacgtccaagcttttatcgaatgaataaacgtgcagacgtcgtaaatctccgagaagacattgatactacttcaacgagcttctcgcggctcagacagcgaacggaaatgaatccaatgacgaacaaatcccacgaatgatatccgtctcgccatcagtcttgagtgttctctctctttctctcggaaggactctatcccgggccttccgagtgattcccaaagaaagccgaagtacggctagaacagtattatgtaagcaatagaattgatgatggggactttttttttcctccctcagagaatttgcttttactcttctctaccatctactgatccatcacaacactctacacacacttgctctcacccttacaactctttatatttattcatcatggctgctcgacaatttttcgttggaggtaacttcaaggtcagtcgtcgattccgtttgcggtttaaaattgttccatctactcacgattgttcttattctcgactgtttttcacatctcatcctatcagatgaaccccaccgtgcgttcttttcttttccttcttcctttgctatcttccgcttttttgtgcgagccgtcactcaatttatccctgttataccaactaatggcctgatgacagtcgtggaaggctaccgctgccctcatcgatgggcttctcgctgccgacattgaccccaagactggttagtccagcgattcttccgttcctacttgctgccctatcatctgtttctcgagatcgtacgaacggctcatctttgtccccctcacactccttcatcagaggtcgtcgtcgccactcctgctctctacttgatcagtgctaccgagtacatcaagtccaagtcgactgcgtcttcccccaagatcactctttccgcccagaacgtttacgcccaggagaagggagccttcaccggagagatctccccgcatatgctcaaggacgccggtgttccctggaccttggtcggtcactctgagaggaggacgttgttcaacgacaccaacaagttggtcgccgacaagactaagcttgctctttccgagggcatcaaggtcatcctttgcattggagagacccttcaggagcgagagtccaacgagactttcaacgtctgcaaggcttcgctcgacgccgtcgtcgctgccatcgaggagaaggactgggccaacgttgtcatcgcttacgagcctgtgtggtccatcggaaccggcaaggtcgcctcgcccgcccaggctcaggaggtccacgaccagctccgagcttacctcgcttccaacgtttcccagaaggtctctgatgagacccgaatcatctacggaggatctgtctctgcctccaactgcaaggatctctgtaagtttcgagtcactatgcttcttggcatataaatgcgacaagatcttgtctgacaatcctctttctttctcccttgcctttctcccttgaccgaaacagccacccagaaggacattgacggtttccttgtgggaggagcctcgctcaagcccgagtttgccgacatctgcaacgcccgaaagtaaatatatccagggattaacccctatctgggcaacacacagagagtagagagcgttcggtagatgctattatcagttattatgtgaattccttgtttttatcgaatgttcatgtttaatctagtgttgccaatgtttgtacatgacaatgtgaacatgaatctaagaacgtacgctgtctcttcccatgtcggaccaagcgtacagatcccacagatcgctggcggctactgcgccctccgccagtgaatgtctcggtcgactgcgcacgcttcctcggctctgtacccttttgtttcagtcgttgtctacatcttctttcgctggcccaagtattttcaagtccggagagagaatagaagtttcgttgattcaaggacaggtcggacgacattggagaaagagacgaagagatcatggttggtttcccttgaccatcaataacatcgttgcgctcacagttcgttctcgccaccacccttctgaatacaccatcatcattcacacctactcgatgtgtccgaatgcagaccgaccaccgacagagcatttcagtccgatatctgaaccaacgaaactcttgccgctggatctcgacgcgtttggtgcggactgggtggtagattgtgacgaagctgttgatgggattgatggatccgatgaacaggctggaagttcaactgtctatcctagattggatgtgtctttctctcattcaccctctactcctcagcccgcctttgcctctgcctcgccgtcacctttgtcatcgcctacattcgcccggtcaacggatgacaagtcagagtacccaataaagctaatgaccgaatcttcaagcgtgcgtggcctctctcatggtccgaactggatggaacgtgcaccaacacaggacatcaagaaggctcaacctccccctgccgatccggatcaagagggttcacctcgggtggatgcacaggtcgctaccgctgccaaaaccaatgctacggtcaattccgctgctaatactacttaccacttacctcaaatcccaaccataaattctcccacgaggccttcccaggtgtcatatcctgtgggatcatccctctccttcaagcggcttagtcgttcgagtatgatctatgcaaccccgccatcgccgtcggtctccaatcaggaaccattttccggactcgctctcggtccacctccggtagctctcccgccggttccttttcctaatcctcgcagtcagatcagagaatccattggatcgtttcaaacgtcctcgtctgggattgttccatcggcgcagaacagccgatcatcaatcacgtcttcatcatccttccctaattcccatttgggttccatgtcgggtgtcgaacctagtttcagcttgcctccttcatcctcaaacacgtccatctcgggttcaaacacctctctgtcttcctcgccggcgatatccagacagacgacatcaacagcaatggcagcaggagacaatgtatcgttcaaccaatcgttcgctcttccaacagccttactctccaacactactcctaccgaacgatctcctcggtcgaggacattcgaccaattcttactctcacccagctcttttggagtaaacccagctgcagcgaccaggtgggctgggggaggtacgggaacgagagcgcagggtccgccattggcgttggtcgtcaaccaggacactgatcaagaagacggatataaatgtccggtctgtgtggagaggattggagcagagtttaggatttcgggagaaagaccggacgtgattcctgaatgtggacattccatccatcatgtgtgttttcccttcttctttcttctcaaactttttgtctcagaagtaggcggacttaatctatcactcttctctcccctatctttcttgctccctttcgcgctgcattgttcgtataggactgctttgtgcatgtttatggaccactcccggaagtcaaccggttcggagacgttcggaaggtccagtcatatggagtttgtggggtgtgtcgaaaaccgatgcgggtctccgaggatggcgggtcgagcggaggagctagcgggaaaccaaatagttagtcacgaactctgcccagatttctgcttgtttctcttctgactcttctctctttccttttcaataccttttctagaactggccgctttgacaggcgcaaaaagcatgaacggccctcccccacctttactaaatcctctacacaagcccaaactaagcgtctatggcgaatatgaaaacaatgatggagattccgaaggagacgataacgacccccttgacactgttcgatcaggcgctctgtccgtcaagtccggccaatctgatcacgttcgatacgaagggtcgagcgctgctcagattgtcgtcccctcgatcaccatccttcccgaatttcaaagcgcggtcagagttaacaccggcaaactgatcgtcacagctgtggtgatcgttgaagtccctctcaggtcgaggagagaagagactgaactgctgtcgtcgtcgatatcgatgacggggttgtcgatgacgaacggagggggtaacatcgatgtgggtaggacaagatcagggacaggaaaatcgctctcgtcgtttggatcgacgtcgtcgggaaggaactcgtccgaatcgactctggcccgctcacccagttcatcctcccacgtctcttccttcgcgcccatgtctctctcttcatccggtcaaataacaacagacacgaattacccatccccagagtttctccggagaaaattggtttcgatggatggacaggttggtttgatagataacctgtcgactctactcgcctgtaatcgagctgtcgttcgatccaacctaccttccctagcttcgtctagtggcagcggtagtggggtcaaagaaaaaggatacttgctctacctattcaaagaagctctcttgttggtccaagagcccagtccttcagaatcgacatttctgaaagtcaaggcgagttcgctcttcaaacggatgcctaccgttccttccttcggaagaggaggagcaggagcagggtctttggacgaagtaggtagcgcaggaacgtacaggcttcgtcaaaaaatccttgtgcgtcgaatgagaggtgttcgattgagtagaccggtaggtcttggcccatccggctcggacacctcgatgacgattgtagtggaggacaacagaaggctctccgacctggtcctcatgtttcccaatcaggaaactagaagaacttggtgggatcggatcactcatctgattcctacgatctatcaagacggaactttcacttccggaccgaacccggagtctaaaaagaaacccgacacacactctctttcaaatctcagtcggaacgactctaggtctggctcggtttctaaattcaccaacctgtcgagcttgtcaaccacccatcggcactctcctacgttatccacatcgtcttcaaatggttcgaactttctatcagtaacatcgtccgttcgtccgatgtctgtttccggattaagtatataccattcgaacccaaagacacataccccgattgatatcctcctcatcgtctccctgacatccccttcgatcgccaacgcatccaccgctctccggacaaggatcatcagatcgtctctcgcgtttgtgatggacaagattggatctaaggatcggcttgcactcgtcacatacgagaatggacctcaaggcgttatcaggagaactcccttcttggcggtcggtagggacgggccgggcaggagacgattgagccaaatgttggataggttgggagaggaaagcaaggaggcagatccgttcttggttcctttacatagggaagaaaagtcggatgtcgtctcagccgtcaacgtcggtaagttctatgctatctttcttcttctctcggtgttgcgaaatgttgttgttgttttctgaatgttcacgaacaaacgctgacgtgttgatcctacctttccggtcctgatagctttggacgtggtaatgcagcgaaagacaaagaacccgttgacgggtatcgcgctggtctgtgactcagtcgatagtgtcaaccgaagtcaaatggatctagttcttgccagagcggaagctgccgagtaagcacatttgcattctttttctctatcttcttcatcaacgtggtcattctctttctttggttgacgaacctttttttttatcgcgtcgtctcccatgatagtgtgcctatccattcgattgggtatggaaaatcccatgatccttctcctcttcaattaatatcgaaccatacacacggaacgtacatctttgttgacgattggtgaggctcaatagagaaatctttcacgtagctagttttgcctcatgctgagttgcaaaacgacttacgattgcttccatccgtttgacaggtacgaccttcagatctccttggccggtgtcattggcggtctgatgagtatcgctttaacgcgaatgaagcttcacatctcgacggctgagaatgatttcagcgtccgcaaagtcttcggtgttgattcacatatcccgcctgatgggaaacacgtcgatatcgaacttcgagaactgtgtcatggggaacgaagagaatttttggtcgaactcgaactggacgatagttttgaacacggaggtgggaaggatgagaggggaagaccaaagtcgtcaggttcgattggagggaagggcgcgagtaggttgagcagctcggcgtatacgtcaagtgcgatgattgacgaagttccggttctagagctcgactgctcgttctacgagtgagtatttttttttgtttcttttcttgaaaagtattgggatagagtctccgagcgacgcaaagaaatgctgataatatcattatcttctttctgtatcctcctttcgtgcttagtccatattgctcaaaagcttgttcaagactagcccatccgctacttctccttataacgctactcccatccactgaaacgcatcactctccactctctgaaccgatcatcagccgtcgtcggatggaactgatggcgtccgacacgatcgatcgagctctcctctttgtcagtagacgaaactacaaacgagcccaacggttgatgcaagagactcggatgatcatccggtctgtagccgaagggttgatcgatcagatcgacaacatctcaagaggcgaatacttgagcgcgaagaaggagagaagagacggcttggccagagaatgtttagtggtactgagagcgatcttgatggatgtggattcgatgctggaaggtttagtcgaagaatctgtctcgttgttcgatcgagatcagcgcaacttgggtgcccaacaggtgtgtgctctacgcttctgtccaactccctctccttctttctctcttgctcgcacttatcccgaaaccgatatgtttcttgtccgatcacaggcgatgattcttcggtctcagaaagcgtggactccacgaacggagactgagcgtctatactttacagcagagacagctctcgagcttgtccaacaaagcagttccagcaatcggtcgactgttgattgatcaacctaatttgttttccctttcgtcttcttgcttctctttccttttcttctcctcttttgggattcacagcgacggtctttgggcatttctctgtcattgcaatctgtaaaatctagtggaactttatttttatttcttattctgtttagaatcatatagcatgtcatctgcttttttttcttctccttcttatatacatctgggtcgcaaaaagtttaccatcgatatgtaccacgtcaagtgtggtgacactataaaaccatctaagagtgtattccctgaactagaagtatttcgaacattttaaccctaacaccccagaaacatcgatacttgaaacttccgatttctccagctgctgaaaaaaatatacaatggacggagttctacagcctttgataggggtattttgttgtgttggaccaggttcttttctcatcatccataaggcctactgattgaacgttctcgatttgttttgctttgattctgcttttcaagatgaaaatttattgtgtcgttgttactcgttttgtttactcgtgtacgaaatttgtgtttttttttggtcaaaaagtaaagtgcattggatatgaatcaaatgatttactcggccttggcctttcgtcgctggtctcgctcctcagagatggtgagcttggtacccttacccttggggagggagacggcgggcttggaaccagatccgatgacgaagatgttggacaatcgggtggagaaagttcggtcaaggatgtccttgacgtgaacgatgtcgaaaccaccctcgtgcttctgcttggaaacgatgacaccggttcgaccgttgttgtgtccaccggtgaccatgacgacgtttccggcctcaaacttgacgtggtcgacgatcttgttctgctcaaagtcgaacttgatggtgtcgttgaccttgatggcagggtcggggtatcggatggttcgtccgtcgtgggtgacgacgaagggaacacccttgggtccgagctgaacctttcggaccttgaggagcttgtaaccagcctcctcctgggagattcggtggatggtgaatcgtcccttgatgtcgtacaagattcggaagtgctctccggacttctcgatggtgacaacatccatgaatccgagggggtaggtgtcgtcggttcggacctatgacgttcaggaaagaaaacatttaatacaaggctgcgactaggtaaaagacggctgatagaaagcttacctttccgtcaaccttgatcaatcgctgcttgacaatagcagtgacctctcgtccggtaagagcaagcttaagcctgtttcggaggaagatggacatggggagacactctcggagcttgtggggaccgggggaaggtcggggggcctggaggagaggaagagaattcaatcagccttaggagttcagtcacacgacaataaaaaaacattaacttacataagttccagagagcttgtccaaaagccagctggaaggagccgcaagtcgcttgactgcattgatatagagtggaagtcgtcagaaaagagtctaaacactctcactaccaatccgactgatgccggtacaaacaggtgtactcaaagccgactctcttatagctttcattctcttgctctctcttgatagaacagacgcaagggagaaaaaagcacaagagagccgactggctgcggaaagaggggtggactcctctctttgatgatcggatactaacgatgtttcttaggtcctcgagcctacagataaaagaacgatatcagacgtctgcctctctaaatgacacagaagcacgatgctcaggacgatgctcaccatttttgcttgatgaaaggtgacttgaaagtggaaaagaagagaaaagaaagtcgagccaaagttcaacacaaaacttttccggcactgcgaaagctgttcaacgtgaccgctcgttacgtgtgacgcgctgcaaattggaactccgattgtatcacgtgtcatacatggtgaccgattagattagattacaatgcccttgtctctttctctatacgtctctgccaaggtctatattccggtgactaagtttgggtggattgagctttggctgatgatcatgatatgaatgtgtggattccttgcggttcctccagatgatatacgaagaagtagtcgcaccatcctgtgcagtacgcgtcgagctcaggtcgcattggagtgcaaacgttgcatccaaaacacagaggagtttgagttgagggaaaagaaacacctggcggagggcaattatggtaggatatagacatgattaagcatcgaaaagctggttgtgtgactgaagatgatgcttcaaaggaagttgtccctctggattgaaacatctctcaatgtcaaacctctggttcagtcttcatggtctcactctctacgttagggttccttgaagtatcaggtcaaacgttttaaaacagcctttcgtcttgtgtaccaaacacactatgctgaacatttttcaaagaaggatacggttgagtaggtagatctcgataatttccctaagattctcatgtggtccgtttcgtagaccatcctggtatctagtcgcagaaaagagacagagtagaaacatatacaatgtatttctgccgaaccagcctttctctatacgtatcgtctataattcaggcacagtcttggtcgagagcagatgatactcacaaacagacatacccttccaagactatacactggcatgatttctgtttgtgaagacaacactcagaacaaacaagaaagggatgtgtcctcagcgttgtgattcctcatacaaatcctattgggacaaacgcgatttgattagacgagccgaatagagaaatttgtagtcaatcttcacatcgtctctcgacggatcatcgtcgtcatcgttgaattcctggacgggtcatcttccctttgcccatcaattgttcaatcgtctgggtcgtcttcttcgttcatctcatccaagccaggctcagtcgctgtggatttgtttcgccaaagatcatcatccttgaaccggtagtggagccttcttccccagaaatgtcttttccctcggccgccgatgtcccaggattatcagacgatcaaacagtcaactctcctcaacggtcaccgtcgatcagagagcgtacagcatcgttcaccaaccggatccgaacgtcgtccacatcgtctctgaacaagcttaaacggtcagcatccagtgcctcggtctcgccgtcaactgtcggccatgcggatggtccacctatctctccttccgccggatcttcttcgagcgagcgaaagaacaggcggatcagtctcagcaaaatcttctcaggcagctcagggaatggccgaaattctgacaagaacaagagtgatcattccgcccccgaaaggatttcgcctgattctccgtccagtggctcaaggatgagcctgagtaaatcaatgagcttcggctccttaagaagcaagaaagaagcaaagtaagcgagtctctttcgtggatagggtctgatcctggacccgtccacaaatctcccttcctaatcttgctcacaattgcgttcgctctctctctctgtgcagatccctccatcgttcgtcacaccagtctcaaagaacgcatcggacacctctgacccctgaggcgctccctccacaattgtctaggtcggtcacaccgcctggacaatctccaaacccaagcctacccagatcgacttacacagggatcccttcaccttcctcccgtcgagtcgtctcacccgcacctatgaccgcaaatacctccacgttctcttcggccgcctcatctccttccaggatccctcgaaggatcagagtctcttcaaacccttcacttcctcctcagatagacacgttgacctctcccgttcgagctcgcgcaagcacttcccatatggctacccctgataaccaacaacatctaccgcaagtactccaggcaaaaaccccgatcgctagctcttcttcttctcgatcgctttctcgagcatctcaagcgccttcgttcttattggaggatccattctcaacaccgccacctccagaggtcgtccagccgtcgacctcatctgctaccgctgtctcaccttcttcgtccccttcaacagctttcgatctcctccagatgattcaacgagagcgatcaaacaagtctgctcatactacttcaactaatggggaacgaaccagttcgaatttgaagagatcaagtagtcaagccgagagtatcctaggaggggtactagaacgggaagtagaaggcggaggaagagttagtcgatcaccttcggctaccagacgacggagattgacaggcgatatgatgagacccagagaagtctctctgagcgctaaagcggagagtctgaactcgccagatatgaagagccaggcaggaggaagctcgggtgtggattcgatgattcttacgcctgaatctcctcgttctcaacattcaccggttgcgtttggagaagatagcatcttgggcagaggtgtacaggaagccttggggcctcctctgcgcgaacctgctcgaatcttttcccttccttcgtctccgccatcctcagtgacgccggacaagatccccatcccgttgacggatgagttgatggaagcactcaaattaggccgggtaatgcctcagtcttcacctctccctaaggcagaatctaccgggaaagatgtctcaacagtagatgcaaggtcggaagagatcgaggccgaggaggctgcaccagaacatcaactcgagcgcgccattcctgatgaggccctaacatctgacgaaccggcgaacagagctagaacgccatctgtcgaggcgaggttgcgtgagactgaagtcttcaactctggtgccaatgctaacgtcagctctaacgacagagaagatgtcagggatgatgctccgtccaacctgcccagacttggactcgatcctgaacatgttcccctaaccggacgagcggaacatgctcaagaagttcaagagggagcaggaatcgacgaggacgatgaccatctgatcacgcctacgacaacggaacgatcgagtgcgatctcatcacctagattatcatacatatccgaggaatcctcaaacgccgccggcgatgttggcggtgacggggacaacgatcaggagagtgaaagcggggaggacatcaatagtgaagacatccgtgagatcctgaagggattctcatcgagacaaccaatgtcaggtaggactctggacgaaagccagagtggcacatttgaaaatgtcgaggggcataaaaacgttgagaacgagaagaacgactatatgcccgaagctagaggcggtcatcaggactcatcgaaggcaccaggtatgttctcttctattcgtttcttgttcttcggtagtttcgctttcttttcttcattcttcattttgctttgagctcgaagcaaggagtcgatcatcagaggcctatattgaatccacacatgtccacgtacattcgttgggtacacagattcatcaatctcagcatcatcggtccaagtatctaatacgacgaccaaacctatatccgacgagcacgaacctacactggtttccgcgatgagattacccaaggaatcttccggactttcagagtccatccagtcggacctctcgtccactcgaaatgacagtcggtctgaaccgatgccttcctcaggatcatccgccaaatcccctcctgttgttgacgatgctccgaccacctccgatgaccatagccttcttggacgagaagaggaagtgaaacatatcaaggtggagcaaccagtagatgagaagtcaggtgacgaccaacctgttgacgtcctttctcctttgaccgagggcgcgagatctgacttgagaagtcagggagaagatgacgctccacaagactcaccacagaagaaagaagagggcgagaggacacctgtcggtcttcagtccgaatctttgcttggcgatggttcgtcgcaaaagcaagttgaaacggacgaggcgagacaggaggtcgctcacgagtcaagtagattagacgataagactgaggaagcgaaggagggtaagtcttctctgatgctcttcttctcagcattcctctttttcgtcgattgcgaccgactttatggttttttttttgcgcaacaggatttcacactaccttggaacaaacgacagattgtccatcgcctctgatctcatcttcatccgaaaatcctcttgatgccgaacctactaataacacagaagactctcagatcgagaagcaagaagtgcctgattgtcagttcacatctttgacgttctatcttaatattgacagaataaaaactcacaaacatggcttctttcaaactgtccttgacgctggtacacgaacagctccgatcttgccaaaatacctgccactccggctgttaacctcgtcaagcattcctactgataactcacatctcgaccaaaaccctgtttctctgaacacaccaactcatgacccagaattggcatcgactcatctttcagacgagcataatcaaaatttctcaggtctacctgccgatgatgttgtacacgaccacaaatctgaatctgcaggcctggtgaatgaaccagcgaaagaggcagaaatcgaaaaagcagagagagatattccaacttacttaacaccagtagtcaagatatcgtcgagtctaacgcctcaaagctcaccagaggcgatccaggaaggcatgtatgatcttggagaacgtatgtaatttctcatgctacccctttctctcctttctgtccagctatccatatcatgtgatgctgatgtcccccctcgataaatacttctgtaaagcttcctctcctttgaatataacagatcaacaaacggtttctcacaaaaccagtcctgtcgactccaaactcaagctttcgtccgatccatcatcagactctccaggcgctatcatacttcctcctgacgtcccctctactaccactatcgacgatgtttctccttcaaccatcaaggagtccatgccaacgactccatctttagagagggaggatagagccattcaagaaggtgcttctgcatcgatagcagagcagactctaaagcaagtgctagacccgaagagggttctgatcgaagacaagactggagagttggcttcttacgaagctcgtatcgcgagcgccgataggaacctagttgacaaaggtaggtgttcttgtgtcttcatcttcctttctttgttggtcttttccggttcgtttcaagtctgactttgaccactctttcaatacatcaatggatttctacggcgcatattttcttgtcaaggcaaagaacaccgacaggactctcttgtaagagacagcggcgctcagaccaagctgacaagatctgaatcttccgaatctcttcccaaggagcctttgaacaaggcattcccttctcaccatatcagtgaagatcttcaacatgaagaacagccaggttcagctctgccttccactgcagaggacgatcccggggtttcgcttggaaaagaacaagaccggaaagccgaaatatcttccgctactcttccctcgagcacgcatccaacctcgatgaacacccaattcagtgtgaatggagagactaaagacgaaccgccgaaacatttttctgatgaactgtcggccgagaccaccccttctatttctaagacccatcctcaacctctcgaaccaaacacagcagtcatatccgatcaaccacttccacccaaagctacatctacgcccttggtttcttctcctacaccttttgtagcagccgatgtatcctctagctcatcaaggccgaaccttccatctcgggccctcaccacgcccacaagatcttcaacccctcagcgaccccagcttcccagagcagccaccacaaactcgatcaacacgttcgaacttcccaatccatttgctagcttattgaattctcagcgatttttcattagaatcccggtttcgttgcttcctacgaggcttgcttctttcgcgcaacaacccaccttctcaattccatccttctttcctggagcggttgacccctcggaggggtctcgttctcgatcacattctccggattccgtacagacaatcggctatgcctcaacctcgaacgacggaacagaaccagtatccggattcggatctggattagaatcagggaaggcgttattaggaactgcagcgagtatagtcgggacatctgtcaaatggggatttggctggccggtgcttgttccgttaagagctggccaatacgtgttgacgacgttgagtagtcatgcaggcctcggggtggattctgcggtcagggagaaggacaagtcagtaacaacagtggcaaattcataggactcatctcttccgtttccttcctctctctttacctttgctgtcctcgtcaagataaaatagaataaaaaacgagcttttacgacacaaacctcttcttgctatgtatttctcacttcctctttcttcttccctatgcatattgtatcataatccgcttgctctgcttctccatacactctcgtttctcacccttcatttccgttacagaaacgcaaactcgttaacactttctaaatatacgacctcgacgcccttctgccctttccttttctacctaacgcgcttctccatatgcaccttgtcttgttcaattctttatgattatcatgaatgactcctcaatggcgatcctgaagaaagctaaaagaaatttatgaatacttaggaacttcctttgagattcatcaggtcgagtggaactcgatttgaaatggaacatatatatg

SEQ ID NO: 1848 - DNA, 8736 bp, Xanthophyllomyces dendrorhous
acaaataaggaatttcaattcaaagagaaaagaagggtgggtgggacatctagggagaacatgttgaggaccatatgagccggcaaggagacttgttttacctggaacaaggagagggagtaggaaaaaaaaacctccccccgaattaggccgctgttgtgttttctatctcaactccatccatcggttggtcctgcccaccactgataccgctgacgacctcctctttgaccgcagtgatgttcccttctttcgcctttctcttttcctccaacttgatattcaacattctgacctcttcctcaaccttgtcaacggcccgtttcatctccactagtcccatcgctgctgccattagtccatccatcttctcctgactacctctagtgggcatcgtcagtttaccaggtaatggaacaggaggtctcaggtcgttcaacagagcaaaaataggctctgcgagatttggtttggcaggaataggaagtcgggtagagcgaagatagaccggctgatgaccggtcgggttagatgtatggccagatttggaaccaggaccggtaggaccaggagggtttgttccagggataggcgggggaactcgatagatgcagtgaagcaagtctggcgttttattgatttagaagacaacaaagtcgattcacagcatcggtcagatgggttacagaggggaaggcgagagaaggaagataacaaacctgcttttgcgagtttatcggctttcttattagcggctgaagaggtcgaagcagctgatggtccgtctaagccaagtacatcctttcgcttctattcattgccgttcgattaatgtcaacgatgttcttccgcctgcataaggatcgggagcaatcgaagagtgatagaatactgactttatcaccaccggcgcctgtttcgcccgatctcccaggtaagccaacaagaccgctctcgaaacccccaagcattctcatcagatcatccctctctgatttgaattttcgttcttgttgctccattcgtttacattccaagtagagagcctcttcttcggcgatctgctgagcagatagctggaagagcgagttggcatatgttttccttgctacctctcgttctgtttgcgaatgaaaaagagagagtcaagtcgtcagaaatagaaactttctttttcattccgcctcagacccattcttaagaacaaacctttgtcaaatgcgtaactctgcaagagcatgagctttccgttttcatcccctgtgggtcgacttctgaccaacctcctgcaaattgagtagtaccgattcttgatatcctcgatgctttgtttctttcccccgccaggtagattgatatactcatcggcttcgcccgggtaggcgtatcgatcggctacaacaacaaaccgtaggtcgtatgtccgaaggagggcaaacaagtacagcgtttctgaatgcgaccagttgtcgtctgttgttaaaatagaggtgtagaggatgtaaggggtcgctttgagtcagttctgatgtataatagcaatgcaaatgaggaaggtgcaagcgcatacctctaagatgatcatcatattcagcttgtgagaaatccataacgggagtagctgtgttgtactttgcgaaagcatcttctgggttcaccattgaatcgtagttttcaagagaacgagtggaataataagggtgttaatcgacgggtcttatgagatatacaatagcatggatataacgtcgctctggatcaagagactcactttctggtgaactttcgtccgtcgcccggacccaatgggataagaacaagccgtcttcctctcgtttggtgggtgtgaacgatttccattccctatgatggtcgcagtagcaagtcaccatatatgattgcacatcgaaaaggatgagaaacatgatcccgcaaacgcgtccgagagaccaatcgattggatctcgagagaacacccaaaagatcaaccgggagaagagaaaggaatcattcagactgaccatctagagcctttcttgcgagctttcggtctttctttaaggttaatcttggagggaccgatattggaggcctgtatacttggtgcgctatccccgatgagcgcgaagacttctctcgaaggaccttctatccgtgacctggatgagctagccgaaagcaacgatgatgggtgagatggtgccatcatcggtttcctgtacgcgttgttcgaggcagctcctggctgaggttgagcctgagtctgagccatggtttcaacagttgactgatggatgaatggatggatggatgaatggtcggcggtcggatgatggatgatgaacggagttgttgatatcatatagaaaactggatatttccttattacgttttctaacgaccgactacaaaaaattctcttttacacaaataccattcaccaccaccctcggtaacatcaagagcatcgattatcatggctcctccgtcatcatcatctgccgcttccaggaaaggaaaaggaaaaggaaagccagatgcaggttattcatcaagaccccaaactcagaaccaaccaccaaagaaacgcgggtttcaggttggtccaaagaacgctccgaaggacgcatacctcgggaaaggttcgtcctccatcgagttctctctttattctttttgtttcgtgcaaagactgctctatatccgagacgaatacgatattgatacaaacgtgcgataacaaaaacagctcaaaagattaaggcaaacttgattgcgaacgcgaagacgaagcgactctatgccaagacacttaaacaggaaggccttgaatctgagcgactcaatagacggcccagacgtgaaggacgactcgctgatggcaccgccgacgatatggttcctgacgataaagaggaggtcgagttcgatgcggctcccgtttcagatgaagaagcggacgatgctcaagagacagccaagaaagtgggagacgtcccgcctccactcggattctccacgcccgatatcattctacccccatcctctttgtcgtcgtcgtcgtcacgccagaagaacggatatgtccccaatactcgtcgtcctcaacaaatgtcctcagactcattcccttcaaggccagcaccgtcatcgactgccactgttggacaggcgcaaacgagagaggataggaggagagccagccgaccggcgccggatgcaaagggcaagcagcgacagcctcggatgggtgacaaaatggattctctactaggaaagattaggaagggaatgtcatgaacagtttgagatcctcagttctagctgcatggtgctgtatgcgtgagaggcggcaacatagcctcttctgatgacacgacatgacgagaacaagattcgaaacaaccacattacccaaatccacttctctgaaaacctttctaattagagaaaacatttttataaactgttctctctcccaaccaggctcactgcctcactcgcagctctagcgacctcctgaacctcagcttccttcatgatctcttttgccgacttttgtcttgcctcttgtttcttctttttctctccaccctcagcattgttacccttgtcagctctagcagcggccttcttggcctttttgtcctttttgttggagggtttggactcgccttgctcgacagcctggatagattcttcaacaccgacttcaacgtctgcgtacagagctgagatcgctttgctgttgataccattaacgtcgtcagataagaatcgaaagcgaatggaatcatgttcagatgcccataacgtatgaaattagatataaaaaagggaaaaagaaagagaggacaaacttgtagtgactgagtttccacatcgacccgataggaattgagatcatatctaatgcgagcccaacgttttgagatttgtggaatgtttcttctatgactgatgctccttcccgagagggcggcatggtcaatctttggagtttcacgatgatcattatcgttccagagtgcagagccaagagataatggtcagatatgagggttgtattttgaaaagtagaagagacatacttgatatccttggggtatcgttgagagaaatgggtgagcagaatattctgcgccctcattctagtcgaacaacaccaaaccgacatccatcagtcattttctacgatcaaactaggaagaaagcagaacaggaccagaaagaaagaaggagacatactgtcttccaatattgatcgcctgggcaaacgtactatgccccttagatttcgccacctccgcccagatcttttcattcggtgagggcaagccgttctcctctgcaaactttctagctttcatgatccgctcgacctctcccggctcatcatcgcatatggtagcttcatggatgagtagcgtagcatcatggccggctatggcaaagtctcgacacggttttgtatcacctgaatagctgtatcctcaacaagaatgacacaagaaaggaggtaaaagagaacttattagagaaaccaaccttcaagaaagatcaaaggggaagagaagagctatgaggagaccaacgcaattttccatccgtctcgatgagtgatgacaattccatagcagtttgtgcctgcatgttcgaccttgacggtattgaccttcttcaagccaagggcttcttcaagttgggccatgtttgaattagacgcatgttcacgttgtctatgatcacacagtttatcaaacagtacgaggaatcaggactcgattgaaaaaaatcgtggttgttgttgtctgatattatcatcagttaagaggcgagaactcacgactctttccataaggcaatctttcggttatcgataaacttgacattctgcaggccaagttcttcaaagtactgaagctctttcaattgaaactgaattctatctggacagacgatgaacaacggtggcggcttgggatatatctgttttggggttgtcaagtatcacgttagtcatgcgaggccgtttcgctgtcttcaactcgacagaaggtgtttagaaaaacatacttgtgttcggaacctcagtagtctagctaaaccaaggtggtggtcggcgtgcaaatgactaataaagatcatcctcaactctctcattacctttacgattcttggcaagtctatatcttcgtcttcaatctctttttgctcaggtcgatcgtttcccgaaagtttctcgcgagcaggagaggggggagatgtttgatccgtgttgatgtcttcatcgggaacaaacgcatccccaaaaagacgagagagttggccgagcgtgccctcacctgtgtcgaggaggatgccaccataaccggggatatggatatgggtggagctcactacggtttgcgcacgaccaacgtacatatgaacagaccacgaaccagaacaccgccaaaggaggtacaacaacaaaaactgattagataccggccaggaacgaacgtaaagaacaggtagagcaagaaagaacataccgtttcgatactttgaaggcatactacttcctgtacccaggggtgaaaccactacgtcgtctcccggcttgccccttttgactgcctttcctttcccactgttcgaattctcctcctctttgtttccgtcccttccgatagactctacccaaatctcttcttttgcctgtttcacctctttaatgaactcgggattttcctttcctactctatcctcgagtcgctcaggagtgagcgcattgagtctctctgcttcggctgagggaaggcttattcggccaggtggctcacggggggtgatcgagatcgtttgacctggaatcatcggatgatgattatgaggtacttttggagcaaagcaaagaagacagaagaggcagcgatcatagaatcagtaatctttggttgaagcaattcagatctaatgtaaccaaagtaaaggatgagagtgatcgatacacacaagccggccatttcttccttgaagcagagacctgtctcttgtatatttgtggatcgagcaaggaaagcgctgctgacgaggtagctgctgaatagtagttgaggtggttaccgacaatggaaggatcccctgtgatatgctacattggcagatgtgttacttggattagctttgaccgttcggacgagaagggaagaagaaagacgaagggaaacagacaaggaggaagagaaacaaagtgacgtacatgaacgtgaggaccaaacttcttcatccactcctgatatttctcattctctggccaggttccctccctgtgccagattacatgaaccggccagattccatcatctggatgaggagattgatacctcatccaaaacaggttgtccaccaggccatcgatgtattcctccgatggacagtcgatgatcaacgtggcctgtgaggcggcgtcatttttgataagaaacaaatgaagagacaaatagagttaatgacatgtagaagaaagagcgaatgattgacagagaaacacggatggagcagaaaggaaaacgcacactactcctgatatcagggccgagacattggtcgctcgtcactctccttccgtccacttcgacctgaccctcgttgatcagcactgcccgtttgagtatcggaactcctagtgcatctgctttgttcacatcaaactttcctctcttgctcggtcctagaatgacatagctcacgcgcgctccatgactctcgacaggtggcagtttctgataaaattgctgaggatctgacgctttccgagcgtgcccttctgccaagggggtttcggcgggggggccaggaatggtatttgaaggaaacattcgattgatgatgttcttttggacggcgtaggtatacataagtccgactgatgagaacgggtcggagagatgttgaagtctcgaccaacgctccttgtgttttcgaggtgcatcagaaagaacctctttgcttttagactccgtggacgactgagattgggatcgcttgcgtttcgatcgggtagaggaagataaattgtagggctcgctgggaacaaattcttcggcaaagttgggaacaaaatgttgccagtctggattgagactctgtttaaaggattccgaccaaggcgaggttgaagcggtgttgttgccagaggcagaagcagacagatcgagaggtggtggagacggagcatcatcatcagagccgtcgctcgtcgctggcgacatcggcggagccgaaggtgccttgctgggcacgttcaccggaatggcatacgcagagatcagaccatcctggtagattggagatcgatgggcagacggcgcggtgatcgaggtctcaatcacggtcagtttgaggtccggtctacaaggcgatcacgaaaagattagtccggatcgtaaatgaagtgtgtcaagcaaggagaaaggaaccgaccgattgaagaatcccctcatactggctacatagtacgtcaggttccgcggaccaactagggtgatgtccttcactcctcgttcgaccacggtgaagagcatacctgaatcgggcaaagcatgagggcaacggcaatgaaacaagacaagagtctcagttggcatactcgacatatttacacaagagaaagcgaatcaagggcacacctggtaaacctcctatggcatcgattgtaagactggtgacaaagataactttcgtgttccgaagaccgatgttaagctgattggtgagtctctgggtaccttctggcacattgaacaagtactttgatgacggaaactggatcaacgccgacggttcggaatccgccgtgagagaagcgatcgtctgaaagttgtaggccatcgagcttgacgtgccaggatacgaatgagttgacttttgagaagcagagatctgaccggtagcggccagggagcgtgtttcgcttttcgatcgaccttggactgtactaggcctgttatcgatgacgacctggatgggctttaactgaactttcgtagacttgtctatattacggaggatgcctttgatcttcttgtcggactgtttcctctcagatgacaccgatttcaatgatctctgtccaagcactagcctagcaaggggggtcggccgatagaatgagaagagtaaggacctaatggccggcaaagaatgctttgtggaaggactcgtcaaggagagtgtgagggttgatacctctgggtgttggacgggatggtggcgaaaaaatatcaggacgcctgatcgaagcgactacggagatttctattgcttgaggaaaaagcattagggaaatcgtcaacaagtttttgtattcggtctcaggaatgtactacaaaactccctattatagatttgtagtcttcctgaaagctgtactttctgcctttctttcctaatggcccattaggaaattgtgagaaattttctaatacattcttttcgcctcatttgcttcttcttttcttccttccctcttgcaagctctcttctctctttcaaccacatacatccctcgatcttcccagtttcttatgagcactcccatcaccagcagcaaagtggacggtgagtttgagtttttcgtcttcctggcttgttgtcttgtgtcgagccctcttggtttccttctttgtgggatacctggcctcttttttttttcccttctcttctgtttgcctggtcctgttgtttctt

SEQ ID NO: 1849 - DNA, 16975 bp, Xanthophyllomyces dendrorhous
tttcatggacaatttcctttttgtatagcagcatcctatgcttctctgcacgctcggtgcaaatacacttctctttggaacatagcagctcaatcatcctttatgttcttcttcatctcataatcatcagacaccatcaaaaaatccgcaaaggcggctacggcagacaagaaggcgcctagtgcgcccaaggtctcaacccctttgaatctcgccagcaaaggtaaggccatttgtgaagctgtttttcagctcgttttcagtcaagccggcagagttgagcttacagtgttgttccgtctgtttctcttgccttccttctctatgatcccttatgttccttattcaaaaagatcctttcgacgatgatttcgacgatgagactgagaaggtgaccaacgatgctcccggtggcaacaaggtccacattcgttagtgctctccttctttctgctttcgcaactctttttcctggggatagcacttgttttgacaagtgaaatcctcctctgtctcgttactatcaacaggaattcaacagcgaaacggtcgaaagaccttgacaactcttcagggactcgacaaaaagttcgaccccaagaagatccttaaggccttcaagaaggtcagactttcccatatcatctcaacttcatatcatttcccttatcagacaagacactgaccttgtttcgatctatctttcgcgttcaccatcgaactcgcaggagtttgcctgcaacggaactgtggtcgaggatgaggaagccggtcaggtcatccagctccagggagaccagcgactcaagattcgacagttccttgtcgagtctgagctcttcaccgagaaagaggccaaggcgcagatccagatccacggtcactaaactctcagcgtgtttgtctgtgcagatgtaatgatgagagggtagatgtgcatgcggcggggaggaggtctgagagtcactttgtatagcagaacgtttgacggatgagactggttgtagcataggcctttgtctttttctcgtcgtgttctcttctatattgtgtgtgcgtatctcggtttgtgcgtgtgtgtcagaggggttgagtgtgcatagttgtgtggatggtagtgttctgtttgttttcatgtctatcgatttaatctctatctcatttccattcgagaacgctccgccagctacacatcctcttctctctgatttgagcatcacctaagcctatgctgcctctctggataaaacaagaatactgatacgatggatgcccaacacggaagaccggatctgaacaggttggggagtatttgggaaatctgccgaatccattagagatttcaaacaagaatttgtagtgtcaaacttcagcgttctttttgcccccatctcattttcatttgttcccaccccctttcgtctatcaaccatcatctatctctttcgttctctccattggatcttgttcatccatccatccatccgtacatacatccccactgcacaatcagtatagtctgaatcatgtccatccctttggcagtggctcggacgaatatgatcgtcgtcgggacaaactcgactcgattctttagctcgtccagctctcaacaggcacctcctcgagctaaacccagaacaagtcctttcgtctttggcaagaagccttcgagctctccttcctcttcctctactgcatttaaatcagctggaaaacctgggtcagcctcaagcggtcctcctccgatgatgaccaaggctggaggctacaccgccaagatcattaccagggaatcccttcctgctatcgccgcaaagaatagggcttccaccgcagaaaaagttccgatgtcaaaggctccagcgaaaaagtcttctagaccgagctccaagccggttgcctcaacctcgtatatttctcctcaggctatcgctcaatcaggtgccggaggcttcggcttggcaggttctactccttcagccgatggtgcagacgaacacagaaagacccggcaggagatcgacaatttcttcaagaccatgcacggctttactcctaattccgtcaactatcgacttccggccagttgtctccgagtgaccaaccttggagtcaaggtcagcggtgagggcatcaaagacgcgttcggaacgtacggttcggtcgaacaaatcaggtttccaccgacgttgaccgacgcgtacgtgatgttcacgtccgagaaggacgccatcggttcgctcaaagcactcaacgacaagaccaccgaacttgccagatctctctctgagcgtctgcccaggatcgatcctaatgacccgccgcctgcacccaggtatcatccggatggaactccaaagaaggtgttcaatggacccaggatggccagagccgagatcggaaattttgagcgagaactctctgggttcaagaagatcaatatcgtcaaagagtttcagaggactaagaaacgaataatggtcgttcacgtgggcgatcactgggccgtcagacacaagagtgagatgctcgatatgttcggagagtacggtgaagtccaggcagttcagcctgctgtcaatggcaggcgagcctcggtgagtcctgagctccatagcattatctttctcttcaactgcattcgacaccgagcggactctgatctcatcatctgtctgtttcttcttttttcccctcgaatatattgaaaacacctttgcaaacaacgttaggttatcttcgcaaatgccgatgatgccgaggcctgcatcactgatctagacggaaaggccgtttcaggagaacatcatggcccactctgcgtcaaggcgtgcgctcctttcaattctgatcgttactttcatgtttagagaccatatttgctgacatcctttgtgggcgaacatgtctttgaatagctcctctgaggaacttgaagatgcccttgccaagaaggcactgacggcagagcagagaggttaccttgagcttgattcgttccaccacattcttgatctgaggagccccctccctatctcggaattggtagcgatcagaagtgcgatcaagacgttggaagagaatggctgtcctgaaaacgtggccgatgatatcttcaagcacactgataaagcccgatggggagagttctgcagagattgttcgtttctttttctcttcttcgtcattcctctattctggctaactgatgttctggttcttatcgatcagttgttggcaaccggatgatgtcctatcttctacgacgagtatcccagccaaggcaggctgagctcgtctcgttcatgcttgcggatttcctccctctgtcaactcatgactctgccaatcatgtcatccaggctttggtcaaggttttggttagaggggatgaaggaagggcagtagttagggagtacatcaataacaacatggcggagctgctgtcgaacaggaacggaaactacctgggttcgcttatctcttgctgtgtattctctttggtaaatttgctgctagaaggatacatctgacacacgtttacatactttctttcttacaaagtctctttggctggtattcactttgaggacaaccgtgagcatcgtttgcctattcttcgattcgactttacgagtcgatcatcatcttgtgttcgagtatattcatagggctgaacggtttcttgttcatgttttctcattcttcctgcccgatgatagacttcgttcttgacactttggtcaaagcgccaagcgaggggtaagatttcatctttatctggtttcactgtccttgactcttaggaaacaacgtcttcctttgactaacttgtttcctctggaaaaatctacatcgtcacaaagatacacgcctggagtgattgctcggctgttggtggatgatcatgttaaccatgaaacaaaggtctgttttcggtcttatgtgtcgataacattcacaaggacattcgctcattcaatgtttgtttgcgtatcagaccatgttgattgatcttgtattggatactgcaaaagacttggtgcacaaccaccccaaaacggcaccccttggcttgacttgggtccttgtacgttgcgcttccctctttcggtatgctcttcctacgtgagatccgtcaacctaatcaaattacccttaaacagaataacaacacaacttcttacgacctcagcctgaaggtcaaagtcaacgctgtcgcctcaatttataagggccatttggaggacttgttgctgaacggaaactttgagcacatgagagttctttgggcacttttgcatcaaagagtttcagtcgacgtcgtccggcagatccagaccgagctcttggaggagggtgttttgcgacggctccttcaagacaagactggtcaaaacttccttcgaggttacttcgcctccgatggtcttcagtcgaccgagaaagtcgctctgatgaaagctacccagacggctttggagatggttggagaggatacccgatcagacgctgcgttccatcacatctactacgctatggacaacatcgaggctgatcttttgaggaggggcttgtagacggctagatcctccagctttctttgtttctagaccttcgactttccgttgtgtatctcgatttggtccagcgtgtttgacgtgaatttatccggctttccgcctatctctcctctttctttattttcaaccttgtcttctcttctgtttggtatttgatatcttgtgaatcaatacgtctcgcttctatagataagagaatggagagaacaggctacaccttccctcttccatgttttttttcttcttgaaaatttttcttattctttttgggttttgtttgcgatttcttttgtttctcctagtctcttggttccagttccaggtggatatgcaatgatcgtgcttcaaaagaacatgattcgggtcagagacacaactgggaagacagaagaatgaagagagacgcgccggtaaacgccgctgatttccttgatttttgtgatttgtctcttcgtttcgttcttcctagaccatctctttctctccgtcatcacatcatcgacatattcaataccttacagacatcccggtctctctttcgacagggattagaacatctctccagacggcaaatttcgaatccctttgaaggaaacttggcgtattgagttcagaataatcaagtagggatcgagtatcgagaagtacacgacatcttttagcccataggcgaccgaactacaacaagtcatcgacctcaagatttgatcaccgcccactgtatctacttgataggtggagcacaagagagaaagaaaagaagatcagagtaatcatgcagactcaagatatagcaattctaggactgatctatctgatctatccgaatccgaaccttcctaggcagagcatgcctttcaccgaccatcctctccccggcccgggttccggttttagttctgattttggatacggatctgacaaacacgggaaagggaaagaggatgagaatggaaagtcaggaactgggttggtcgggaaggtcggactagtaatcttgagagagtgcttggacgtatgtctttcttcgtttcatccgtttgtacgcgtgtgtgctcacttttgacgattcatttcggcgcttttggtatcatgattcctgactgtcattctgtacgatatacggggtcgtgaagccatcagaagatctgatgctttcagagcttgaggaagagatcatgtcgtttcagccatttgaagaatctgccaggttatgccggaacttgaaagatgtcgttcgttagcattactcaaatccaccgttccttctctgatggttgacctgatcgaaagttaacctcgaaatccttttgggggggggagggggtttagattgatgttttgcagaacccttggcatatcgaagagtttttcaagaacatgaacagcttgttgaatcgaaaggatgatgaagtaagtgttctcttcaccttcccccacaagccttcgtctgatcatgattgatctgctactttctggaaaccgaaaaagcacacgatcgtatcctcattcgtgatcgagcgaaaatcacctataggccaattcattcgtcgctgttgtctttcgttctcgaaattaacgttcgaaggtgtcagcaaacttcaatggcaaattgctcgatggcaagctcaagggatgggttccagctgggaaacggacgagaacattgcacaagcttgtgagcctatgctatcttccattgttttgacggtgagatagaaactgatattcattgagttctctggggggtcatacctgatcatagcctcatttgaggttaaatctctagacgatacactagaagcccgaaccaaagcctttgccaggtacagccagcatctatttttactgcctttcttcgcttcaaggatccttctcacgccgagcacgaagggttttcctcttgttcaaaatgtttcagttatcaatcatcaatagcctcgggagattacacaaaggctttgaacgcactcaacacgttcttcggtcatcagtttccgagacaaaacaggtcagtttcttgtcgttgtagatgttctttgcccttcgcaactgaactaattgccttccatctgtatgtatactggacccatctggggtattcgtgaatcgctagaggtcttcatcagcacgtcttgttgaacttggcaagctttcattcgagcgcagaggaatatcctgctgctagacgggtaaatgcgtcctttcttttgcattttcttgatttgcctgtcagcaacatctcttaatgatgcctatatttctcgctcgctcggttttcagtatttagaagagagtatcaagatctctcgttccgcaggggataaaagttgtttggccagctgcatgtcgtccgttcagatctcagccgttctctaaaccaccagaagactcgattgttcgttatctaattctggtctctatctaaatctcgatctagcctactacgcaagttgaatgtctcgcaatcgacgcttgagctaggtcaaataccacagatccaatttgagccagaggatttcgaaaagttgtctgcaatggatcagctatgggaattgagatatcacatctcgctagtgagtcatcttttttcaatccagtactcggaacgaaaactcgagttctccgagatgacgctgacttttgcgttttgacgttttgcaaaaacacaagggcgaacctgtgaccgagatctatcataaactatatcgttccaaagctcgatcaatcgtcgaaactcatccgagcacttctacttctacttccaacccgatatcgactgattcaaccgatccgaactcatcctcttccaatatcaatggcgatgactcatctagcgtgatcccggcgctcgtcgatctatacacgtgggactcgactgaacgtctactatggtctctcttgggtgaagaaacattgagtgtgctccgggaagatctcgttcttcaagatccatcaggcggtagatcagtagatgatcgcttgagctgtatatgcagtcgagccatcaggatagccagagcaggtcaaaccgattgtagtctctcttggttatttgacggaaagagatcaatacccagtgcgatggccacgttagagacgtataaggtttgggcgaggacagtgtttgaggtgttagatttggaagcgacaagaaaaggccaagagagagtgagaaggctcatcagtaagatggcgggcggcgaccgaagtgattcgaaaaaagtagaaggagataccaatttgggtgtaggcatggagggtaataacaaatggggatgggtagaagagcgactcgccatagggagcggaggagaacggatcgagaggctcgtcaaacaagctagggagatgaaggtttgtcttcccatattttgttgaccttgtctcttaagcatacattacattccgagattttgaatctgaagctaacaaacctgacatccggtctctacgtacgaatcgaaacagacgacatgtcagccaacctcgacgctacctccgttgctacaagcacttgagattgcccgttctcaaaacttgcacggtttacatcgcttactcattgttcttctagccgatgtacacattgatttggatgaaccccgacggggactcgagctgattgacgaggtctttccgaaagtcagtcttcgtcttttgccgttcaatcttcaaccggtcaaccttactcattttgtttctgctttctgtcaccccctctgcgtccgattgcttgttactctacagatcttgatcacttcggacaaagagcttcaagcatatgctttcctgacaagggctcgctgtctgatcacatcttatttcctgcctgtttcctctccctctcgctcacttgcttgtaagtctattccttcacgttgaaatctctggtcttgtgctttccttcgcagacttcttcctcatcaaacactcccgcttctctttctctctctcttacaaataattttttcttccaaaccgcagcgccgagtccagatattctggaccatctgagttcagctagccagatctatcaaactatcaacgcctattcttttgccctcgagacccttcaacttcaggcggtatttctggaccggttaggtcaagagattgagcgagatgaggttagcgaaagcttttgtcgagtcaaggccgagtgggagtctttcagggaaggagaaggactcgagagagatttgaaaagggtaaagaaggtagcagctgcagtgggtcaggtgagtgttgcgattgctggaaggagcggtcgttgaggattaggaagtttggggggaaaggaaaagaatagcatcgggtaggaagcagacagtaggctagatgtcaaatcagatatatgtggttcatttactcgattggtctaaaaagtcgcgaagactatgagtgagttcctttaagaccggatactgttccagtccattgtgagaacgaatattcattacatctggggaccgagaggaagagaagaagtggtgagagtagtagttttctttgatggaattctcttctacggtaacggtatgttggcccgcctcttgagttttgcaagttgaagaagatgatagttgatgtttctagatcgatccgagttgtacgatgcaagcagatatacgcatacgtatacaggatggaagcatcaaaagcagattcgttagaaccagttaagacatcaatcgacgccatccgcgggcattcaatagatagttagcgaggtagaaagagagaacgcacgattttggtgctttactcattttaggctacgatcagtcatgacaatcaagaatatatcagtaagtacgctttattatctcctccgtttattcttgagaacaaagatcaacagaatacatacagcagtcttgagacattccacaagcgctttcgaactctgtgcacactctgcttgacttctcagatctcccttggcagcccagcatgagagcatggtagcaaactgaacagcacatgctccgtgaaaatcggctgcaggtcagaaatcagcaatcgggatgtgtacaggttggttcgtgaggccaggatgagtcggtgggtgcgggtgattcgtgaaagagagtattgaagttacgtaggtatcagcttgatatgtatgaattggacttaaaaaaatggcataaaaggaagctcaaagagccaaacgaaccggcctttgccctgactcgaagagtcttgatcttgctgttagacgacatctctgagagctctgaggatctattgaagacagacaacggaggatgcgagacagatgagagaaaggtgagagaaggtgagaaggtagagaagcccacgacatggctttggttacgggtatcacaaaacgcacgcgtaaccacttttattttgatattttggcctccctccgagaagaaaaaagaaagtgagagaaaaccaaacccctcttttttttttctctcctgctccttttttcttgttctcttcataactttcagctctcttatccatccaaaccccatcaggcgccaggtcgttttcgttaggtaagccttggtgtttcccaccgtcgtacatatcgtcagaatgcctggcgcacgagcgcaagtgctcgcaagaccaggctttcgagctgaacatggttttctagactgatacgaaaccctcaattctcaacataattttcagaagtacaacctttcactaatttggaattcaagatggccaagaagaagacgtccaacaacaaacacaagaacaagatggccaaggtcgccggcgctactgccgctgtcgatgctactgccactactaccgacgaaaccagtgccgttgtcgaggactcggtcgttgaggagtccgaggtcattgctgaggcccagcctgagaccattgaaaccgttcaggttgagaccgttcagtctactgaggagggtgtgtatttgacaaactctttcttgccagatatcctttatcattcttcaaagctaacaggctttctgtggtctcctgttctctcttctgttatggctgttttcatttagttgtttctcaaccggcagctgtcgagtctgtccccgaagtcatcgctgtggaagaacctcttggtgcccctatcgagtctacacctactgctgaggagcttgagtctatcatcgatgaacacaagcaggcttcctccgtccaggtgtctgaggtccaacccgaggtcccgaccgagcctgttgtcgttcaggagagcgctgttgtcatggaggctattcctgttgacgcttccctcgctcgagagctcgaagccatcgttgatgaccacaaggtcggttctgcctcggtttctgtctcagacgttgttccagagacagaaagctcggctgttacctctgaggagcctgtcgaggagtctgttgctttcgcattgaactctgttgttgacgaccacaaagagaagtctgcttctgttgtctccgtcaacgaagtctcgaaccaagatcaggaggagacctcaattgccgctgttgatgaggagcccgttgaggagtctgtcgctcttgcattgaactcgatcgtcgacgaccacaagggcaagtcttcctctatcgtttccgtcaacgaggttgccgtcgatgaccgagaggagagctcagccgtcgtcaatgaggagcctgttgatgcctctgttgccctcgcgctcaacactgttgttgatgatcacaaaggaaaagccccgtctgtcgtgtctgtcactgaggtttccaacgaagagcctgaacaggacaccgctgctgtcgacccttctaccgcgctcgcattgaacaccattgttgatgatcacaagcagaagaacgttgcgtctaccgtgtccgtcaacgaggttccggctgaggaagagcagcagcagagggagaatgagaccaccgagcctctagacgtttcggtcgccctcgcgctcaacactgtcgttgatgatcacaagggaaaggctacttctactgttgctgtcgaggaagtttcgaatgaagagcaggaagagacctcgactgttgctcccgaagagcctgtcgaggagtctgttgccctcgcgttgaactctgttgtcgatgatcacaaggaaaagtccgcctctgtcgtgtctgttaacgaagtcgtcgagacggaggagacaaaggaagttgttgagacaccggttgagcctgttttcgcccaagaattagaggccattgttgactctcacaaggaagcttccactgtgtctgttgctgaggtcgccgccgagattgttgccgaggtcgtcgcggagaagaagcaggacgaggtcgttgctcctgtctccgctcgggaggttgtccacgatgagcctatcactactgccgctgttgccgagcctgttgacgcagcccccgccgccgaggacatctctttcgaagaggtcaaggccgaggatgtgaacgaggctgagagtgacatgaagaaggattgggtcgaccttgctctgaacagagaactcgaggcgatcgtcgacagcgagaaggagaacaaggcggacgtccaagtccaagaagtcgctccggaggagcagagtggtatgtgtattctctgtattctctttgcttctaaggttctcatgcacctcgactgactggttgaaacaccatctgtacgtttacccagctcccatccctgtgatcaccaacaaccttgccagcgttgaggcagagaacgtcaaccggtcgattgaagagtctgaggtggctacccccgtggtttcggaaaccgttatcaaccaggtatgttgccgataattctttgctctttgattctctatctttctttctttccatatcgccatctgcccccttgtgtgtccaactggattgcatccttgagtcccacaatgattcttctctccacattcacttgaatgtatcaaatccccatcgacaaacataatgaaagacaaagaggctgatgaaaacatacattccccctgcggatggatggtcgtaccaatgaaaggtcgcgaccgaggaggaagctttcgtggctgcacccaccgccactgctgcggacgaggaggaggcggtgaaggtgacttcctcggacaccgtcaagaacgatgagctcgtcaacccggctgaaggtgtcatggacgggaaggtgaccgaaagccaagaggaagatgttgtcgtctctaaaaagaacaaggtgctctccggttctcttctcgccgtcgctgttgctaccatccttctgccgtacctcttctagaacacaaagaacacaaactgcatcccgtttccttcttcttcgtcgttgtctcttcatctttctttcttctctaaacaaatcacaacacaacccgcgcacacacacatctctcatttcctcggactcaatcaatctagttaacgcatctccttttttttcttcgttctaccctcttgtccttgtcgtttggttccgtgtttccatccaatcttcatcccgtccttgcattcccatctattcatccaccttcatcatccgtttacacgctgtccgtaatgtcattcgaacagatcaatgctaccaacagagatactcacgtgccgcttgattgtgagagagtctctcgtctctcttctgttggtatctgacctcaaccatgggaaactgacccggctgctttctcttctgtctttttctttttttccaatcttaccttcttagtgggactcggagctcctatcgaacatggtaggctcctctgtctctggcttctcgtcctctgtctctacttgaatactcacctcagtcaagctaacaaacatgctaaccaacgttttgctgatctgtcctcactgctgtctttgataaatgacaaagcatctcaaatctccaagcctccgtctgttgtgactaaccatgaatggaacctcaagaacctctcatggcctgatcccagagtccgaggaatccgacgagatgtcaagatcatctgtcaagttcgtaaccctgtctttccaagcctgactgatcccaccttaccttgtagttttctttcttcgtttactcatatccgattcacatcatccacacattagaacatcaacgggccttgctcgttaatctcgttgtgcaacgtgttgatccttagaggatctatccacatcgatccttccaagtcaaccgtcgactagtgagtctcttatagagatttgaagacagtcagcgctctttcgacacattctgatctatagactggttttttacattaaaaaaacagcgattacttatcctcgttgagtaagtctgtggttctccaactttttccgcatttcgtttttttctagccgataagaagagacttcgatctgacggcagatgatggttgaatcttgatcacagttggggacttcttggtcgagaggccccagagctcttctaccctcagcctcgagtctgctctctcgatcttgcctacaactgtccatggtctttctggtaagaagattgatttgtttccattcatgggaggctacgcatgcagttacaacgactcacttatcctccctgacttttcgccattcctatctgtcatatccgaattgcacagtcaacccttcgttcaaggcggtcggctcattctctcgagagaacgacgctggagaactcgccttgttcgagctctgcggtgttcggttgacccacggttgggtagtcgacccggagaacgctcgagagattgagattctcggacaggttgacacttacgatgccgctcaaacccttttggtcgagggatcaattgctcagtccgagttgagccaaggtggaaagaactctgaggagctggagaagaagattcaggaaggtgcgtccataccctcactttctgttactatcgtattgatagttgattgtaaatttgacaagattatctgtgcactttatcattaaaaagctgcggtcgttaaagagttcttgaataacacgcagacccagttgacagtttctggtctctttggcttgtctgagtctctttcatcgggggagatcgtcgctgtaagtttcatgttacggttgtgtatgaagtggaatcatcaatctgacatagtctgctcgttctcactctcggttttattctacttcacttcacagcttttccgaaactcgcacctctctgtgctttacaagcgacctgcctcggctactgatcccaacgagcctttgctgtactctctcgtcaccgatgactccttcaagaatgagcccgaggtagacactttccgatcacgtccttgcttctgatagctcgtttcaacgttgaaaccgaataaacgctcacctcaattaaaccctctctgctttttctcgcacagatcgtctgggagtccctcgaggacgtccagggaacgtccactggatacgtcaattccgagttccgcccgtcgtccgctgctggaggagatgttgctggtctatctgccgaggctgcttacagaattaaccagggacaggaggatggaactgacgagtgagtcattgatctctccttcaagtcccttcttcactttctcctcttgcccccgagctaatgatctcttgttgaatcttgcctcacagttacgaccaacagctcgctcgacagctccaatcggaggaggacgaagcctcggctcgacaattcattgaccgaccttcctccaaccaagcctctgccgttgctcttgacactactcgtgcacctgcccctactactgctcctgaggtcggtgaggcgcccacggtggaagcctctcagaaagcgtcgtcaggaaaggagaagaaggacaaggaaaagccgaagggaaagaagtgcatcatcatgtgaacgacatgacgatgcgcacctctcctctttctttcttccttctttcttcttgatcttttctccctcttcctctggctctttggttcttgctttcatcaggttcatctccttcgattttttcttccttcctagaacctagatctctacatccaccttactatctttgtcttctcttgcccgtccctccataagtaacgtattcatgatgtcctcttcctctgtttagttcgtatgtctccttgtctgtctctcaacttttctcaaagacactcctggtgttgtcgtgtcttcactgagttctcatgtttagcgtcaggcaaggagaacaatgaagttaaagaaaaacaaatacgctttcatgcttattatttggaatgctcggaaaaaggacatccagaggtacaaatatgaactaatgaaagaagtaggaaaccaaactgacacacacacacacatacatacgcgcagggagggaattgttcgaaactagaaacctcaaaaaatcaccttctcactccgtcttgaacaactctccgatctcctccggctcaacgcccggctgatcccagaacgattgtccgataggtttacccagtcccgtggattctccataggcagaagtatgggacgagccgccgatcgtggtcgtgggggtggatcgaacgtggccgctgctcttaaggaagtttgctcggacggtcttctgggttgctcgaacagatcgttgtcttttttatttgtttgttcgtttgtttgtttgttttcccatcgatggaggaaaagaaaggatcagtaaaagcgcaaggataatgtggaaacatgggcagcatggaatgatgacagaggtaatcaaagacatactgctgagagccttcccaaaagatctgatttaacaggtacctgaccacagtcctagtgaacaagaacagatgactcgctccaaaggccaccaagatcaaaggaaacactgtacccgagatcgaggggttttggaccttatctgtcggcgaatatgctgggttaaggtatcccagagcatcagtcgtgaaagacctgaacctagacccagggttgaagagtaaagcaagagtagaattggtgaacgatgacatccaagcaatgaacgtcaacgcctcgagccatggtccgacggatgaaactctgtaagacgagccaaatagatgtcgagagttgatattctgattgaaagaagatccgaatcgtgaataagatcgagtacgtaccgagacggaataggtctcttgacgtttaagcagatcttgagagcatctgaacgaagttcaaagtagttgttgactaatgaggccatgctgataatgatcgtttcgtttccgaggtcaatttcaaaaaaggttcatgttcagaactcatcacgcccaagagagtcgaaaacacttcgaagaacttacctggcaagaggccaacagatggaccaaaggcaaacgtatccgaattgggttacaagctcggaataatcggctgccaaagcgtggtatgtgatcagccagaactcaatatatatatatac

SEQ ID NO: 1850 - DNA, 11644 bp, Xanthophyllomyces dendrorhous
atatatatatataccgtgcgataatcaatcgaagaaaacgacatactgaatgtcgtgtattcgggcagagcagcctctttttcaatcttttgcaacaatttagcctcttcaggatcggcagcaaaggcggaggtcttttcagaagcggatccagccggttgcttctccccactcttccattcggcgtactttctcagaaggatgggcaagcctagttctgtgaaagcattgatcactatttgatcaagacgtatatgttgacagaagagatgaacaaggcgatgagtgtctgagcgctcaatcagaacgaatcaggtgaggagcagaagaagcagcaccttggttcgttaccgtaaaggcaaacatttgatcttgcagtctcgacagattgatcactcccctaccagatcgctggtgtccctggatttgtggtgttccgccttctttaaagccgtcaaccgccttctcaaccagagtagcgttctggggagtggcgaaaagggcataatcgacggtatccattactctatctccaaacggaatataacagtaagcgctaaggaaaagacccatgaaggcgacgatgctgttgagtgcactgatggatgtttttcgagaggtggtaaacgttgttaggaagacatgtcaagtatattgttccttagaagtcttcttctgtacatgtaactttgcttacaaggtctttgtcgtcagtgcgttctcgtattcttcctcggtcgcgtaatcctcccatagagtgagtttctcggcaatcgtcctgtagacagccaggatccggggtacgatgagactgaatagaatggtaggaaccataccctttttgttgatgaaccaggagaaaatacaatcgctgttagaagcaaagactgaaagaccctcgatacatgatgggaaaaaggaggaagcgcacaatgtactgcttgaacggcccgttgtacaaagatgcaatgaacgcctcaaagatgaaaagtgcagtcagaacagactgtaagccgagcaagtggatgatcagtaagggaggccatcgggaacaacatttgaagctgattagaacacaaaccaccaagaagatagcacagagccccagggccggccagctgaccgcaagaagctttccatctctcttccaccatttctcttccggggccgaggctgtgctaatcgctcggagtctaggcctcctctggatatcatgagtaccataggaataactgagcgtccgttcttcaattcgccagaattcaacaaagaacaatccccaaagggaagcgatggacccgtagatggaagaatatgggcccctgatgaagaaagtcggtatggaaagcgcagcgagaggaatgagccaccgagtgtatatcttgagaaaggtgaaatacagagcgatttgctgtccatgctataaaagtgacggtcgtagggaggacatgtaaatttcgatagctagcttggcatcccatacaagtttaggtattaaaatggccttacgttgtctagaaccaagtcggtctcagagtcttcgatggtcaatccgaccttccagtctttcttgacccaagcatccttccattgttggtcgaccatatcgtcgtgaagcgcaaagatagagaccacatgaggccaagggtacgtattggccgtctggattagaaacatgcatgtagttcagtatatggccggacatgaaaagtggtttgatcaacgaccgataagatctgagaatgaacgaacgatagccaagccgccttgctcgattgcaccggtgacaagctcatgaatcaggcgtaatctctctgcaggcttgatgggaacagtgatagaagctggttgggtggtgacgccctgaaggaagtcttgctctctgaggagaacaatgacgacgacaggaagaggccagtgagcaattgacgagaaacgatttgtcctgaagaacaacagaccaacctctcaacctctctaagctcttgaacgagatcatccttggctctaacaaggacaaacacgtctgcctcttttctgtccttttcctgtttgggcctggccctccggctcgtcacttgaagccctttggaccggagccggtcgattagcgagcgatattctgatttggaagcatctcgctgggaagaaggcgattggagtgtactctgtataggcttaggaatagaggcttgggacagaggtctcgatggagagaactggatgaccagatcaataggagggatggtcatcggtgtgattcaaagttgtcggtcgttatcaaagatgatgggatggagatggatgaaaagttggcaaagaggaaagaaacaccgcttgatctcatcacctacagcggatgacgcgtttgatcttttgcctttgcctcgtctgtctacactcaggaattgttcttatacatgtctggccatcagagactgatgaattctaatatgagatgccattttccatcttgccaccatgataaagagcctgctgagacaacggacagagagcaaaccaggagcaagacccagaggacgagcggtgagcgagtgggcgctgtcgtcatcggcggctcgacatctcgcctgcagtcttccctccactttccgttctgaccacacactcaacccatcgttcccttcgactcgtttctttgatcaagaaaccgcatgcttcttcctcggatcgctcaagcagtctctatctcttcccttactcttgcccggctcactcaagcaaccactcacaacgcccgatccgttgccggtcaccccgtttctaaagcacttttctccaccaccgctgccttcacgatgtctcgtcagttctttcttaatttatatttactggaatgtgtgttcagactgagagttaggacttcttgtttccttatgggggctaactactcttctccttgaatacatgtgcacagagcctgagcctggaagcaaaaataagcccgactctgagtggcaaatgcagctcaacaaggagcagttccgaattctgagaaacaaaggttctgctcgatcgtgatcttcctcttttctttctttctttcataagaaactgacccatcctgttcttgtgatgtgtggcttattaaaggaacggagatgcctggaagtggagagtacgacaagttctacccgtccgatggagtgtttgcctgtgcgggctgtggaactcctctctacaaggccgatcacaagttcaaatctggttgtggtcagtcccttttctttcaatccgatctacctgaggcgaagttagatcaagaagactgaacggtctcatcgatgaacacgtaggatggccttcgttttatgatgcgttccccggagcgatcacccgaacagaggaccgatcgatgttttctactcgaacagagatcacttgcaccgcttggtaagccatgccttttcgctcccccgcttctttccatctcaaggatcatgtcgtcctgaccggagttttgtgtgttgttctcgcccttgaatggaccaccgcagtggaggtcatatcggtcatgtcttcaaaggagaagggttcgatactccgactgatgaggttcgtctgtccatcatttgcgggttctgcttgtttctaattcagaagagccttcttctaaatcattcaccaatcttccacctgttcctccactctcttttcttttctttgcctttcttgaacaacttttctgaaacggcctgggttggttcttggacgaaaacagagacattgcgcgaactctgtctcgctcaagttccacaacgagaaataagagaaagcataagagtcatcggaactcctcttttcttccgctctttttttttgcttttttgtagtagccagctgggttgaagagagagaaaggaagacagagagagagagagagagaggaacggagagaaccgtgctgtatcgatatgatctgtcatacatcttggagtatgagcgcaagaagaatggaaatcgtcagatacagagcattgtctttgctcactgaccaaccgatagacggtaccagaactagaacattcaagaaacagaagcggacattatatatatactgaaaaatagcgaatcaaacacacacagagagaaaaggaaaggaagagatctggagagtcgagcacagaacaccgagtcctgtgtcatgcgtcctaccgccgaccaatcaaccgcttcatcgtcgtcgttcctacagaccctacatcgctcgccctgtcactcaacatcaacatctcctggtttttccacctatctatccgcttcttgccgaaagcggcgtaacctgtcagccaggccaggatgaggataaggaaggcgagcgcgagggtgactgatgctccgatcgctcctgtattacacagggtgaatgtacacgaacacgcgagaaagacagaagaccggtcggtaaggaaggaaattgaagggaatgagcaaaagatttcgaaaccaaagatgatgtcaagtaaagagtgaagagagaaaagaagatgaagaagaagcctctcttcaggaagacgtaccggaagctacactagatatactacagttccctcggttcgtgccgcacacaccatatgttggagttgccgaactagaagtagaggcggtagaggttccgttcgccgtggtcttggtcgaggtgacgatgttcgcacaagtgtagtctggttttgtgtatgcttctacggaaatcaacgtcaggtccgcgcactaaccgacgagaacctcggcaagatcgaaggagtcagtcagtcagtctccagggttctattcgatcaagaagaatgacaacaagatcaaggaaaaagaaatatcacctcatgataccgagtgtctgtaggaccagagtggaattctgctttaatggtgatgttatcaccgactgataatcctaaagatgttaagtcctgtttcgtgtacccagagcccgatgagagaacaggaccagcaagattcaacaaggacgaaagagaggggttcagcttccgggataagcccaagacaggaccgttggaaggagagacaaatttaaaaatacatcgaagagacatacgggagcgttccaacaagacgttccagaatacaagatcgtcgtattatccattaacggcttgaaatcgctgacgagctggggatcgtccgtggtggagtatgcccattggaaatcattggcgtctctgttctgggcggtggatagttgaccaccagaaatcggataagggatccgtcctcccggggagtatcctccgcatctaagggtggagattgtggcgcgttgagcgaggttagtgctgtatgctgacaaaagacgagtaaacaaaatcagatgtatatacgcacgggccaatggtagcagtggccagattcagtcctctcgagggctgtcagatggtgcaaaaagaagagagcgcagaaggaaagtgttatgagaacatcgattcagcttgttttcgctcaatctctgcctttgaatggaagacaatactagtgaacgttatgcgtacaggatagttcatctcaactgtcggccgtagcgccacaaaatgagacaagtaaggaaagggaaagaaaccccaaaggagaatgaacaagcaagataagtataagatcatcctgatgagcgactggcgagaggcgcccaaagaagagaaggtgcagcagaggaagaaaaagaggaactgacgaataggaacggttagggcggctcggtcgtaaagattgagcttcataccatgagccacggtcgctccgatgggaagcgctatcgacatccgtttattgaagagcatctcgatcagagaggtgtgtgtatgaccagaaaagtagaagcgtcgaggaagaacgataaaaagtctgatcaagaatgagaaacagaaacagaaacagagggacaagggagaaaacgatcgtatgcaaccgttggttgaacgggactggatgggtttttatccgaaggagcaagaaaatggagctcagcaatatctatactttttctgaaagaaccatgtcatctgtgtcataaggtacgtgaggagaggagtaaagcgacctatggggtcccttgattggtgttagcgagcaggacgtccagtcagcgatgaccatacatgaatgtaaagtagaagataccctatcgggtggtcgcagcaagcgatcgtttctgagaggttagccaagccaagcttcaaaatgagggtatcgagggagggagggaaagagaatcaagaacagatagataagacaaggagagtcgtgagtcgagccaagccgagacgagactgtgtgtatggatagatcaaactcaaaccgtcctatcaccagacttgacgcgcaaggatgaccgtccgatttctttccatattgggataggctcaaaggcaagacccaagaacgattcacgcgatggctgatgagttgggaagatgttccgggatctttgaatgatttatttgtacgaatagagtgagaagaaagcatgttgtatttcctcagcgaatcaacgacgagcaacgttaactttcggcttggcaaggtgaatacatttaccggttccaagacggacggcaggaagtcaaagaagaagaagaagaaaagaacagaagcctatagagacaaagatccacggacacgacggaacagaaagatagacacaacatcatacatatgtgagggcggtgccgagacggaaggtagctatgaggtctctccagagtgcggctgccaagcggacgaacaggtcgacgagtttatgtcgaccgaccgagcctagagaaggctttttcttgagataccagacaactagatagagaatggccgttggaggtagggcggagaggatgagaagccaactaggtctcttccggtttggtctcgacggtcctggtgagtccgaccgggtgggctgggaggtcagagaggcatgcgagggggatggcgatgccaacggggatggcagtaaggatgtcatggctgacggatggtatagcggggatttagtgtctgctgccgatgaccaaggagaaagaggtgagaaatcgaaatcatcggttctttcttcagactgtggctcatgaaccgatggagagggaggtgtgggcgcgcttagtttagatcggataatctatgttaagaatatagaaagatggacatgacaaaagtatatgaacacgtcccttaatctggacgcgaaggacgaaagaacagagaaaaactaacatccttggcaaacagattcaggcgatcatcccattctaataacctcgatgcctctgctctgccaccgataccatcgggcgcgagaatgttgagcaggtagagttgaatgaggctctgatagcctttgactgcctctgccttccaccatgtctcatctgagggttgggcgagtgtgagagcaggatcgggagcggaggcgaggctaggttgggcaagggttgtgagtatggtagggttatcgagtcggtcgaggtacggttcaacgagtgatctgatgaaggggagtggcacgtccatcgacagacctgccagagacacggtctctatcaccgatggcggcgggatcgagatggtcatacctgtgggcaaggacggggaataattatcgagaacttgatcgttcagagttcttaggaacgtcgacgcgtcggacggagtgtctcgagcgggagtatctatcatctcatccgacacggtcttttgtgggctggtctcattccacctcaaagcggaagcggtgacaaagagggacacggctcttgctctctgtctttctatgatcctctctttggagcctagttcgatggcccaggtgagtgaccgaggagtagccaactgggcgagtgtctgttggatgtactcgattgctttttgatagtctcttttgaggaagctagtttctgctcttttcagaagtgtttttggcgaggtgttcgatgatgtgggcgttggattgaggccaggagtgggagtggacgtgaacgtggacataatcataggcatgagtgctatcgtgagggcatagacaagagcgagtcaggaacggacgagctttgccggttggagatcgaaccagagatggtttgggttgtcgagattgaccggatgaaaggacattgtcacgtgaccgagacgagcgcagttgatgatcagcaggaagcagcacaaacactcgatcaacgttctagaccacgggccgagcagaacgattatcaaggttatcctccgtatcatgtgaagatgcccatgatgatgctggaggtagtgccctgtgacgtggctcaatgttttcctgcgccctgccccacaaacgcctaatcgctggtcgctgtttacggaggcttctgttttctatcggtagaattcctttcttgctcttgctcttgctcttgcccttgctcttgctcttgctcttgctcttgctctcgctctcgctctcgctctcgctctcgctctcactctcacccactcgttttcggtataatccgccgtggatggtaaggaggaaacttgcaggaatctggcccctctgttcgggccctttctttctttgctctaagtttgtccttgtttgccttcaacagccgtctcgcctaccgtccgctggctttctgttggccctctgtgggcgtgttgacgatttgctgacggccggttctttcaatgcctccccctgattttttcctttgtgtctttgtgtcttcgtgcctttgtgccctggatcttcccttgcagctgctgactgaccagatgcctgctctctgctggcccacggacgatcactgtatgctgatcgggccgggcgaaaaagaaaggaacggatttttattaatctatttattcatttctcgcttcccttgcccgtcgcctttctgttgtgccctcgatcttttctcactccctcttgttttcactctgtactcttgtctgggttcatccagttcttgacttgtctggaggaggaaaaaaccaggagagagatcaggattgtagcatacacatactctcctactctcacattcacactcaaactcacattcatactcatactcatactcacactcatactcatactcacatcatcaacagggagagagagagattgattgtcaaggaatagaaagaagaagagcgagatcacttctttcacagggtctcaaacacacacacacatacacacgcactcaaaatcgaaactcctctcgttcctcctccttctttcttaagaaacgcgattggttggtatcgatttcatcttgaccgagtggctttgctcgagcgatcttggtcttcccttccttccttctcgttctttccacccgatctgtttctttgatccttcttttcattcatttttttcttgtttggttatctgttctttggcctgacccattcttcgtcggtctcgctacattttacacctcatttgccgacctgctcgctttccctctctctctttgttctctttctccgttctcttcctctttcgtctccttgggcttttcggttttctttttctgctctgcctcgattgtactcctcacttaatccagctctaacctgcccttgaccttgaatcgatcacctttgctctctgcatagtgcgacgctctcaacacccacacccacccacttccacgctcacacacacgcacaccctccctctttcccgatggatcgcttctactctcatcccggatacctggcctctgggacaatatccagtccatatactccttatcccgccttggtatgttcaccttccaccatgctttcttcaacacaatcatcttgctatctgttctttcctccttcgaagcgaacaaagatacgcctgaatttgaaaaaaaatcccgaagagaggagcaaccatgggctgaatgaataacgttttgcatttctgatcctcggtatctttaatcccctgtccttcttctctgcctctctcctttggctctctctttgacatacatcctacgctcacctcacagaatgaccttcagcgagtctcgtcggtgaatcccaagcatggatccgaagatcaatcgaccttgttcacagtcagagtcgataatctttcccgtcaaggtgagtatctgcccgaatttgaccgcgcgccctctgtctctatctctatctcattctttgtccaatcatctttctcactcttctttactcttctgcacctcccaatgataccttcctccttgaaagcgagcgacgtgtaccttcacaacttattttcctctatcggtcagtccccagaatcttggctatctcttgtctcttgtcgtcgtcatcgtcctgtacctcattgtctcttctatccttctcttgcttcaacactcgattcctatcctctctcaaccaaacaggcgtagtcgttgctaccgaactttattttccagcgctacctatcccgacaggtcacgccaaagtttcgttcgctacacaggaagaagctttgtatgttctagtccttatttccttacactctatctctctcgctctttcctgcaatctctcttctgacagctcgttcgctctctataggcatgctcttgcgatgaatggctggaacgcaggtggaatcaacatgtatgtttccaacacgtctcacacaactcaattctcattctctctgtcctctccgggtttttttcccttcagctcgatcactgcttgggacgacgatcagcttgatcaagcctcgatcccctcaacaaatcagaggctgaccgagccggaaagaaaaaatctgtaagctctgtttgtctcatgttctcgacagtgacgtgtggactgacccgaaggattccttgatttctgttttccgacctcgatcatcaagctatgtcctcaaccttcctcttggtaagtattggatctgaattttaaacgtcgaactgcgcttcaaactaatgcttctcgctcatgcttaaaatctacgagtagatacaacaaacgatgagctcgttcggctattttcaccatacggtaatgtctcgcatacttggtgagaacactttgtcttttctgtctctctctttccatttcacggtccttcgtctgagactcgatcgtaccgtacgctgtcctcaatagcatcttggccatcctggattcctgcgctcgtcgaaggtttgttctcttctctgtccatcctgtggcatcatctttgcactgactgacaacgcacgacatcttctgtagaggttttattttgatgggttctggagaagaagctactcggtaaaccgaccatccgttttcgctgctcttcttttgatcactatcatctgactggtcactccctccttctcacagagccatgaaaagcctgcatggaaagatgtaccgggatcattatctagatgtcagttactccgtcgtccagaaaacagctcagcaaggcaagccctacttcttccttctccttccgacgcgccgtctggtttttttcccctttcgatcgcgaagagttgttgatcagatattcttctccaggttatcgaacgtctgaagactcctccgcccgacatagcaaggctgcccctcggaccagaccgactggcttgcagtatgatgctctccgaacgttcgtctctgggagttcagtcagttctgg

SEQ ID NO: 1851 - DNA, 20398 bp, Xanthophyllomyces dendrorhous
gttctggaacgagcagaccaaaacaatcgattgccagcgacaatgctggctattggcatcaaatcagacaaccagacgcgaccatgggttcgactggccaaagacgagagtcgagggatcttggcttcacccaactcggtcagagtcagataagacccgacgaggtgtgtctctcgtgtgatggaagtcgtttcactttctatccgcgctctttggctgactgaaacgttttcttgcatgtgttgtctattgacaaagggcccgatgctggttgttgagaatcttgtgagtctgttcacataaatgaaactgtgatcgcagttttctctttcctcatccttccctcttgtcctgactgtatgtgtatatctttctgtctttcttagactccaacgatattcgcaacatcggaagacattgcgcccgtatttcagttgtttggcgagttgatcggactcgaattgtatcctgccatgacatcaggaggctctaatgcggcgatcgtcaagtatagatttcccaacgatgcggaccaggctaccagagcgttaaacggacagttttacggagaccgagaggtgagtgggttcgatccattctctttttcttctccattccacatgataagcaagcgcacccaactattagaaacactaactcttttctcgtgtgcatatacaagatccgaatcactttaattgactcgccgaagagtccagagtcagaattttctctgtccggctcgattcgtcctcgggagtccagtctgggccaggacgaagctccggtgattcgagatgtatctcagtttcaaccggcccctggtcggatttcctctcagtcccaatcggcaaatgtcccactcgcaccagccagaagtctgcctttgacgagctcatttgatccgttcaagttcaacacccaaccgtttgagatccctcctatctccagaccttccactggatcgacttcatcaagaatcccgaacaggataaacaagtccatcccgttgtcccaccctgggttcatccatttgccatcgccttcattcccaccaccgccacacactttcgccgatacgttgaccccgcgggaacattactcgacctcgcctctgattcagcaaagtgtgtttggcacccggccaaagcaaagacagtcctccaagacggatcaatcgagcgaatcttctggtgtgtccgaaccaaagagtttcatcggcgcggacgaaacggaactcgagttgccgttgacgatcgcccttgccgccgttggaggagagtcgaataacggtagatggattcctagaagggcttctcttggtggaaccggttcatcatcgggcgaacaatccgagctgaccggtgtgctcggcggaatcggaggagagagaagaaaggacaaacaagtcaggatccaacacccattcccgatcgcatcaacagagttcgaggacggcagtccggtcgattcgctcagggtgacgtttgagagaacggcgctcaaggatcagacggtttgttcttctgtcgaggtagcagcgtgataggtcgagactgacggtcgggtcttttctttcttttccatttcttttcggctggcaacaaacagatcacaccgactatcgagacctctactagcaactcgacggagggcaacgctacgaactgaacgatcatccacgcaaaaaggtaaataacgaagatccaaccgattcccaatgaggaagatagagcaggcaacgctggacgtaaattatctcccagagggaacgaaactgaatgaaccgaacgaaaaatgaaattgtaatataacgataaccctatgatcatatccacgcccttttcttgttcttgttctgtagatgtttcatactgttctatatcatcgtcaaggtttggtcctagctagtctagaccaaagattctacaaacctacatctgctcccggtcttttttccccttcgtttttcgtctcttatctctcactctccttctctttgtttcattctgcgcatgcccctccactgtttgtccgagatgcttctctctatatcttccttcatcccacataacctcgttttatattgatcggttctaccgatcttgctctgctctttccttccatgtttcgttctttccggcctttcaactttctgtcccgttctgtggttctctatcgttcttgatacatccgctgtcctctctgctcctattcttaggctgcatcgtttttttttcttctaatcgtctatcatctattgtttgtcatttgctgtctatcatctgtcaactatcgtctgttcttcaacctcctctttcctttctcttcctttttttcttctgcctttttcttctctctctctccctgttttaattcgttagatggttggacgatcgacaggaagtggagaaggagggcgaaagagttttgactggtttattttctttccccaaacttcttatactacgttatgccacgccatgctatgctatgcatttatctctcatctgtgtctgtcatggtacgctctatctctaccacacgtctcccaagcaactcgtggttccatcctttctgttctcttcttcgttctcacgtgtcgccgacttcgttcagtgtccctacctaggttcatcctccagacagaacacctccatgagcgttctatcgtcggctgacatcaaaccacaggaaagaccaagcccttcctggctatcgtccatcgcgatatacacagctgacatcgttctacttgcgcgcgcgagagaacgagctggcgcgtccaagggtcgtgtctggggtaaatggattctgtgcacgccggacccccctctgtcattccctttctctgctttccgcggggcctattcgtcaagatgacttttcttcttttctttttccctaagaatatccaacaagacgtcgggaaggacgtcaagaagtagattgagcaggagccgaaagagaaagaaaagaaaaaaaattgggaggaggaaagaaagaagcaaagaggagagaaaacggatggacaggatgaaggaaatcgtgagaacgattaaagggaagaacaaaaaggaatatggaacaaagaggagaggggaaaggaaagaaagagtgcccaaatgaaagatcaagaattatgagtgatagataagaaggagaagaacgacagacgatcggaaaaaggaccaaagtacggaaaggagcaagagcggacaagaaacgagatttggaagagaagaacagagaagaggtgcggtgaggaaaaatccgaaaaacatgaacaagacataaataaaataaaagaccggtgatgaaaagaaggggattttttattttaatcagaatcttcttcatccatccctgccttgagcctaaaagaaccatcatgactccaagttagcccaaacaggtcctataacgaaacttgataagtgaaggaagaacacgaacatttctagaagctcatggcactcagatagatgagctactaaaatcgcttgaccttccggaatagacctatcatttccggcatacacaatcacatgacatcaacagacgatccttatcatgcaactttcttctcaagaacaccaaagagaaaatgtgaacactgacccgtcttgagccatgaactttccatctttcctcatcgagtccaattgatgcaatgccagatgatactaaatacccgagcataccatacggatggacggacgatatggggtttccacgaagagcagaactcagaatgatgttcctgtaatttatatgagcgagaaaaggtgcgaaggcactcaccgggtagagatctcgtgccgagaatggacctccgtacttaaggacttcgtttaagcacttcttaatcgtcgacagcttgtttgcctacattggtcatccaagatagagcgccatcagcaaacagttcattcaaaaggaagaagagagacggacgcactataggcataagttcttccgagataggttcagatgaagacatgagtttataaatcaaaccgtgacatctcctcagcagatacagcaaaccctacaagagcgaaggaacagaacaagacccatatggaaccaccaacgatcaataagactctcgatcatgctctcgtgtagagacacactcacatattgaccctcgggcggcatctctccctcggcgtccacaaactttccatccacccgcatcgagtcgatttcctggagagccattgagtaactaagaaagaaaggatggaacactcaaaaagagttggctcgtctatcgacgcgtggaacgacccagcaaaggtgcgcggacagtcacttacttgtacaagtctgtctctcgaagagtccatcgatgggtaagctgtaatctttccagttttgctctaagctcgctcagtcggtcgaagatctattctcccatcaaccgtacccagcagggacgaacaggcgtcagcgtgttgctatgaacaagggcttgaacctcaaacctgatgcatggttttcacataccggcttcaatggcgtcggaacctcatcctcatgcagcgcacgcaagtcctgagcgatctcgaaacactcctctagtagtcccgatagaattctactcgattgcaagccagcgagatggatttgataaagacaagcaagaaacgtcagcggtgaccggtattcgagcatggaagcatgtgaacgtacgcttgacctgtgggcacagaagatcctcccggtcccaaaaattttccatccacacgtttactacattaaatggtgcggaaccccgattgagaaagtcagaaagtctcaagcaagacaagaggaatcgaatttttaggatggagagggacctgcctatcaatctttctcagttcttccagaagcgccttgacttcctgcttcggtggcttttccaatgcggccaaactggaaagctgtctcctcatctgaacgatccgttgatgtatcggtacaagttcgaccgaaagaaccgaaagtgatttgaacaggttgttcagcaatcgttctaaaaggagagtacgtgtttttgtttttgtttgcggttaaggtcagtggggtttacatgaggggagagatgtcgcgcagacgatgaccaagaaagcacatccagcgccggatagaaaacaattgattatcagccatgtaaatattatcgcacgaaaaatgctacttatgagcaaggagataacgagataaggcaaggagacaaaccggaatcttcccattttcgcgtcaagagcttttccatcgcctcgggtagttgcttgctctcggtctcagcctggatgacctgtttaagttgctccagacgtgttctaaacggttggagatccgtctcagtgtacactccggattcattcatatgttgtagtagttgctgtgttgtatcaatcggtggagtagataagaaaggatgagacgtgcgtgatattgatttgcacaggatgaagacaaagacaaaatagataaaaacacttacacgcatgctagccaattgacagaatccagcgacggatgttcgggatttaccgatctacacaaacgagaagaacaagcattaggtctacaagaatctgggagtggacagagggatggcggatgcgtagaagaggcatgatataagggtagccagtatagagggaacgtcggaatacgctggatgtggaaattcggccacccgatagggtgctggttgttcgccgaatcttgtttgatgacgaaatggaacatgaggaactagagagatgaacaagggctcttaccgtcaagaagaacagagacacgagcgagaagacatccgacaaggtttgatcgaccctattcggttgagtgacctcaacttctgtggacgacggtgcgtttgtctggtcctctgatgagttttcgtctcggacatcatttaacttggtcactatggatgcagaagcgggagtagatctgtccttgatcagaacggaattatgtatagggacaaactcgggaagaagaaaagaaacgaaccttgcttgaggacagcgtgatagatcgattcgacatctgtgtgagaagtattggcaaccggtcgaatgccaagaacaagaacgtatgtgtgcattagaccatgttgagcgggacaccaacgcacggcaacgctagaaccatagaaagaagtcgaggaagaaagacaagggagagacgaaccttgaggtctgatgtactctgtcgcactagctttcttgagagcttgaagtctagattaacaatgtggtgtagaccccagagattggtcgtcagcattgatccgataggggataagcttgggtatggaacgcaccttgttcggatgctgtcgaagaaaacagatcaagttcggaaagcatatacggaacgaagagataacagagaggaagaaagaaagatagaagaagaagagaatcgacgagtcatggcggttagtttgaacacaggagaataggaaacaacgtggcaaagaggaccgacttgattagggattcaaggatcgagagttcttcctgtggcaccatggctactcgatgtctgtatgtctacctgtgtgtgtgtgtgtgtgtgtgtgtgtgagagagagagagattgtgtgagtgtgtgagcgtggatatgagtctgtatgtgaatgagcgagtgtgtatgcaagagagcaaggaaggtcaacaaggctcgtctggatgatggcagtcgagtggaaagagatggcggcatgatcaagggctgaacggcctgggctggggtggtgattacgtaaatcaattggttacaaccagggttacaagattagatagattagatagagcgaccagacgtgtggcctgcgttgcttccttctggcctccgtacactctgcagctcaatcggccacgacgcttccggaaggatgggtttgtgtaaggtactggaggtgtttgtcgggatctgcgagatttctgaatgaaagtctaagcgagtaagggaacgcgacaaaggcgagcacactcagaggcgtcagagagcgacggctgatggaaggacaaacccacaacagatatggtctcaatacagtctcgcatgctttgaacggtgtcatggactgtcgtacacccacccgacatgtccagagtcttctttctgttcgatgaccatcaaacgggacgcctaatgtgtgcgcgcacggtgtgggtagatggttggcgtaaccctaacagtctgatcaccaagttcaccactctcttaactgttccatacactgaaacgctggttgtcgtcgtcatatgcagcaccagcatacatccatacaaccatcacccgtaccaacgacgttatgaacaatcgtacgtatagaaaccttgtttggagttggatctgtcgagagtcaactgacagacgattcctttctttcagcatcggcacctccaccggcttattccatccaaaggcccatccaagcgctggcagacactagaaatggatccgtcagagtacgtacggtcactttccttgctgccgttcttctttccgctcgcagtccagtcgatagtttacctttatctgatgcacctgttgctgatccctatgcgtttcttcgaaactttcgttgaccacacagatcgttgtcgtcattgctgcgatcgcgggggcgatttggtcaatcatcgcagccgtcagatcactcagatacctgtcgtcctccaccgagacctcgaggatgaggatcacggatatcatcagtgcagtcctctatttgatcatcggagctatcgagatccttggtttggccgcttgcttcaaggtttgctcttctctctctctctctcgcgtactctgtctcaattcaagagggcttatattgtcttccacagcaatcccgaagagccgtcaaaatgtattcggccggagccctcattgtaattctgctagcattcatcgccggggttgtcaacattgttgccgaaattgccttcaaggtgcgtccgtttgctctgctccatgttgaaagttgtatcatccgtgctctgaacacgtcatctatcccttcttgactcaacatctggatccacagagcgacttgaaggcagcctgtgtcactgccgctacgacaacaggtgtatcttctagctggtggggatccagttcgaccgtgcttggttcggaggatgctcaggattattgtgcaagcaggtggagcaggaccatctggtcagatgtcatctggctatgcgctactaccatcatcgccgtcagttaaccttcctttccttctcgtgcctttctctgctacctctatcttgactgcctctgatcctcgtgctagcatattcaaaggccgtcattgcaatgtttgcagttggctatgctcgacaactcgctcaggcagctgtgttcagccaggccaatgaggtccacgagaacgatccttcgttgggagttcctctgaccgcttaccaaggtcgagttccggaatacgctcctcccaccgcacctccttatcgttcgttcctttctctttttccttcgctgcttgaccatattcagctgactatagattcctttgcctatccgaatcaaccctcatgctcctatagccggcccacccgcctctggatcatcgcacgacatagactcgaaacaatcctttgtggcagcttctgcggaggatgaagcatggaaccagtcactcgccgaatccgaacgaagagaatggcaacaacatcaagagaatcaagaggccgaacgtgcctatatgatcgctcacggaggcgcagctcatgcgaatgaggaggaggacgaggcatgggagagatcccggaggcaggccgggttcggcgagagtggaagaagcacgaggacgaacgaagaccagggaggagtagtctgaagagacaatcaaaaggcgtccttgttgtcccctttgtctttctcctcctttctatcgttctgtcaacacttgagttcctctgatttatcatcggactatttaccctacccagactgcttttccttcttcctgtctctgctttttcccttttcttcccttgacaatgtgatcatcggcacgaactgttctgccctctgtctaatcttctgaagcatatcgataataatctctagtgtctcccggcttatctcttgttctatcttgatttgatcaacatgtggatgtgaacgagctcgatataagcatgctcctcctttctcgcacctcaatttgtgtctcgtcgttagtttctcttttccgtcgtctttccctttcgaccttctcgaacccaaatcatccaaacgagaccgagtcttgaaatcgtgaaagaagagtttcatgaatcaacgcgcaaaactagagaacaaaaagaaatcagcactcgaaaggatccagccgagccctgtcgagtagttctacataatggtcctcgacagtgttgaacgtctctcgaagtttttctattcgttctgattgatcaatttgactcaattggtcctgcattcaggccggccccagtttcagcggttgaagatagagaaagagagaaggaatgctgtcagaccgaaggaaagagaaagatacagaggaaaaaagaaaaagagacaaacataattgaaccggtagagtcgttctttgacaaacaacctgtatgctttgtttgctatcctatctttaggatcgagcacatgaagcagaaggatctcgtatagtctttggaattggcgctatcagaggtacaaaaaaaaggaagcaagattggttagatgtgtatcaaattgttttggttcttagggatgataaggagaaggttgaattaagaggaacccctcagacttactttggctagtttcaactccttcctctttgcttccagccaggctttgtccacaccgacatgtcgatccaacttgagctttccatcgaactctccttttttgaccaatcgctcgagcatccttaaatcgcaaatgtctcgcagatcatcgacgatctcggaaggatcttcgatcgtcaattctgctattgaagatatcgtgagggtatatgcatatacagccgagtatagcgcggctttattttcgaggataggtagaggaggggaagggggtgttaagaaaggacaatctttaaaaagcagggtaacacaaccatgaggcttatacagagaagatacttacagccatgacctctgaaatgacaaaagacattcaacatacgagccaaatcaaacgtcaactttatttttttcgcaaaaagcctgaaactcgaagaacatgtacgaactgtccatgataagcaggtaagacgataaattggctgctcgaacaaatataacggaaaccttgatcaactttcatgtgctttatgaaaagtttaaatcgctgagaatataccttagtctgagtctaatcatgtccggataatggaagaacggatagagactcgtatacccaacgaaatggtaagtccatgcttcttccttctctgatctgtctatggtctctatctttggcgagtctgaggacgaaagtcccgctgtctttttagacgtcgtcggtgttgggcgccgccttttttcatacctttcaataaggagtagagaagcataaagtcaagctgagactcaacgcaattcagaaattgaggagtggacatacgagataataaactcccaccggtcatcgtcctcctggttgatcgttagagagcgcggttagccttgatggttagtagggttgtgtgggaaggaagatacctacctcaacgtattgtcctccttctatgtacaaagggactagaatttgcattcttcggtgatattttctgaaatccgggtcagataagctcgtctacgatcccatcaatcgagcaaggatatttttgagtttcagcaggtgtttgtttgtaaagcaagtatcaccatagaacaggtacacaccttccaaagttcatagacgacaacttctgaatcactctctccctgatctacagccccatcttcttcgtcaggatccacaaattttcgtttccttcccttttccgccttctttctctccaatgcctctcctgtaggtctcgagtattctccgatctttgtcccgaacggcttgaaggaaagtgcgtccgcctttagacgcgcgtcaaactcagcagaagaggtcgtgtggtctaaatgcatagagacatcagtgacgattgaacgtcgtcaaaccaaatcagataccttttccaagtttgatcgaagtggcttaggaacggcttcggctcaccaggagctaggaaatcagctagcttgagcgagatatcgtccgccggggtagcgctcgacccaatcttggcatcgtatgtcaccgaaagaaattggtaaaggcttccggaggtaaggtttagctggtaagagtgtagacaagaccaacagacgtcaggttaggtcggtttgttgtttatgagtgataccaaacaggacgcgtcgagggcgaacggaatgcgtctgttctaacgaacctggaccttgaggtttttgtacccaaagatcttttgatcgtctccaaagatcgagtaggtgaatgctggatggtacggttgaatgagagcctgttctgactttgaagaactgcacaaagcttcagcatcaggctcgtcccgtcctgtgttccagccctccccagatgcgagtaagagaaacacggtcagttcatgatgtttcccaactgatagaagactacgcgaagaaagagttatagcgcacgctggacgagggagattgcctcgttagagtcacagatccaagccatagggatgataaggcagaatgtgtcgggtcaaatgaaggagtgatggatggaatgaaggatgggatgatcagaaaatgtttaatgactctccacacgcgtccatctctgccagccgttcgaagtatcagcaagaaagccatcatgtctaatcttacacccatagaacctatcactcaggtcaggatctagcgtgggccatgaggaattataatggatcagattcactgatgtgatcttttgtctgctcattaaagatctctcacagaatcattcgaatattaggacaaaaccctggtcgctttacccttcaaggttggagtcaaacagaaatctcacctccgtgaagtcttgtgcttacgaggagaaaccaccctcaacatgtttctcgtttagggacaaacacctatcttgtaggcaactcgtcgccctatgtcttgatcgacacaggagagggtaaatcggcctatctgcctctcttgatatcttctcttggtccggaagggtcgatctctgatatcattgtgagttgtacatgttacatctactcgctggtatgaaatcgaactcaatgatatcatctttctcaaccatgcatagatcacccacatgcataaagaccactggggaggacttgctggcgttcttggtcttcttacaaagcaaggcaagccgaaaccgaaaatctggaagtggaaaaatccagagaccgatgcggccatcgtaaagtccgttccagagggctcttacgaaccaagtgaaggatcagaggtgattcacttcttggcaaataaccaggtaatgtccctttttactttcttatgatgagagtcttcttcatgactgagagatcgttgttcactgaatgatcagatatttactctcggcgagaccatacttaaagttatccacactcccgggcatactggtaactcattatgtttttgtcttcttctaaagcgaccaccactgatagaagttgtatatgacttgcgcccctcagaagattcaatctgtcttcagatggatgacgggtcgatcttcacggcagacagtgtgcttggtgagagtacggccgtgtttggtcacctacgaccctacctagactctctccgacagttatcgtctttaagtcccacatctctctatccaggacatggtatcgttatcctaaacggcctgaagacgctagaggactacatcactcatcgccagatcagggaggatcagataatgagtctcttgcaaagacaaccatcgggacccgaacaaggaacaaggctcccaggcgcctgggagagcaagagtaaaaataaaggggaggggggttggtcggtagaagagctcgtattggagatgtacgcagatgtaggattcgttcttcagaacgcagcagccagaggtggtcagtcagggttgtttctttctacagaatcccgtcttacatctcatctgatgggtctcatctgtttgtcccttgtaatccgcggaaaatgacgatagtgatacttcatcttgagaagctactggatgaaggaaaaatcaagaaacacaaccgaactaaaaacgaagaagaatggatattagcccactgatacgcgcacatgcgtctcttctctgtacctcctccttctcgtcttcttggtcttggggagtcctcggttatgtttctttcgtcccatcctttgtgatcttgctcttgctactttccactctgcttctatagttgtatccgccttatgtctcatccatgatctcatacgatatctctctctcatgtccgttctattgttacttttctttcttccttccactgaataatcattcgaacaacgtatactacataaacatgttgactaccaagaacactcattcgtttaccgagaagggagaagaaaagaaaagctctcaccaaaagagagaagcaggaatgaaatagagcatgcctagagagttgagtacatgtatctcgagaccaacgaaaccattcgatagacccttttgatctttcaggaatctttccctggatcgtaagctgatcgaccgaagctcttctgtctacacatatatagttaaacggtctaatgactatgaatgacaaaagaagaaacaaaggtgatatatgaactaacaaaacagggctgtgaaaaaataccctgcattgcgtcgatgtagaatagggaattttcatgattttatatgtttaaaaagccagtagagcaataatacgatacatcttttatgacgaagggtggaagagaaaggggtttacgtagtgaaacctcaatggaataaggataagaacaagagatggaatgatggatgatgatgcgtagacatgatctaaggtatttgagaatcgataattggagataaacagaccaggacggtggcatcaaaaatatataagtacaggcaagctagagtaggggttgttcttaatttttaagaagagtggggaggagggggtcgttaagataaaacagacatccgggaaaccataaaaaccatcagaaccgtcaaaaacaaagcagcaaaggcgaagaaggcacgcgaaaaaaaagcaaagaaagagacgaagaagaatgataacagcgcgcagagagaaaaagagaatctatcgagccgaagctgtgctcgatcgagtactcctcctgaccggtcgggcaggttgcgtagccggggccgtcacgggcgtagggatcatcgagggtacacttggagtcgcagtctcgacaacagaagcagtcgcgggagcaagtgcagatgcggttgaagatctagggatgggcacggcagaacgggacgtagtagcagtagcggcggccgccctccgctttgggagtgagctgttcgtctgttcaactgacactgccccgttgggttttccaacttttttcacgacgcccgccggggcaggtgtcgccaccaaagtcttcgaaggcgcctttaccactgggagattggtggcagaaggcttgattgtgtctttagggatcattccggaagaaaccgtcggcaaggttgtggctttggatgttgcagtcgatgtgggtaggggtgtaggcttagatgatatcttgctggctaggggcataggtgatatcaaggactcggtagctttaatgtcgttggcctttgacccgctttcggttgccacaacagagtcggtgttgacgctagtgctatcatcagtcaccgggccaagaccagatggttttgagagaacagaagcaccagaagcaggcgccgaagttttcgagacagccttgacggcttttgaaggtctaggagcacgaggtttcggattagcctggaccggtctgggagtgtttgaagatgacgtggtctgtggtcgattgagttttggttgaggagctgtagatgggcctgcatgaacatgagctggcttgacgcttgaagtagctagagcaggtctcacggaagtcgggttgggttttggaacagtggttcgtagaggcttcggaccagtcggatagttggacctagaagcttgggagattggtaagagatgtaatggacgacgggaatgcgtcatctctcggtctccgaacgccaaagcagggttggacagcttgaggattttctttattgaattaaagaaagacacatcattaaataaatcagtatacgccacccgagaaacttaaaaatctgaatcaggacgtggatacttacctccaaaggagcagcaggaaattttgaagccagtctgggttccaaaaacccatctagcaaagcgttcccaggcatcaactgttaggagtataaatcgtcagtcatttgccctgtctagaaaactcaatcttaaattccaccgttgcaaggaaaaagatactcacagcgatagctacgttcctagctgtatcaagcgacacccaaatcccatccactcccggctctgcatcatccccaaatgcaacctcgacatgctctaatgcgcttttcagcaagtcgactttcggttgtctttcttgtttgccttgaggagacgggcatagcgtttcgacacaggatgtcatgttgataaatgcactatcaattcggcggagaagggtaacatcggcaacaacacatttgaacacggggactattgacaagtaggcaaaccagagaacagatcgaaagcaggcgaatcagtcacacgaaagaaagaatgacgacacagtaacaagagacattactcacgaccagaggccagagtagcggtgatggcgggggttagctgtctgattggctcgacaaccaaggtcgcaggaccgacgcgagcaacatccttcggtaattgttcaacaacagacggcccggtcaaagcatctggggcagccatagaagaaagatcaggcttgctatccgtaaatgtcgtctgagttgagagagggctgtgtggagtagatgtattcgccggtgtgacggtcaatgtcgaggaagactgagacatgggagattgtctgtgaatgttgattaaatcagaagatagatcttcaagggcaggaagctgaacgtcatcatctggcatgggagacgtcggaagatggacagaggtaaacgagaggagggttcgatcttcagtcggttcaggcttgtacatcaattcaactgaaacatcgtcttcctctccatcaacgctggttgcgaggcagaaataagataaagatcaccacataaacacaggggtcagtcaatcaggatagcagtggcgagtaacatcctcaccggacacctatacaaagcaaggaaacaggtgaggaagaaacactcactccataagctcaatcatgtccgacaccgagacagatagttgacttggttcggtactcgcaacggacgtagaatttgctccaccaatcaaaggagatctttctcttttgaccggcgccggcaaaggtgtagggagcaagcttgaccgtctctgtttgattgctcgtttggtccttgatctttcctgtcgatcttcttctcccacaccaatcatacagtcggcgcccgttctttccttgtcttccttcctgatcctctttgccgccagctcatcttcgcaaccattgtcgtcgtcgtcatcatcatcctcatcctcatcatcattatcaggtcttcccatccgaagtgccgtagccgcacggacacgttcgaccagagcaaaagcaaaagcctcctttgcgcgcttgatgtcatccatcgtgccagacgagcctgaccgagtggtatcctgagtcgcgccgtcatgcctaccgatatcactctccatattcgtcccatcctccaagccaagcatcccgaaccgaacggaccgaggtcttcgagcaccccagaccctctccagttcttctaaaccgacactttccggtcctagaaactctttctcattgtcttcttccgtttcctccccttcctccatcccacgtcggcaatcctcttcgtcatcttccatgctcaacaacgcgtcagccacacgcgtttcctcccaaacggccccttcgctgggtggtcgacagtacatctctggggaagagtgaaacccgggcgacaatggttccaatttgacgacctcctccagaccaagaactgaggttgtcgacagttgctcaatttgactacctacagcgactgacatattctgtaaagcccaagcttcggccttttccttggcgccttgaatttctaaatattcgtccgtctctgtacctggggaagagtactcaaacaacagacttttctcgctgaacgatggggtgagcgcgccaacttcgcacacactgatagattcctggtcatcaaaatcagggtgagggtatggaacggatctcgagtgaaacggaagtagagaaagcgacaggttgaagtcttcttccgactgcttcgtatgagccatagaaacgtcgagcccagcggttgactcgtctggactttgggcaacagaatgaaatcctccgaaccgagagggtgacgatggaataaatgtgccgtccaatgggtgaccagattgagggagagcgaccaaggagagacctgggctagggtttggcgaaaggcatgtcggtggtagaagcatagttcgtgggacatcagatcgagagttgagcgccgtcggctgagttacatgtagcgcaagaggagggttgacgaatggtgtggctgactcgggagaatgaggaacagaggccaacgcaggattcatagtcggctgggaaaactgctccatagaaacattcaaatctctgttggccaccgggggaaccgagacaaatggagcggcgtccaacaattcgcgtggcgtcggtggtggcggtagaggcggatggagatggtggtgatggtgatgacgattgatcggtttagatcggtactgaccatctataggaatgcgataaaagtcaattccatcgaatgaagacagacctcctagggttcgtgcgatcctctgttcgctcgtctccgcctcattctcgccttctgacgaagattcgctggaggatgatgagcaggacgtgtcggacgaattccgaaggtagatgggtcgacagtatccagtctgaggatcgggtgacaaggacgcgcgcttcttctttggccggcgtgttcttgttgaggaggggagaagcgagagaggatcctcatcatcagatgaatcgttgggcgagtcggatttggttcgcgccggtccgcgtttgcggttaaccgtacctgatggagcggacgagttcgtgttagaaggcgagcctagcaaacgagactgcgctccggcaggttctggtgaggtttcccggccaccaaccttaagacgaattttgagaccaggtttggtggaagcggtggaggcagctaaattggccgtcagactcgacgggccgtctcgttctactggcacaggcgttccatctctcgactcgtccgtctcgtctgtcaagaccctgtcttttcctttttctttagctttgacagccgcctcttcccttttgcgcttttttgttccctctaactcctcccgaacgctctccaaaccttcccgaacgaatggacttttgcatccaatggcctcgtttgaaagataccagacggtccctctcggccggcgaccgtccgcacaggcatctgggtggagagcaggagcaagaacggcttccgcaacagacccaaggagaaggtgcttcgacaagagacatggccgtgaggtgagagccgcttttcgagcgtgggaacgtatgcttgatgtaatctgttgttcaggagtaatcgccggactggtcgagcatgaagaagtggaagtatatgggggcgtcaattgtactcgtcgaaagtgttcggtaacagaaggaagaagaaaaaactaacctggacctaagccatcctttggagacacacacatgagagagctccttaaggccgagagctcgattgttctgcagaaccaggtaagtcaaacgtaacgacgttagtcagaaacaagtctttgggcgctacaaacagttcatgtggaggctgtacgtaccgagctccagatagctgcgcatattgccatgagaaccttgtcgttcaggtcttcttctgccagtttggcccgcatggcctttgtgggtgggaagccagagtcaacggtatcatcgacagtcgatcttcttgttccttttccatgagcgatactgtcatttgaagaagtcgtccgggatggtgtcggggtgactgccaggtctgtcgtcgatttttgagccaacgcagtggagagcctggtccgtttgggccgggaggacggctgtggaggggttggctggtgatcgacggatgtcacgggtgacgcaacaatggtggtactggcgtcgttgactggagcaggagcaaagtctggagcaatctgtccggccggcatcgtgtgtggtgcgggcgaggggacgatgccctgctcggaggaaagggacgagagcgaggatggcgaactcggtagtagcgaggacccccctgatggaatggaaaatgacagaatagtagtggtcgtggtgtgaaaagggggaaggaaagggcgagacctggatcagggatatatgtgtgtgtataaggggatatgtatgtttgaaagtgggtatatgcgtaagcgtgggtgatcaagaaaatgacgtcgaaggtggaggtgaaagacaagtggtggttggatggatacagaaggcaatgagaagcagaaagaagacagagttcagccaagacagaagtgcgtgcgtgtgggtgtatgggtctaggagagagagagataggaagagagccaacgggaaccaccaagaaagaaagaaggagaaaagggaccgaccaagagaaaacactcaatcaagacggaaaaagggctgtgtgtgggggcacacacacaagcacacacgcaagggtcgagaattgagctctgtgcccagacgtgagtttgttgtcttgctttgggtcgtaccactagaggcagagatttttcagacagagagagagaaagatagatagatgggtatgtgggaagggaagataggcaagatcgagagaatcctgagttgctttcaaagaatgagggaagggataaaaaaaagagtaagaagggaaaagaacggagaagagaagaaaagaagag

SEQ ID NO: 1852 - DNA, 3257 bp, Xanthophyllomyces dendrorhous
aaaagaaaaaaaaaaaaaggagaaaaaaaggaaaaaaaagggcacgcggaaaaggcacgaggaaagaaggtaggcgagggcaaaaaggcaccaggcaccaggcacgagctattgagtgtggcctcagatcgagagggatgaaaaaaaactaggaaaaaaaatgaagacaaaaattagtcgccctttgctctcactcactcgcattatgacaagcaagagaaaattcaatggccggcgcggagatctattcgctcgaggtacggagactgcggatgtgcaaacaggaacgcttagtcatttgcttagtcattcatcggctgaatccttccctgcctcccatctgtttgacccgatctcgctttggccccccggagataaccacaggcattgtgcttacatctcatcacttatctatccttccctcagttaagacatcacgtcagaattcacgtagtcctaccataggcctggaagaggccactcacgcacacgcacaagcataactacacacaagagatatctttccatgcttcagcaggatctgtccgatctcgttcgagctctggatcggcggattttgtacccggtaaatacctcggtcgggactctctggatcattcgcgccagaaggaatacactcgcttatgatggcttatgctttcacttgtcctacagatcattctcgcatatacttgcagtttgtactctcgtcttgttctatgccctcgtgtctccagttacctttgctcttacttctttgctcaccttcacatctgctcatgcatacataggttacatcgaccgttcaaatatctcaaacagtctgacatcgctcgaacgaagtatagggctctcgccagagcgctatgctctgtcggcgtatgtagttcccttcttagtcttcttgtcctttttccgatgtgacaaatgtagaccatactctcctgttttgttattctcttctgggctcgggttggatacctatacatttgcagagctttgttcaccgtctctttggtcatcatcgaggttccctcgtgaggtctcctttacttgttcttgaattccttcgattctgtgagcaacatctctaaaggagaatgttcacaaatcctttatccaacagaaatttgttggttaagaaactgggacccaaaaagtggctctcggttctggtcgcaggatgcggcttgtgtaccatctttcaagcttgcgccccaaactatcagtctttaattgtcatcaggaccatccttggcgcttttgagggtgtgtatatgaccatgctcctttttagttgtgactatatgtcttgtgtgtgttattctgcctatggcgcgctgatacaacggttttctttccaaccgatcaaccgggcaactcgttccctggttttctctcttctcaacaataggcggcgttttccctggctttctctacgctctcactgtattctatcctcccaaaaacctcaccgtccggatctcgagttttactctcgcagccagcgtcgccttttcccttggaagcttccttgcaggcctctttcttcccatatccaatggtccatttggtctagaaggatggcagcttctgtttctattacgtacgtctgtcatgtgttcttgaggaagaaagatgtcaaggatctgtgaacgttgacacatcttacttcagagggaatcctcaccgtctctgtggctggttctatctggacctttatcccttccgacaatcactctatctattttctccgacctcacctcaaaactttgtacgactcgataaaacacgatccactttaccctccgccggacgagaggaacgtctctcgtagtgcctctccccgcccatccgtttcttcatccatcttaccaacctcctcgggctcataccctcctattcccttgcctgtgacggtcaccgcccctggccgatccttgagccgatcccctccgtcttccgattcacatcgaccgaaacaattacctcggatacggtctgattcttcaacaccgctgataacatccccgcctgcaactgttatttcttcgtcaacattaaagacattgatcgacccattcactataacgctcgccgctggctacatgctcctccttcttgccactactccctccgcctttctacctagaatccttcaggctcggtacgggctgacagaacggtcgtccaatgtgctcgtcggcacggtctacgtgaccggtggtttcgttcaattcgcggttggctggtgggcaggaaggagtggtgtccggactgtctggcggacggttgctacaggcgtgatctctatttggttattggttggtctgtgggaagcgattatcatgaggggatcttttgtcttcgacacgccgcatcatcctcaaagcggaactaggtttgggcattcatggccagacgggctggaagggatcgtagggatcgcgcttagattattggcgacgttggcgacgccttgtctaggaagtctctttctcgcacatacggtctctgttccggttgtgcttgtgccacaatcgggaacgttgatggcgggcgttatcggtatgtcgttcgctttttcttttcgtctcttttcctttccttctgtttctcgtcttgcgcactgttctttcaggagaagaaaaatatcttgactgttatgcatttatgtatgtgttcacttgaactccctccccctccccccacatacactttatacgaacagccgtcggaaatttggctcaggcgattggccctgtattatatgcatcatgtataccacctctgtctcggtcgcctagcccactacctatccctataccgccaacgacgcatatttctcgcgtcatctcccaccacaatttcaatcctagcgcgtcgacgacagcgaccgtctcgtcaacttacacattctgggccgagttggccacaagagatcttctcatgggtttatctgtactcgggagttgggtcttattcgagctggtcgctcgatgggtcgagcgttgtgtcgaggaacgatttgcaagacggttggatgtttggagcagtagaagtctacctgtcgatgtttctatccaagccgatcaacataccgatcaggaagaagaggagagagacgaagaggatgagagcgaggatgagaggcacgatgataggagggaggaaggagaggaagaatcattattaaggaccccaacgaacgataaatagatgcaggttcttgttacttttctctttacttttttcgt

SEQ ID NO: 1853 - DNA, 33665 bp, Xanthophyllomyces dendrorhous
gtataatcgcacgtgtggcttgtgcttatagtcgcctagatgtctcgccttgtgatcacgttagcgcatgtgattgtgtaaagttgaacctgccaggcctgattgggcatattcaaaagaattgaacccatcacccaaccaacccatcgatagaagatggcaagacatgccattgtaggtcgtttgaaaaaggagaggaggaaaagaaagacaaggcgagaatagggagccacaacaaggatcctacagagaggcgggacatagtcgaaagaaaaaaaaaagagcatctctagagaaacaactgccgaaaatggaaagtaaaaagaactcgacgagtttatctggcaatctgaccaacagagttctgtgagcagtcgatcttcagatcttgtgactttgagtttccttgacggtgagcaataccaagagcagcggatgcagcagcagcaccgatgacaacatcagcagccaccacaacaccatgggcaaagcatcatgcctacccaccagccgaaccgcaaggaagaccgcgagacaattccagagatatgatgggattgatacatttttattctgctgaaaaggaacgggaataaaaaaattcgacgcgtttattttcgacgcgtcaggataaaaaaaattgattatgactttcactacagtccgcattaggacagatactacagattggaagacgcgcgcccggttctgattcggtgaacacgtcgaggtgttccctctttttcctcgataactttccttacagggagacttatcgtataaaaccaccacttacggatagatgagaagtagacatttaatatgatgtagtttatacaaccagcgaataagttccagaggagaaataaatttaattcgaccagaaagaaacgttattttctctcagtctagtccacgcgtcactcgcgactcgatacgcgcgacgcgttccgcagtgcgcgtctgaccgggttgcccgtcatatctacccacgactcttttaccggccagactcgaatccttcttcttcttcctcttcccttttcccccctcactcttgctccctaaccaccaccttcatattttctctcaacctcttaccttcatacccaaaacagtacgtcctcttctccgtctcgtcttttctttgtctcgcttgcatatcccttttcgcccatcatccccactgacgcgccctcgttcgttcgatttggtccttatccagccacctctcaaatcgtcccaacaaagatgtctgccaccaagaagaccaccgctcccgctaccggcgccgctgctcccaagaaggccgctgctgccaagccctctagccacccttcgttcgtcgatatgatcaaggttcgtttctttcagctttctctagcgttccctagtttgcaatttttcccttctcgctccatatttcctctttcggctaccgcacccggacccgggtcagacccgtcaaacctatgggtcctgcgctcgaccatctctctatacatccaatcgaatctttgttctcctttcctcgatatcacttccaccaacgccctctccaagtttgggatcgatccgttgggtttcacccttttggcgctcgttcccgtcctggtccccttctctcgccatttgggcccgagagaaggagtgaccgtctgtacgtgatatacaccatcacgtcgaattcttccgtttctctgtttcaatcgcgtcgcttctttacgaatccggattgcatcatgtcccatccactctctccagcaattcgttcgtttctatcggccttgatgcggtcgtatcgggcttgggagtcatccagggcgaacgataccgagccgcggattgagtggaatgtcagaaattcttcctgacctgccattccattccctccttgacttttttctttctatcgacattttcccacttcctcttttctctcctatcatctgcctttcgtctcgttatcgacgcgacttgctgacacccatgttatctttcgttcttcttccgtacagcaatgcattgctgagaacaaggaagacgcccgatccggtgtctcccggcctaccatcaagaagttagtgaactatcttcctcgtcatgcaggccattgagtcgtcaataccagatactcatctccatgcctactttctcttcctttctgcttaggtacctcgctgccacctacaagcttgatatgtccacgtccagcaacaccggaaacctcgcccgagctatcaccactggtgaggagaagggtatcttctctcttcccaagggttagtaattcctttttttttttttttccaatgctcctcagtgtaatagctttctcttacttatgcatctggtcgttttcaggtatctccggaaaggtaaagcttgccaagaaggagcccacccccaaggcccctaaagaggctaaggagactaaagagcccaaatctgcccccgtcgctaagaaggctgccgctcctaaggctgtcaaggcttcctcccccaagaaggccgctgccatcaaggttcgttctcttggaattctccctactctctacatctgtctgaactgattgttgactgatctttttatatgtttctaggcccctactgcgaagaagaccgctgcccctgttgccaagaaggcttctaccgcaaagcctgctgtcaccaagaaggctcctgccactaagaaggccgctccggcaaagaaggtcagtatctctttgagaccatgttcctgcatctcgttcttacctccttttttgtttctaggacgccgctaccaagaccaaatcctctactaccaaggctgtgactgccaagaagggtcggttcacttctttcgacacccttcttcaccgtttgttcacctcggctcacttatgattttttttcctgtcacagcccctgcaccaaagaaggctcctgctgccaagaaggctgctgccgtcaagaagtgaacgcccaccccgacgtttttcctttccttccttcagaccgctcccttctctcgttatccctgggattcttttacttgctttcgcctttgtcttattttttacccacttttattcgcgtactacacgtctcgattattttccccttttctgtacccttagtgtcatgaattatgtgcaccttctccgtcctcccgagggagcacttttcttttttccttcctctctttgtttctctttctcggttcgttagtctcgtctgtctctgtttatcctgtctgtcaacctaccctgccttacccgttccaaggccccctttttttcgttgatataataaatccgctctttgttctttgacttcgtctttttattctttgtttttctcttccttttctcttggttcggatcagggtttggttcctattatgtcatgcagattctcataattcatcacagttctcaggacaagcgcgtttaaaaaaaaaaaaatgtccccgctgcttatccatccccagacagtcaggatcagcgtgacatagattcaattgaaaagaaattcgggatccctgttcatctcgtcaaacctactgattcagtcgtctgaaagagacactgaagttacaagacgattaactcttacttgaggttgtcaaaacgaactcagaaaagaaaaggagaaacctgtgtacagacggaaagaggagtacagatatggaagaaaaagaaaaagaaaaaattgtcagaacgtccaaacggaggaacatagacgcgcgcgcgcgcgcgtgtgagtttgttcgattctttatcggcgttgcggacagcgagagtgtctttgagatcaactgattctcgttttctttttctttttgctctcttcattctctcgcgttgagaccttgcactcaacatacttgagtactctcttcaatctaattctggttgcatacgtgataggtgacacattgtgtgagaagcgtgacgagcgactgatggcgaaaattgaataaaaagtgacgagcgatatgcgattgatgattcgtacacagtacactcgacaagcatgttttcttgtttcactagagactagattcatattgttgttgtttttttgcttgtttctctttcggacattcgtcagattcttcaaatgactttgcgctatttattccgagtacatgcatgtcacaacttatacgttcgtgtcttgcatacattctcctcctcgtctctgtgaagtgtgttgtccatactctgaaggaggctatcgataaaagatcaatatatcatttcctttccttattcttctttttgaatatacaaacgatgagaaacaaaagaaaaatccactctcagttgtcgtccgaaacatcctctcgctaactcacgccgctcaccccttcggcttatcctcgcgctcagaaaccactgctggacctcaagctctccacctttttcagaacctcgctcgtactcctatccaactctgccgcgatctgcatctgcttcgtcgtgggcaaaagcgcgaaggcctcgcagagatctccatcgaccacagccttgacaggtgcgtaatagcctctgtaagcaaggtgatctcttccaacgagcgaaggagcttccgaccgcatgtgcatctcgagcgtcgacatgaactcgatgtcttccctcgacacgaacgggatgaggagtccgatggatccgtgaagaccggtgtacagcaacacgtccctccctccaggaacaagggatgttcgggtgacggaagtgacgatgtcgcctacgttgtagtgggcgagcaacgtcgtcttgttgggtgcgcccatcaattttgacttttcgtgaaggatacccgcaccggtgggatcatcgtccaccgatcgtgtgacagaagtcggaagtcggttgatgatcaggtttccaaacttgtcaccgatggccaccgtttcgtaatcgaccatcgtggaggagaccacccaacgaggttgagaatcatccgcaaagatgatcaatcggttctcttgaggcttgtatgtcacataagagacggattcctgaatgtctccaacgatgattcgagatccttgggtgttgagagtggtgatagagtttgggaatgactgaagacaagagtcgctttcgtttagatacgatgcatcggagtcgaagaaaaagatgtgcggaccgatagaaagaaaaaaaggatacttacagtgttttcacactttcgcagaagcttcttctttccgatatcgtatatacgaagggcctttccaacaccggccatcaatcgaccttggaaagccatcagacacgttgggatatcatccacctcggtctaaagcatcataggagacgaagagagagagagagagaagaaaaaacgtcaacgtccagccaagtcacagagaatatgtaagcgcgaatttacgatatgaagtaactccaaagccttgccatcatccttgagcgtgtacgttcggaagtatccgctggaacaagatctaggcgacaaaaaggtatccttcgcggtaccgaccaccagcagagtctcaccttcccggctagcaaacggcacgacagctatcgagaacgcagcttcgttctcatccaagtccaacatggaaagtgtggttgactagtattaaagtcaagacgcgggtcagacggcacataattcgatacaactgaccggagacggaatacctacctctatagggtccaccactcgaatgcacgaagcccattgaccagcatccgctctcggtcgaccaaacacttccggtgcaagatcgacaagctccatatcgacttttgatccgcttgcgatctggaaaaaaaaggtacgatcatgagggaaggagcgaagagtcagtgtgggtcttgatccttaaaggagctagcaaaataaaataaaataagaagacaccaaccttctccttgaccatacgctcgatagcggccggtccgtgagctctgtgatcagactcgatcacgtagaagatcttctgtgaaggatgtgaaacgaatcttcgaggagtgtaagacaggggtgtaacatcctgcttgagctttgtgcccagcttaggaatcgtaaagattctagtgatcatcaagtgggttcaaagtttgaaaagatcagtatctgtcatcgaattgcaagcattgattgttgaaaggtagggtcttacctgagcgtgctgccagcgataccgatcaacccatcaggacagagctcggccgagaacgtccaagcgtgatccaagttctcgtagatcaatggcgagaactgtagtaggttctgatggctgtagttcaaccaggaccgactagataaagctagcacaccactctggccttgaacgacgacccggacgaggcgcgcggcttttgaaccaatgaacctacacacccattgtcaagcgaaggaaatccgatgagttctccatactagttttcggagcgcaagatgcttccagacgcccagaaattcgagacgcacctttgtcgggtatcagtcagctgaccgttgacggtatcaatgaccgttcggagcagcacaccgttctgcagaccaatgttgaggaacatagtcgggtgatttttgtcgatagacgtatccgtcatctcggcgatgcagatcgaagaaggaatagcagtgagagcctgtatgcatgaacgaggacgacaagtcaatcacatggatagaaaggcctcagaaaatcgacttgagaacggagaacgaacctgaagactgagagtggacaacgtgttttcgggatcaagtgaaatgatgtgaacagtttggttttcgcaacccacggcctgaaatagtaagatgaaaatgacgattcagcaaaagccttatcgatctacagcttgcaaagcttatggagatactgcagaagcacgcaccaaaaacaagcttcgttgtcttcctgtcgggacttcccccatgctcatgcacactactccagccggcaactgcttcttgtcttggtattcgttcaaacttccatctacgatgtccaactcaaagtatacgagctcgcccgtgttgagggccacgcaaatctgtctagaatttgttgtagcagcaacgatggaggttcccggggggaccggccactttttcttttccttgctggcgaggacgtgtcgaatctcgtgcggcgtgatctgaaggagagaatcttctccgagttgttgaacggcgagcgttggcgcgtcggaacggaagcccatgtcgtacacttcttcgatggtatcaccaatggagaggaccaatgttccattgacgaaagagagaatgatgtatgaatcaaattcgtctgttggattgtgcaaatttgcaaagctgggcacgtcagtgatctaacaatcttgagcatgaaacacacgatgtttcaacataccgtcagaccggagcttggttgtccagaccgcattcggcacaccgggcaactctgagctgacagtctccgagacctccagcccatacctcaacatcctgaacgaactccttgacccctttccacaagcagcaaatatttgcggcgtgtcctgacctagcaggttggccaccttggcatcgacaattggatctaatgaatggacctcgtccgagagcgctaagttgtcaagcgggcggggtcggaagtaggcggagggaagaccgtcttcagacattccgaactcaggataggaagcagagctgaactctgcttcatcatcgtcgtctcctagtttctggaattgatgcagatagcttcacatcattgattaagcaattgttagattcagatcgaaaattgtgtaagcctttaaaggaaaaacaaaacaaaaaaagagaaaaagaaaggcgctaaagacttactggtttccaaattctgaagccacaaacaagaaaccactcttcaagatgcaaagcgaagaagcgactggcacggtgtcaaagtacttgatcttgaggttcaagacttcttcgtccttgtgttctatggtaactttgaacaaatcaccttcctctgattgcaacaagaagaagaagtctccctatatcgatgatgacgatgaggaagaagagaagccagatcaggaattatttgttttcttttgacgaaaccacacatatgagatgcataccttcatcttgtgcatgacagccgaaacaatgatgattcccttgtcttcaccgttcaggggattttttcgcttggggatgggcactcgatgttgaggcgcgtccatgtttctatagatgatgtaatcctcacagcagaccagcactccagacggaccctcccatcggtcggtcgaggcagattgaccaccaggtactgaaaagacgtggattcgatgagagactcgtgagaaaacgtgctaagacatggccggtgaatagaaggatgattagaaccaaccttgaacgagaaggtttgcacgaggatctgtcggctcggaccattttcggacaacgtggttcaacccaagatccagctcgtaaaatgtgagcatctgtaagtgaagaatgaatgtgaattgaataccgtcatccaagctccaagagaaaagcgaaaggtaaagaagactgtactttttcagcattgtggaaagcttctccagtgggatcttgatcactatcactgtagtccacttcaagcgcggcgaacaacggattgtcgaatccgacatctactccaacgatgctcaatatgatggccgactgcttgtgggcctctaacggactggagatcgtcaggttcgcagcggcatctcggttgaggatgtatactagcttggccttctcgactgctccgatcatgacggctcgtcctttcggatcggtagcaagccactgaccgggcacgattcgtcgagagccagacttgccgaaagtttcctggtgaagctttttgaaatgaggttgaggggtttgaatgaattcgagaatgacgatccgaccagaatcagaaccgacgatcacatagtctggtgtttgtttgagtatgaaattgacgcgtggatgagggaaacgggcaacagaggtgaccaaggagacagacaatcgcgttcaaggttggatcgcgtgtaacgacgacagattgatgtttgcaagaatcagcgaagagttgatgcgaccaagactgtgacaaatacgttggcaaagaaagaaggtgcaaacgaacctttcgttccacccgtcagtctgaatccagcaagacttcgaacggtaccaaacacctcagactccaacacggtatccagcttccctgtgcttggatctggacgcaagagttcaatcctcgttcctctagcgacgatgatctcctgagtcttgggcagtccagagaacgatccgacgaccgaatgggtgatcacctgcggaggagagagtgtgacattgtaaaagtgaggtcctggctggagagccatattgcttgacctttaaagagagcgacgaagaagaggaggagagcaagaaagagatcaagacaaagacaagaacgagctagacaagctatcagaacagacgatggttagagaacgacgggtggaaggtagacgagaaggtgaacgagctcaagatggaggctgaaggttgcttagtcagcaaagagcgaaaaagttcatttggagaatttacctgctgctcgtcaagttttgaatctgatccagctcgcttgctcgcttctttctcttttttgttctttgtttcgttcgttcttgcagggaagcaaagcgttctagttgttcttcttcgttctgtccgttagaaatgcctgattcggatccttctgctcaacacacccaggcggctcctttgtcgaggaaggccaaaaagaacgcccaggctgcagggatcgcctatgatgtgaccacgtcggcgacgtttgttgcaaagaaggacagacctttggtcgacccggtcgtgtcttcgctcaagtcgttgaccgagcactatgatcctgcttggggactgcccgctagcgacacggccgtcgttgcttctactgccgtctccaaatcggctcctctcttcaccgctgattcaacgtgagctttcttgcttcgcatgcatttttttcttcggcctttctttgctttcccaacttgctttgcttgctggcttgctttcgcaaatctctcttgtttggcttcttttgggtcaccgttgatggaaaccaagaaacttactcttggccttccttttctctttcccagttacttcttccactctgccggaaagaccctccggctgcactcaaccgagtcgctccttccgctttccaccctttcctccaaaaatatccagaacggacattcccagcggatcacgtccactcaccttaacccgacaaaccctctccaggttgttacatcttcatacgatggtaccgtcaagttctgggactacctcgatgcaacctgcctccgaacggtcgtgtgtcccggacctgtcactcatcttgttcccggcacgggatcatccaaaggtggttggttcgccgtggttttgatcatgcctgccagtcgaaagaagaaatctggctcggacaagtatggtaagctcgttctagtgtatactctgaaatcgttcagtcgattgttccaagctgatcatctttgcttttcacttgcttcaaacgctgtagagcgcaatcaaaacgccttgccgtacatctatgagcttgacctttctgcccctagtgctggagtgtctccgaaacacatccgtggacacaagatccgacctgcatcctcaatcttgatctctccttccggcaactttatcgtcgtgctcgccgcccaaaaagcactcctcgtgccgactcattcgatcactgaaaagccgaccaagtttgtatcccccgaagacttgacttgtggagcgttccaccccgcagatgatatctttgccaccggagattctgctggtgtcgtcagagtctggtactgccttcccggcatggccgatcgagcacaaaagcacggtgttcagttcacccgcgtcaatggaatgtccatggagacagaccaacaacaagaacctggaacgaacaagctcgcctcgctcggaatccagactcagtccaagacaaccccaaccactacgcttcactggcattctcatcctgtctcttctgtcgcattcaactcatccggaacgacgattctctcgaccggtcaggagggtgtactcgtcatgtggtccgttctttctcaagagaaacaattcgcaccgagattgggtgggcccatctctgccgttggcatccgaccacctgcgcttggaagggaagaggaatactggctttcgatggccgacggttccgtcaagcgaatcgcaggaaacggtcgagccggctggcgagtcaagagcacttgggattccggtcgagctgtgccctcggttcaaactcgatcaactctggccatcaacgctaccgctgtcccgttggcttaccacccgcagacagactcgttgattctgcctgccgcgcatccttcatccatccagttttactccccgttgggacagtcaagcgtgttggaattggaagtcgccccaagtaaccgagtctccaagagtaccgagaaggagattgagcctacgagggttggacgggtctccatcggcggtgactggttggccacaagcgacagcctggagaaggatgaagatgagggaggaatagaagaaagacacatcaagtgctggctttggaacggtaacaagaagacgtaagttgttctaacgcttatgaaccgagtgatccatgctgttgcctgctcatacgttctgtatacttttgtgttcgtgggattgtacgtcatctaggtactcgcttcagactgtgttcagcgcccctcactctaccaatgtgacctcactcaagttttcgcccacgcctgttccgtcagcctctggcgaaggtcaggcttctactttgttgctatcgtcttcgatcgatggagttgcccgactttggcgagaaaaaagaatccgatataagagtggaaagaccgatggtgagcttctcttcgcctttgaagattgtttcgccttcctcctatcgtcatcagttctgattctctccttggatacttctcacagcgtcctttgttcctcacaccttattctcgcacaactcgcttcctatccacgactctgcttgggcgcctgattcctcccttcttgcccttgcccagggatccgtggtcacgctgtgggacccggtgagcagcacattgaagggtacattgggttgttcagagttccctaagggagtgagcatcaaccatgtcgcttttgtcggtatcggaggcaggtatgtcgtcggtggagcttccaaaggcggtctggtcgtttgggatctgatccgaggtgaaagtaagttgtggcctgttgtgttgctgtcgttgatcatgagtgacttacttctttcccattttccttcctgcttgtagtcgcctggtctgtccaagacaagcgagtcagtcagatcgtcccctcgacgtcttcctcttctcccgacaagttcaccgtgctcgagaacggtcacggccaatcttaccgatccgccgcctaccacgtattctctgctctgtcacccaccgtcctcacttccaaaggtctccacgagcacgtgcggtcgcttgtctcatatccttctcccgctcctgagaacagtgaggaagaagaggccgaagagacgttcgctgttctgtccgatcgattcaaggttcttctcgcaggttcaggcgcggccatcttgaagtcaaccgccacccgaggtccgagagctcttcttacatcaggctccaccactgcttctcaacctcctgtcggagcgactctgttcgatgagatctttggtcctgctccttctacctcgtcttccgctcctacagtgccgttggtgagggaaggtggtagaaagacttacgatgacctgaacgacttgttcgaggcgcccgcccaggtcttgcctcctatgggacttttgttcgacgaggtcttcgatggatgtgtcatcagacgaactgtttctgacggaaaacaagccggagcagatgcaaacgagttcaagcacggtcaagaagagcaggaaaacgatggagctatggatctcgacgaggttgtcgaggatctaggagaggccgacagaagcgagttggatcaggtcagagccatcggtgatcaggacatagaatctctagcaagcctattcagagacattctctcttgtatgtcgttttcacatcatctctgccgagtccattctctccttttttaaagccagcaatactaatcatatcttaaactaccaatcgtaatcaaactcagccccagccccgacttccagcccttctaccaaaaccaagagcgctcctgtttctacttccaaagtcaatgggaacctcacgagctctccttccatcacccaaaaggggacacccgctaaagcgattcctacccgattgaacggaaatggaaatgggaagtcggcttcgtctcctttgaacgccgctgttggtgggacaaacactccggttcgagctcagcagggctcgggcaaacagggaaagaacggaacgcccgggtctgtaggtggaagtggaaagaagaggaaagctacttgatcgccgtctttcccctctgtcaccttgttttccccgtctgttctgttaatccctagtttgagagtgagcgacgtgaaagaacttgatgcgattcgatcggtctgtagatggtcaataaaacgtttccatttcttctcgttgagttatatacatgattccccgctcaactcgctctatcaatacaaagatgagggaacacgttttctttctttcattggcatcatcaacacattttcttgatagaggtaaaagtacggaaacgcaggatttggtagagatacaacacgactttttgaatacgtacataaaccagttagaagaagtggagaacaagaacaacagatagatagacatatgtcttgtgaaacaacaagaacacaaaatcctacaaagattacaacagaaacaaacgaatcatggacaggcaaaagttagggctacagcctgagcggaccatgtgctcacttgatcggactccaggacatgggcctcatgatttggctcgacatgccctgcgcaagcttgacagtctaatctcatccagtgttcccacaaactctcgcgtcagcttttttacttgaatacacagtggaggaatgaatggacaagatgagaggtgcagaaaagacagtacctgggtgacagtgtcgctccagccagaaattgcccacgccttttctcggacctcttttcgttcttgcatgtcctgtgtagatcgtaggcagaggagaagatgttgataattcacaaggaaagatagcgatcagtgagatggaacgaaacactgaacggtcctcgagcgatatgaaatgtgattagactcgccttgaactgccacatgtgatgaacgacatgaagtcttcctacttgagagaaccaagcgcccatcgggatctaatcgagcgccagacggatatctcagaaggtcacgaaaacgaccaagcttgtaaagtcgcaacgtcagccgaaacgaaggacgaaccacaaactttcgccgagcctcaattcctcgcttccaagcgccttcccactcgagcatcgttcccggcttcaattgatagcttctcaattcaaagattcctccttcggctttagcagacttctggtccatcgtcgggttatcatgcgccggggagaaggcaaactcctggaggagtgacgactgacgagaggccagtaaaggcagaagggcctgatgggcggtcgaagatgtcgacaacggcaggacatctgtcaaagagggatgtcggacaatatggtctgatcatatatcgataaatatcgtggcaaggcaccgaaacaacgaaggccaggactggatgaatacgactttctccgattgctagaaacgatcgaaatcggatctccgaggcaaaaaaaggacgtacagaaggtgtctaactctccaagaatacactcccagctacccatgagcaccgggcgaatggtagtcggttcggtcggacccggggtgagggtcttgaagtacgcttctgccaacttcttgtattcatcggttttgctcgggtgaactttatggactgtcaacagagaaatatcgggcaatcgtggaatggtttggcagcgtatccgacagtacccgagagaggaggatggtcaagcatggacacgactcagcatgaaaacttcaatctggacgatggcagattgcgcgagagacgagtacgaactgatgagttcatgatggttctttcctcttcctaccaactttgaatgctgcaacgtctttgcgtacacgccttcctggtcgtccggagctccatggagcagtgactgcattgtgagcacaatgcagtcagtttttccattggatccataccagagacgaacgtcagtcatgaattgctatgtgtgcagtgagacatagatgccgaagcaaaacgaggaacagaaaacatgacagaattgcgatcaagattacctgaacgaagccaggctttgaactttctcttgacacgaccgagtaggaaaacgacttggagagaccagtgagcgatctgttcaagagtgagctacgaatcattacttgttgtcggtatgaatgtgtaagtaaaagtgatgggatcgatgtgatgatggtagtgtgtgatggatgggaagcagacgagagtgagaccaagatctacggtccggctataccggtgaagtttgctggggctaaaattcattacaaattcgcattagagaaatatccgagaaagactacaaaaggatcaaaataagatagtattacgtaagcgtactatgacgacgccgtccctatcactttttatctacttctatatctggtcatcttctggcgaggacaaccaacaagctacagccatggtgccgtctcagtcggctggttcttctagcaggttagacgctcagaatattcttccggatccggagagccttactcccaaaaacgtatttatagattcggctcgtcattccctggaagacgaggataggagcgagaacgggcaggggagagacggaacagagtgtgagaacgatatttcagatttgactcgtaggcgcacacaacgtctccgacagtcgagcggttggtccaatctttttactatgaagtcagaggatataatgaacctgatacgcttgtcgtctcgaaacacagaaacgattcatgagaagaacccacaagccaagcctccttcgcagccctcaccgcctctcggcttcttcgatgtcaatacgctctccttctttataatattctccttgtttggaacactcgcccgactcggcttgaacgcgctctttagctatgacggccagtcggtgttccctcttctttgggcgcaaggagtgggctgctttatcatggggctcatattaggtcggaaagaggaaatcgaaaagtggggtggtagagagctttacgtcggcttgggaaccggtttgtctcaattttcgatccttcctttccctcactcactattgagaattgtgtttttctaagaccggaatcatcgttctctgttcatatccatgcaaacaatcaggtctttgcgggtcaattacgacattctcgagttggatgttacaaactttctccgcattcagtaatcaatcaggctatgatcgatcttgggttcacgacgtatgtctactcttttgcgaagggggaggaaactcgactttcttttcggtttcagagactaattgttcacaatcacatctacaatcacacaggccaccgacggcataacgcagacaattcagacctttgcgtttgcactgttttcccttcacctgggccgaaaattgtctcaccaagcacccttaccggacgtcttgctccaacctcgaccaaacccagggaaatctataacatcccgctcgatagtctttcttaccgctcttatcctgtacctcgctgtgctattcaccgtgatcttcacgccctcttcattccatcccggacgacgcgtgacgttctcgttattactcgctccaccgggatctattgtcagatggtggcttgctaggttgaacggaacggtgcctcgataccctttcttaggcaccctgagcgctaatttgatcgcgaccgggattctatcagcttcgtatctgctccaacgagtgcctggctcggtcagggtgaacgagattcagtgtcaagcgcttcagagcttggaggatggattctgcggttgtctgagcacggtttctacattcgctgttgagcttgatgcactggccagcaagacgaaaaataagaagccggatgaggaagggcggagggggatggaattcgcttacgggatcggaagttggggagcggggttagttgtagtggtgattgtgttcggcatcccttcctggactttgcccgatgggttgcagccggtgtgtcgatattgatcttcaattctctagactatcaatttctttaggcagtagactataatgccatcaatcaacatatgaagatgaacacacgatgtgtgttatgtatattctccagaatgtgttcgtcgacgatcgttactcaacgcgggaagaacgtctgactagccgctctaccatgtgggagaatagataagcatccgcgcgcccacgcggtctgatttgattaaccttctttctttctctacttgcagtccagcgctcgtcattgtagacgtcgttgagacgttgaaacggcatcgtgtgtgtgttttggatgatatacaacacagagacagcgcctgactgagagcatgagagaaataggaggaacacaaagagccacaagagatcttcaggaagaacatgaggcgagtgcttatctccaatcacatctagcgcgcaatccttcgtccacatgagatgatgacttattatagcatcatgtttgatacccgtagacacttccttttcactctgtatcatatggaggagcagatgtttagttcaagatggagtgagtgatacatggtctagtttacctgaaggaatggggccggtgaagcaagattcgaaacagtcgtcggagggggatacacgaggttccctccatctaatcgatcacgaggcgatgatgtgctgatagccggatctttatcttcgtctccgtcttcgtctttgtctgaagcttctgttgaccactcacatccatatagaaaaacataccttctcttacacccttccgtttactgacgaagcagagagaaatggctagtacttctaacaccgtccctcccgcatacagtgccgaccgtcccatcgctacagagagtccagctctcacccgaacggtatcaaaggcgacctcgacgtttgaggagtttaaagcaaataccaagcgagagccgttcgtcctcaagcgaagggtgcgtgccttgtattccctttgctctgttcttcaactcgttgcatagtgtgctcatgatagatcggataaatcaaccgactttatgcgtgtgcaatttatatatatatatgtgtgtgtatcactattagccaagggcctcggataacatgccaacagaatctgttctcgacttcaaaagagatgagtactttctccagagaccgatctatatcgcatcgtacgtcgcgggctggatggtcggttcgcctgaggttggtccaacactacttgccttcatggatatgcgatcagaatgaggctagacatcgtgatataatacctggaagatcggatattgatcacaatgagagtccttcccttcatgcctgtcggacagctaggaatccatgcgatcaaaaatgtcgagaaaggcgtccagaaagtcacaggggtatgttcgggtttgtatctggactttgcctttggcaaaacgttaacataattctctcttcaccttctcccgtgcctcattcgaccctcaacgtgtgatagatcgctccagatcccgtcggccggagacgacaagccaaggctgataagaaccgactggctgcgagagcagagcttgatgctctagaagaattcgccaacgaggatgctcaaagcgtccgcactcagcaaacagcagcgacaggtgcgacagaggtccgacctttgatgggtcagcattgaaggaaccagtctcaaacatttatgatggatagggttggatatgttcatcattccccaccttcctatcctgccattttcctctttgtatacctcgatccactgtagatatggagagcagcggatagtctgtcatctatcgttggaaaccgcacattctttcaattttagtcatcctacggcaatcctctgcaaccctctctttgtaatcacactcttttgaatgctcaatcatgtcgtcttcatcatctcctttctctttatctacctttccatcatgctgagcaacatgggtgttggccactctctgtcagtcaatgtcttcatctgatacacgactgagatcgaaattcgatcgaagtgaatggaaagtcgtccagttcgggcatgaccgttgttctgtatatatacaatacgaaccaagaggacccaaacgatctcgtcagtctgaagaacagacacgaccgaggaagaaaagagcagaacgcaagaaaagaaagacaacccaacaatcaaagggctgaggagaaaaacacatactgttcaggaccccaaacttttacacctctgacatgcgtatcttttccattcagatgatttcccaagatgacaacctggatcaagaaggcttctattggttctcctggatctgtctcgttcccttcagcgtcttcaagtactgcgtctcggagatccaacgtcatccatccgtctggcttttgaaattcaactattcgaatctatagaaatatttatgaacgtaagctcctggaggtcgtccaaatgctcaacgttgttgatccagagaaggaagacctacatcagtcaaatcatgaaatccagtaccggctcggatacacactttctgaggcgtatacgaatcgtcctttggatgggacaggtgtagcgagactttctgttcaccactcgcgcgagtcaaagggcgaatacgattcaatgagcgagggtggtctcataagaagatatgaggaaacatggcctgactagtatgggcacaaagtgcggaaattgaaggttgatatggtgtggttgtggtccttctgatctatgaataataaatagcccaacgccggacaatcaatcatcagcttgtgtcttgaccaggtcgaagctgagatcatgatcataacaccatacgaactgccagaaaacgttcggatcagggtctttgaggtctatcgcatgcaatcacaaccgacgagatataaaagtatcgagattcataatgtgattcaacaaagctgccattcccacatcaaagaaacgatacggactgtctacaccaaacccgaatttgtgagaggacaccgaccaggtcgcgagcttggagatatctcgagcatcttgtttggaggatcgacatccggttgtctataagcatctgtcatgatgtactacaaggaatcgacagcaaaagctcactctttggatgacctaccgtccagctcatgttccgcgcatggatcaagatggaggagaggacgcagctattgaaattattctttgatgtacattacaaaatatccgaatcattatcccgcttaacgccttcaaccctgcttacttcttccttctctccatcaacgatcaatcgagaccgatgccatttcaactcgttgctaccctttcgggtcacacagatagagcctggtccatcgcttggtctccctcggaaccaatccttgcgtcttgttccacagacaagaccgtcaggctgtatacttattctggcgagcccaatcagcttcaagttcgacctctgagctcaatctcgaccggtcaggatcatcatctcttcttctacctgttaagatgttctttcgttcggtatctaaactttcagacccttcattggccggttttttcttacaggacattcacgaacactgcgaaatattgcgttctctccctccggtcagtatcttgcgactgcctccttcgacgcaacggttggaatttgggaacgtcagcctgcttcccctagttcttcagcttccgactctgaccccgccagcgatcaaggtgaatgggagtgcgtgagcacactcgaaggccacgacagtgaatgcaaaagcgtaacctggagctccaccggcggtctcctcgccagctgcagtcgagataaaagcgtttgggtatgggaagttcagccggaggcagagtttgagtgtctatccgtcttgatggaacatactcaggatgtcaaggccgtactgttccacccgcatgaagagattctggcctcggcttcttacgatgatactatcttgctctacacggatgatcctcagtcggactggagtccgttccaaacgctcagaggtcatcagggaaccgtatggacgatggcttggagtccttgcggacgttggcttgctagcgctggcgaaggaggagagatcagaatctggaagcggacgtacgttctatcgtctttctctcttgctttctgtgctgctccggactgtgttccttaactataaactctcatcttgccttcagaggtcaaaccgcggaggcactattcaaaccagcgtttatcctacctgtatgtaactttctatcaggcgcatgaagttctacagcatttctgcatcagaattcaccgtacttgggcttacacccttgactttatatctccaaggacgtccactctcgaacaatctactctctttcctggacagatacgaactcgctttcccaaccttcatcggcatcgccatcgatagcaacggcatctgactcgacgaccgcaacaatacaagagaagacggacgagaggatattgttgggtaggttagcctcggccggtggagacggtaaaatatgtgtcttccaagctgttcgtctgtttgtttgtttgttttctgtcgctttgttaaatgcctttgtccgttccctgacttgctttcgtcttcattcaaaatggtggaaaccatagtctgtcgactcaaagacccaagattcattcgacttgacccttcaagcatgccaggaagacgcgcatggtgtatccgacgtgaacaccatcagttggtgtccccggaacctctctggtagcggtgatgagaaaaacacggggggttcggtattggccagtgcaggtgacgattggaatgtaaaggtctgggtggtttgaacttcctttttgatatcgtcaatgtagaaatgagaggatgaacgtcttcgttatattgaggtttcaatccgtttctcctcaaacttcaagaatcaagcaagatatcagaaaggtttttgaaaaatgaaaagggcgcatgaaaatccaacaacttcttcttcttctctcaagcatacataacacatatcacattcattgagttcgctcgtttgcttaggcgacgatctcctccttctcctcaatgacctcctcgatccactcctcaacaacctcatcctgctcctccttcttggtctctcctgccgatccctttccggtcgggtagactcccaatcgctccctctgatctcctaaagctttcctggcggcagtcaaccaggtgttccactcgtcgatcaatcggcgtctgtattggagaacctcggcagatccctgggtatcagcagcagcatcttcctcgtcgaacgttcgggagtattccttgagcgactttcggacctgcttctgctgatccttggggaggagcgtcggcggtcggggtcgccagaggaactgcttgaagtgatcgacattgtctcgcttgagctcctgtcccttgaaatcccagatggcgtatccagagtcggtctgtttcccaaaagagcaaggtggtaagcctctagtaattggtgtgaaagatcaagagcaaaggaaagaaacatacaccgggtcgccagctggtagcatgcgaagtcaagtatcgaccactgggatcccaagcgatatccgtcataccatagtgctccgtctgggaaagcaactgaacgtttgctccccattcaccctcggccttcttaccagccagctcgtcagtggtgaaatcgagatcccagaactcgatatcgcacttctgggaagactcgaaagtggcgagaacaacctgtcgtcctcgaggagaccagaagattcggttggaggtcttgccctcaagggtctctgttttatacaggtacaagcacgggtacatgaggataggtcagcattcaacccgagacataaaatacttcgataaggaagaaaaacttactgaacaatcggaaatctcccttcttggggtcaatctggtagaaagacacgttgtacttgatcgtgattcctggtccagggttggccaagttcgggtcgttgcaggtcacaataccgaatcgctcactcttgggctcccaagcgaaagcggtaacagggtctggatgtaaatgaatgtgcgaaagatatgttgagaaacttgaaaacttcgagaaaactttcaagtgggaaagcggacatggaaccggcgcgcacctttcaattcaagaacctcaacagggtagttcttctctcgcattcggaagatctccaagttgcagaacgtggactttccggacttagtatgacggtcgaccttgacgcaaaggaagtctccctgatcctgccagtgaagcttgcactgtttagtcgatgacacaaagacaaagagccccagattttagttatcaatgaaatcaagtacgtgtgaagagcaaagatggaggccgataacgtacgtcagacacattgaacaagttcttggttcgcaaaagtgttctgctggggaaaccgataagtgacactcgggcgggctggttcccaacctcgggagtccagtaagccaacacgttctccttctttccctttgctgccttcgctccagcagtctccttatccttctctccattggggcaccaagcgaaatcagcaacaccctcaatcttgatcgacttcttatccacgagctccatcaagggagcggcgtagatagagatctgggttccggtagtcaatcgagcgacgtaggcatcatcaggcgaccacttgagtgctggccatctgggtgctttgacctgaccggtcgacgaaggagcaaactctccagggaacgttcgaacgagtcgtccagtcttaatctcccagacagcgatgtggttgccctcgtcctcgtctcgagaaaacttgtcgggaccagtaggcgcaccttcaggaacagtgatgggataatcggcagtagagcaggtgatgagatagttttcgcaaggagagaaatcaatcagagcaacgtgagggtgagagtatcggttgaggttctggaacttttcacctccccaaagggccacaccgggtccgtgagtagaggcgaggaatgttccgagcggggaccaggaaaggaaataatctccccaatgctgtcaaggtataaatttgttttcagtaagtggtagaacgatattaaagggtactagatgatcaatgagaaaacgaatcttgtcggaactcacagcatccttgtaaggaatctcctcagcctgggcacctcgaccgttccagaaaacggcggcgctctgtccccgaagggtaacgtactggtctcggccagctgggtccgcgagccactttttcaaatgagcctgatgatcacaaaacgcaacaagttagcttgaacgtgataattcatttgaaacctattcaggacgacataccttgggcacgaaagccttctcctcgggctccacccactgagggtcaacgttggcgtatcgctcaacgtcggaaaacttgttgaacaagagcgtgctctttccgaacttgcactggtcgagaactcgagcggcgtaatcagcctcctgagcagaaggcatggtgaggaagaggaaactgcgaagtaggagtacgaggacgagttgtatgtgcaagatatgcgttagaatgagaataattccgggattaaaaaaaaagagaagaggagaaattgggcatcaacgacttaccctttggatgatccagcttcatcatcccaagggaagatgatctggtcctcagtcacattaacgttctgcttgttgaagagggcacagagtcgctccaagagctttcccttcttggactcgtcaacgactttagacacaatcaaacaagtaaaggattgagcttccttcttgattctcgaactggctcttccagcgagagtggcaagatggaaattgagaacatactggggacgttgtcaacgacaaggacatgctcaaatccctcgtccagctgaggcttgtatctaataggatagagaggtgaccgagaatgaagtaggcagaacaaatcgttcacgtcagtactccttgtgctttacgtgtttccatcgagttctcttagtcttgccaatcagaaagacaaaagcgtgaggcagaatggtcagaaacaagaaatctaaacacgaactggtcctcaatctcagtgtagtcgatctcgagatcatcgtcgaattcgtgatctggcacaggcatggtggctagatgaaggacaaagaaggtggagacgagaggaatgcttgtatgctgttcgagtgtcaggaaaaaagggcaaagagaaaaaaaacgagagttggtgaacagatcttgattacgtaagtctatatttattgactaagtgttcatttacattttcatttatttccaccatcttcaccttcttctacctaccattctttatatgcaacgagcagactgaccggttgttgatcagcaaggtttgtctatcagtagtttgcgctcagcagccgtcaattttagcgtgttgcgaacctcatgggtgactcttgggttgagataaacaatttggccgatacgggtcgtttgacgaacagctgttgtctcacaatgaatagttctttcatcgacaatcatgttctcgtcaactgaccaagttgtgtgcgctgaccccgaccgaaacgtcaatgagagatgatgcttatgtgcactctcaactaagtctaagtttatcttagtcatgtttgctgacttcaatgggatcaatcaatgaggcgttgagtcagaggtgtccgttggtcagatatatgctcaatgaatattcagttgtccgacaggtctggttcttgatgtacgtggtcacaacctgatgtgcgcattgtctcaacttatgtagattgatgctgcagaacaaacccatatcgaggatcgaagccactaggcagcgttatatcatgcagaacactagcaaatgagtgctggcatcaacatatgtagactcggtcgaaaagaggtctttagcagacagcaagcaagttgcctcgccttgattaagctcggcagttccttcgttccatcccgatcgctatactcaatctcaaagcttgctatcatcttcaagaataatgcgatcctcagctgtcgatacgatcgccttgaggttgtcccttgacccagctctgtcaagtgtttcactcttgcatcatcttgagtcgtttcaatcgtgtatatatgttaattctccttctacttgatgctcattcccaacagaataatctctatgtatcccattgatatgtgtctttccagaggttttgcttttggatcgaataaaaacgcaaagaagtaacaagaggcaattttgcatacaaattttgtcgatcggatttagattttacagaaacaaagtatttttttgttgatattgcgatggctggttatgcgaaactagattctttatcagtttaaaatgtattctcagtcgaatcttcaccggtgctcttcgctgtactagatcctccagaaacggctgcataaggacattcaaaggtagagacgaagtgtggttcatgtttagaatatacagttctcaaggattcgagagcagatagaaaggttgaaatttgatgaggacgacgaaccttcggtcaaacgatcgacgtactgagacccactcctacatggcgccagtgtatcattcgacatgatacggtaagaaacacagagtatcaggactcttctcaaatttcctccgggttccactagagattgatatcaaacaagacgaaccatttctgatgggtcaacacgtcacagcctatctcccgttccttctgctggatcaaattcacatatgcaagcattccttctgtgcggaatgcgctggcaagttcggctttgagattgcgtttgaaaagagaggaaaaatcagtcagttggtgatacgtctattcaagcgactccaggggaataatacatacaagtgacaacggcagaggcgtgcaatcctgccaaggatatgagctgaagaacgaatctacacattgatccggaagagcatcagatatcaaactctggtcatagagcgcgcatgataccagggtcaaacttacccttccttcgctaggtcccagacaaagctcttcaactcggactcgccaaacccatgtgcgctccaattaaaggaaggcgatagattgtagaccagcatcctttgcaagaacagatttgtccagtcgccttgtcagctttgtaactttacatccacatatgtgaacagctggatggttatggatgactaactttccgggatgaacctctcggatccgacgagcaaatgctttcgcctgagtcagatctggcttcttcgtttcgagccagagaagatcggcgtaaggagcgtagtgcagtgccctttgaatggcagcctaacgaatgaattcctaagagtcaaacaagttgcatatacaatatgtatacagataaattgggacaaatcaacgaacctctatacctcctttgaatcgatagaatccttcggcagttcgtaagctttcgcattcccaatgaacatcgtaccccaagacctgtctcgcgttcgccctcgcctgtgaatgacaaagacctagacctaatgattggtactcctcccatataagctcgggatcttccggaggagacaaggattcaatatgcgctttgacggctgaagacccatacccaaagacacaggtcgaaacaacgcaagcagaagacagcaatgtcagctcggtgatggatatgttatgggacgaacgggtaatagatgcaaagcaagaaactagccttcatcgaaggtcactaagcgattgctatcatcctgagcggcctctagaaaaactctctcaacattctccaactcatctgcctttgcccccttttcctttgctcggagaagatattccgcaagagaatgctctcttggttgagccgtaccaaggatgaaagggtggctattcccgcccgtaagacgagtgggttttgagtacagaaccaacaattggtacgctgaatatgctggttgaatcatgaggtaagcttactctctggcgtcgacgtcggacgaaatcagtcggctactttccgcgtcagttctagatatcagcctgatcgtagcatccaaaccaacactctgtgccatcagaatagcaattctgatctcgatgatctttttaaaattccatgtgcttacaatgtctctgcgcccataatatcccactggagcctggcggctgagagtctactgagatgctctccgacaggaacgacgatctttcctctgtaaatcgttcagtagacaacgatcaaggtgggattaatacgagttcaacacatctacattaaaggcgcttagaagcgcgactgagaaacatacgactgatgaccacattttttggctccattcatctggtcttcgaagtgaacggccgctgcgccctacagaaccatagaaaactgtgatcaagcaaccatagaatgtagacagctatgattcaaaaggctgtcagtcctacttacagattctgcaaaaagttttgccaatttcatgactgttgtcaccccgccgtgcctatgcggaatacttattaacacttcagattatactcataatcttggattcaagatgtaattctcaccctgcgtctccgtcggcgatgataggtctcaaataatctgtttgttccaactctgcacagagaaccgaaagggccgtcggcaacccacagggagttgtatattcaaccttaagagatcatttgatagtaaaaacagtgctaaaccttgaactgacctgccaatttcttgggatcagacgttgacacccgttcatcatagtgaattcggtcatgtaatgtctgggctcgacagagtcgttgaacttggttgggaacggttgtgtatggataatccctgatgatcgtatcgacgtgaacatcaacttcatcaaacctgtgttcgacatcatatattgtatctcttcaagacgataaagatcagatgaacttacgccaaatctggtcccaattcattgctacccgtggtcaatagggaagagcaagcccagccactgacatataccgcttctaatccagccctggccatctgggtaacctgtacaggatcgattgccccgatagtatgaaccggtttgccttcttgctcccgtctgctcaacagatcaaacaactttctcgagctctctagagagacaggtgggctaggtggaatagatccttgtttggaaatgacatcttctgcttggtacggcctttggagagtcttccaacgagatgtcgaccagcttgctgttagagattggcatctgcttgtgaagtcttgcttttccttcgcgaggaacgacgacgatgaccgagtgagtgggatagtcaacaacgacctaagtcgagtgttcagcataattttgatggtcttgtttgcatgtaccaagtgagatggagttgcttctttcaatcagatctcccatctctcctttatcgtccatgctttttacctgcctggctcatcgtctgtcgtcacgagaacataccggcccggaggtatccgatcaattacgtaacaagtgacttcggttactacccttcatagggaaataattctcgcttcaacgctttcgtctgaatccatagcatatcgttcgatcaatcaaacataaacagatatgtccagctctcctaatcctctacttgatattgaatctcccgaagctcgtcagatcagactaggtttgtcttcttgttatggtgtctctttcggggttcgtccttctatgcagatggacctgacttacggactgtgtttggatggctttatatcacctctcaagccaagctcctggcagacaacgcttcgcctcagttttcgacagagtcgagacctatcggaaaaccaccaaccacattttctgtcggacctcctaccgaacgtaagtatttgtgctcatttaaagaattagtataagacgtgcacgtcgatcaaagctcatacgtgctcctacaccgattacctatgtcgggccatcaagttctttcccgtcttcaggcgttcttacctcagatcgcgtcagcaaatgaggcgctcgcttctagagcacccgaggatgttgatattgaaaacgtcggtgaaggagaaagccaatacgtggagatggttcgtcttgcttctcacgaatacgaactcgacgtcgaactcacgttgatcgatattctattctgttcttctcggcatatctcgccaatttaatatcgaaaacaatctgaatgtgtctacaggatctaggactgggcgtgttcaatgccctgatggatggcaacactgacccttctcaatctgcgccgcctaatgcatctaataccgattcatcgtcttcggaagacgacgatgatgacgacgatagttcggattcatcagacgaggatgatgacagcgaggaaacggaagcatctgtcgaaccgatagcccctcggaaaaaagtgttaattgaagagatcctatcaaaagaatgattctcctatagtatttaaattgtttctatgattttagattgatcaagtacaaaagcgcgcgcatatgaaaaggaagatgaatataccaagtagattagctgaccaaagattacgagtcgatgctgaacaactgacatgtcgctttctcaaggtcatatctgtctggaataaccttgttgaatctcaatcgaatccagttgaaaaacacaactctctcccttcccttcctactcctacccatcctttcccgcgaacccagcccttgagctctttgccttccgccttcccactcatctctactctctctgtcttgattgtattgacgcgattgcttactgtagactctaggaataaatggtaggtgatccctcggatctccttaggtggtgctctcctgaatggagggaacgggtgatggtatggatacggcagatgtgtcggtgtgaacataaacttatttgaagatgaagacgacgcctgagtggacggacgactagggatggacttgagacttggattggtagagtgagaaagaagttgggtagtgaggactatgagaggaaagtatcgttgacggatagacgtcagttggagaaggacttgatacatcggttggttcttcagcgcgtcctcttcatcttccactctcgtcttctgcttttcagtcgtcgagttgtctttctccctctccgtctccttttccttcacgacagaatcctcgtcgtcctggtcagcatcgtgatcaccctcgtcaagtgaagaaattgccttccgttttttgctttgcctctccttcacctctgcatcccaaaccgctcgatctgcccaaaatgactctccaaacccatcgatcgccaccaaacctacttcttctgccccttctaattcatcttcaaccagggtttcgaagcttttgagagcaaacgcaagtccccacgtgccttggctctcactgatcgtgcataaccgcactcgcaatagacacatttttatcagatcatcagtctgatctcggagagctgaattgaggtcagatgaggagaacgaatggagaagggtggattggatatgagatcggagaagggaagacagccgggtaagtgaaaagggcgcggaagtgagtgagtagatcacggcggagagagaaggaccaccaaatttaatatggactggttctgttgtgccgcccggaggggatgatggagagcggaagaaaggatgtgagaagggaaggatgcgggagatcgtcaacttatagactagctcggtttttcctttttttaaaaaaaataataacgacggcacgatgcaaaaaatcagtcctcaggtcacctttgacagaccgtttagaaagatagatgatggacttaccacatccggaggggccttgaatctctatcatgtctccgttcctcaatcccctatcattttcgtccctttctcccggaagcacagcatctttgctttgttctgatggctcttgggtgtcccctgttgttaggttatacgtcttgattctttcttgttcctcaagaatgaccctatctaactgtttgatgcctgatcctgcaggtactgtgaaatgttggagacagcacgttgaacggatgtcaggtctctctggatgaatcaaactagcaatataatcggcacgaaagaatggttctttggagatgatttatgtatagattgtgacggcctgagccaatagaaagatgtatgacaggacgaacgagcttgatcacgtcgaacggcaaataccagatctctcaaattagaccgggtgatctgctggaggaatgctcttgtattttctaacgtcggacgagtctccattcctgagctactctacttgaagatagaggacaaacaaaagagttggttctttgtcgagtaggaatgaatgtgggaaacggttgggtagatgggtcgtgttaaccgatgcacgtcaagctgttacgtcacgtcgtcatcattctgtttcgcaacggcggtgtcatacgttcagtgtctctaatccatcagcaaagacacggtaacaatacggtaggaaggcaaaacacaaattatgaacgggctttctagggactctatggtttaattatacagaagagttttcggcagaaagaaacaaaaacaagaacaaaacgacaaatgctgctgccaacatcctggcgtttctataatgagagctataaatattctatatcaagacgacaaacatctcaaacgagctggttgtgcttcttcaagcactgagcgactcgcttgggatcactctgaggagcaagcttcaatccctgttgctcgccccagattcgaacgtctctggggaagtcagtgataagacctgttcgattgacagaatagaaagttagtgttgtagttctggatcctgttcaccaatattgacagaacggggacccaccatcgattccaagatcaataaggtacttgatcacgttcaatcggttcacagtccagggcttgacacctactccaagcccgtgggcagtgttgaccatgtcagccgtgacaaaggggatgtaaccggccattgagacatcgaccaccgggctaccgtaagccgttccgaccggggagataaagtcagcaccgatcgaggcggcagcctgagcgactcgggcattgggggtggagccgttgagcgagtcaatatcgattctg

SEQ ID NO: 1854 - DNA, 15561 bp, Xanthophyllomyces dendrorhous
gagtttgatgagaacgacgaaatttaaacaacgaccgctaggcgagatgaaaacatacccagccaaccagttcgagggtccctttccgtgggtggtgatgtttccggcggctccggaggcgaggtgggcgtagatggtggtatcatcacacttgtttcataaattattcaaaaacgaagaatcagaactgtatcctgtctgtagaaagagcgcgcgtggtagattgagacgaaacgaaatagaaatatactcacgagagcggaagtcctgaggtcaggaatgaccttcttggagatgatgagcgatcgccactaaaagaatgaccacagaacaattgagatgagtaagaacgtgattttgttttacaagtttttagtcgaaagaggatgacaacgtacgtcgaaagactggtgggtgatcctgtcgatcaaattccacttcttgtagagggtctcgtaggccgcgacgaaatcctcaggagctcgagtcaagtttcggaagtcaccatcgactttggactcgatgttgtagaggactgaggaagaaagtatcggtttatgtcgtacatggttagtcaacgaagacattttcatgaggaatcagagatcaaagtcaaatctaccaggctctgaggttgcgcacttgacgaactcgaaaagctcttccaaagtggagaccttggtacctgtaaagtggaagattgcgagattcgtgagctaaatagataaacggacattgatgcaagcgcaagtcaacgttgaatcgagacataccaggaacggtgatctgcaaagggaaatcatccagtcggagacttccacaatcgagagtcttgatctgtgccaaagtcaagtttgcgatatatttaccgacgtaggggtacatcggatcgttgtcgaacacgggctgggagtccttgcacttggtagcgacaaagttctcgtcgtgccagaccactggagtacgatagagaggcagacatgggtcagatccattgtgattgactgctacacagcagtgcgagagagaaagaaagtacgtaccgaggtgaccatcggcagtaagtccggtgtcgagttccaaagtggtaagtccgttaatcaatccatcggcaaatgagggcaaagtgttctcgatggtgtgcttgattaaggagatataacccgggttttaacatggcgcttcattcgggcatcaataggtgacgatggtacttactcctcgacctcctcgatgaccctgaagatcgaagtacgactcgtactcccatctgggtttgagggaagattttgaaggagcggcagccacaaagctagacgaagtagccaagagagcagcaaaggtcaaagcgctggccattctgtgagaaattcttgttgcttgttaggggagaggagggaggatgatggagtctatgaaggagattttgaggcaaaagaagcctgttcagatcctgagttttatactgtagtgaacggttaaactcatcacttcgagccaagaacaatgtcgcacgaggttggtaagcgtgaaagaagatcagcatgtgggtgagtatcacaaagaaaagaagaaaagaggtgattccgagtgagcagtcaacgaatgtcatccactgtaggacaagagtgccggagagacacgttgctgttgtagccggtttaatagaaacgtttgtcggcttttagaacgcttgacgttttcagttccctcctcagggagatctatcccacttaaccgttccgattatcctgtttgcacccgtcgtgtgtttctcccttttttctctggcgttcttttcttttcgcctttagcaccgttggtgatctatgggtatgaccgagaagcatcatgttggacgcaattgctcacaactggagtgaatgtgcaagagattaccgcgacatcgaatcgttgatcaatctctggatgctgagtgggtgagaattacacacagagcacatgcaggtatgcagggcttcaatcctgtcgttctcatccattgttgtgaggttagatcggatggtcagaacattgtgaagctctagcaaacgatgaactaattggccatattgtatagagaagagtagaaggtggctcgcttagcgatgccatttgaacaagaatcaagcaaagaacaaacgtttcagccaagaatacaatcctgagaacatccttttcattgtttccttacatgctcaccgtctgactgaccagtctaggacatccccctctcgacgacactgatgaaagcacccacaagaaagagcaaaagtgacgggcaggtagaccacatacggcggtatcagaagtggaactcgttagggttatgacgcgcctgtttgttcctccactcgtgagaccgatcttgttgtttcttcccctcccgcatacatacatcatctttcagtctgtatcttctacagttctcatacctagttatcgttcagaatgatccttccttctccgactggttcatccaaacgctcactagtgcaaaagaagactccatcgtcaacagtcgtagcagagcttccgatccaatcggtcttctccttccgtctccgaccaggctcttccatagctgtacgctctttccttccaattttttcctcttctcgcttcttctgatctttatacagggctcatgagctgaggctgatttatacaagaggaaaattgcatgatttctaacgtcaggaaaccgagatatacccggaaactgtcgacttggacaactttgatgggctgttccaactctcagagtatctcgaagccagagttcgaagaggggatccagcgagagacctagtggttgaaccctgctcagaaccgaccgagccaggggatgatgcagtatcagcagataaagatatggtacgctactctttcacctctcttccatcgagcttcttttccctagggatgctaatccttgcttgtttgacgcgacacagtggctatacgtacacatcttgtaagccttccttgtacatcagtcagggcatcactagttcgctcgtctcatcagataatcccatggctttgttgataaaacaacccgatagacgtctcccaaaagacctcacaacgctcgtaacatctcttctcgagacgtgtcgatccgactcgtgcccgcagatgaaagctggtgaatggcagtatatgtgcgccgcccattcctccgccaaggtaaatgatggggttttatctaggcctcaggcatcttttgtgaagagaggagaatgctgaccctgaatactgtgtaatcacaccatcctttgcttatccagagttgtgctgcaactagttacatgacgcacaccttggatcaagcctgtcaattattgacatcaccaaaactctttccttctaggtgaggtggttctttatgccgtccgtcaaatagtgcaaactgacaacaatacctccttttcattctgccatgtaccaacatgctcagattatctattcctcaaacctctctaaacccacttcgccaaacggccagaaggctaagccggatcttcagtcacgcctatcaccatcatcgagaagtgtttgaatatgcggaagcagaaacaagtctttacgagcggttcatattactctcagagaggtacaatcttgtccctcggacggatctcgccattccttctgatcgcttcctctcctctcgcaacctaccctcgacttcttcctccctgtcttctccgtcaaactccttgggagagtcatcctataagacgagccaatccgcacatagctccaagaccagaggagtaagtgggcagatctcgacagacaggatgggccaatttaaccaagactctcgaggtagcgacaatgacgatgatgacgaaaatgtgttttcgaggggccccagatcacttgaacgcgacagatcaaccacgggaggaagaggcagggcgcccagagggaagatcatcgacttcgaaattggcagaggaacaggatcagagtcagagtcagagtcagatgaggacgatactgaagaggatcggcgagaggaagacgttctggatggtgagaagctacgggcgtcgatcggcttggagaatcaattgtcgattccgagcaaactatccgtacccgcatcatcaccaatgccatcatcttcgccatcaaagccgatatctacacataagccaaggcgtatcaagccaaaatcgacaaaattaccaacagctagatcaacaatatgaacaagaagcctgtcctggaaaacggaggggggagggagcaagaggaaatccgagagagttaagaaacgaaccaatactatcagaggacggtcaagagtgcaagtgcataccttaccttctggaagatggacgagagggacagtctcatgccttggctgctccggcaccgtgaacttcaccactgagaacggcgaggatgaagatggtgtaggattgagatcgttgattgtttctgtgtcagctcggaaacagtctgcgccatcctcttgggctctgttttgttctgtccatttgtctgtctgtctgtctgtcgaatgatgaggactaaatagaagccttctctcgacaatcgagctatagatgatataacgtgcagtatcagggaatacatgggcgtggctctccccagacactttgtttcagtagctcaaaattagaatgagaagattcgtcttctaagaagatacatgttgcatattcgtatttatttcactcttcttccatttcctcttcgtcttcatcttcctcctcttcttccccctcctcctcttcctcctcctcttcctcctcctcttcctcctcctcttcctcctcctcttcctcctcctcttcctcctcctcttcctctagctcatcttcactttcgctctcagtctcactatcgacaacctctccctctccacctcccgagctcaacctaacaccctcagccatcgtcaaacatgtcaatcttgttccgttagtgtcgtacttgcccacaggcagaatggtgggtacgtccgacccgtttgatgtaggaacgttgggaagattgcttaagttatagaggttgatgaaaccgtcggatgagacagtcgaaaggagcggatatagcacagcaagggatttgacactatgaagacaataggaagtagaggacaagcgcgcaatcaattgagaagcatcagaggtcagtgggtttcccatccaaagaagtggttgtactgctagagaagacacataccgattcgtgtgcccacccaacctggcgacctccttccattggtcctctacatcctcctcctcctcttcatccttagcagcttctaattgcttggattccttgctctcaaacttctcatacaccctgacgtaaccttgttccacagcagcaaccaaaagctccctcgtcttttctccctgcttgacgtccaagaactggaaatcatggaaccttttcgggttctctatcgtctggaccaacttcatctctttggtgtacacatccaacgtggagacagaaaggatggcaaactggtcaccggagggagcgaacctgacgatctcgccctccttcccgatcttgacacctcctccaggtttgcccttcatcagatcccacattcgaagaactcgatcctttccaacagttagtgcgagttttcccgaaggatgaaccgtcactgagttgacccgaccgacatgacccttgaacgaacggagcagggtccagtctcgagttcggaacaaagaaagcgtcgagtcttcagaggtagtgagaaggtgggatcgggatgggaagtagagcgaagtgatggtccctgaagatttaaaagatccaatgtggacatagataaaatgacagagcgatcttagtattagcaacaaagaaaaaaaaaggagaaaaagggacgaagcggctgcagtaaagattcggacgaaccattgtgattcatgagtccaccgacttcttttctccttcgaagatcccaaatcttgaccatctcatctgaactacctgtcgccaaccactttcctccctcggaagctgccactgtcttgacgcaagcctgatgagccgggaagataaagaccggcttcatagtgtagtcatgctccgcctgctgctctccttccgccgtcggttccggaaggagaccagacaaaccgtacaaaagtttctcgtatgaaccagcgacaatctggaacgttcgaggaccggtaggaagaggtgctttcggtttcttgaccttgggagcagtcgtctttgcgctctctgtcggttcctcatcgtcgtcctgagcaatctcggactcatcagcaaagggcgatttgtacggaatgtccttcgcgaacgttagcttcttctcgctcttcttgggcttggtaaccgacgaaggagcagcagacttcggcttaaccggttgagaagccttcttgggtccactcgatccaaactttccactcttcttgagagacgaagccgagtcttcgtattcgacctcgacacgagccttcttcacggcaggttgcttgttcttcttgggccagtaaccctctggtttcgattttggtccaccttttggtttaggcttcgaggacgaggatgtgctgacaggggctttacgtttaggagccatggtttaagatctgaatgaaaagagttttgagtgtaggcgagaggtataggtcgaattcaacttgaagtgagaagcttgacgattcaaatttcggtgattacataatcccggttaacatcaatcttggttacataatcaaccccgtgcgatagacacacagcggcttcaagcgactttcttcctctaacgatgtctaccaagatacattctgcaaacctatgggcagacattcaggcatcttcatccggttagtagtgatgaggtcgctgtatatctgtatttctgttagagaggctgagcttgtgtcgtgtcttgattggtaaagaaatctctcagttgcttgcgccctcaacgttatcgactgatgacatacagactattcagtttaaacttgcctcattgaagcggactattgtggttgcttcggattacatacctaagtatgatcaacgtaatgctgaagctgtcagtattctctcacttcggcgtcttcaattcagtagtggcatctgaagcagaatctttggactttttctcaaaagaaaataaaagagttggaaaccgagtttgaatctaaacgaacggcttcggctccaaaatcgaagttttcattcaagaaacagcccaaaccgatgaggtccactggtttagtctcggatgtgtctaggccaactgagtccgttgagacgccgctgtcagcaatctcgataccaagcacagatgtttccattcaccgtctgacgtctcaatacataacgcttcccactatctcggccgatggattcggtctctccctcttcgatctgacccgatgtgttatcgatttgtttccttcaaacgagcgctcttcaaccaatccgagcaagatcaccgccttgcatataaagaacctcaagcaatgtgttcttattgctcccatattggaaggaagcataatgatcagcgattgtgcacaatgcgtactcatcctaggtggctggcaggtacgttttgatacatcagccctaaccacaatcgagacctccaggaggctatctgggaggggatttctcccgaactctaagttgacgttcgcttattctcactctatatcaaaatcatgcatccattcgatcgatcgtctagttccgaatgcatacttcgagtgattgcaaggtgtttatacattctgctcccggaagctcaacgcctatcattgaaggttgtcgctcgatccgctttgggtcctatctgatcaacgatcgtgaccctctgggctcccaggtttgtccttagatcattcttcctggttgtaccctcggtatgttcgttgaactgatatgttcacattgaactacgatgtctgtaattcaacgtttctgttcctcctaaatcagcaatctctcaaagttctcgacttttcccatccaaatccgactgtgccgtctccgaactggtcgatactgtctgtcgaggaagagcgcgcgatacaggttcgattgccagccctgttggaaggcagatcccgaatgaccatagaaacaaacttgacagagtctatactagattccgtactgtcgacataatttcagactttgtatacactagattcaatgaaatgtatgctctatgcatgtgaaacacaacacagcgacaaaactgattgatggcgtgaacacgatagtcaacgcttcacttttttatcgttcatctcatcttttgtcaacatctccacttcagctcacccatagaaaaaccatctcatgctgcagagaggcaactgattacaagcactaaccaaggcgcacataacagtgaggttcggaaggatacactgactgtcttgtaagacctcatgctggaactgacgaggttagagttatgcccgattatgggtccacagatctcatttctaattctgatcaccaccctcccttctctgttatgctccctgtatcaataatgtacgtcttgttcttggaaaagtcttctttataaagcggactgactctgttcttattgtctttcaaatgctaccgtcatgaaacatagtgggataggttctctcgggactttcttcacttctcaattacggttgatacatccggatctcccaatcaaccttctgctcaaatcttcaacggcattgcaaacatttcatgaaccgtctgcttctcggcctgcttcatcacttctcgtcagagatctggtagggtcacctccgatcatcacctcatccttttccgctacctccttacatccgtcctcgccttcatccatcacatcagcagaagacgcgcctccgatacctattcttctttcaaccctaaaatgcacaaaaatcgtaccgaccctcaaacttctcgcccctcggcttcgttctccgtcttcaaccattgtgctccttcataatgggatgggaatctacgaaacactcatcagggatgtctttcctgacagaagttctcaaccgagtttcatcatcggcaccacttcggtcggggtgagactcgatgaaccttttggggttacactctccggtctcggccagtcaacgtttgctctcgttccctccgagaactctactccacgttcgacttcaacgcaaaagattggacaagaacatgaacaagacggagacctatcaaggatgccttcttcaagcgagcaagcactgaaatacttgtccagtctgacgactcatccgaatacccatcctgtcgaactcacctcgtaccctacgctgctccctcagttgttactcaaattatgtatgaatgccttgatcaaccccttgactgcccttcattcggttctcaacggtcaactcatcaccgacccttccttccttcctctccttcgagagttgatatccgagaattcaaaggtgttgaccaaagctcatcccgcttatgcggctttgttcaccgaggaagagctgacgagacgtatgtgggatctttgtgagcgaacgaaacgcaatcggagttcgatgggtcaggatatagaccgcaagagggaaacagagatagagttcatcaacggctacatatcgatgttgggaaggaccgtagatgtgaagacaccggtgaacgataggttggtcaaggaggtcttggagttgagtgaacgttcgaaaagagaacaagatatgaaatgatccttttgtggttcctttccatacaagtgaacaaccggtgttttctttgttcatcaaaagacgggcaaagtcgagatgacattgtgctttgggattctatcatatctcgagaaagactgtgtccatgatgtgcacagacgggcggataacgagaaggagcaacgcaaaaagtccttgtatggggagaaaagaaggagcaaagagggagaatatctgaggcttcccataaaaaacgagcgaataagaagaaaagatggcgcgagcaacttttgattgtttgtgatagtagtacaacgagcaacgaggggacgtatatgtatttttgtggatgcataggatgcgcgtgtaaagtcaggcgatagtttgcaaatggtccgtcgagaaaacaagtaagaaaagaagagggccgggagagtaaaagacagaaaagagacacagaacaaaacgagagcagaacgcttttcaggcgagcatcaaaccgcttccagccatgacggcaacagcaacagcaacgatcagaggcatcatctcacttttgaattggggacctgccccgctcaaagacgatgatgtagaagttgtagaagctgtcgatttcgtgcttgttgaagtcgagccatcaccgccagtatagtttgcgactgtatttgtcggtgcagatacatcgttcaattcggcggcaacgttgaacggtgcgaggcctgcagcatcgtagaagtcgaggaggatgaaactgtgtgggagcaatagatcatcacaaagaggaggaggaggtcagttgctgacgatcgtttgctctagatataggtctgaaagacaaacttggggctgcgggcgtaaatctggaaacagttagaggcgccctgtccaacactgccagttccggtctcagcattggtctggttcaacttggatttgttaggagtcacgatggaggttgaagatccaacctgacgaccaacaccacggtgatacagatgggagagtgagtgaactcaatagtcagccactgatgtcacaagatcaacttgtataaggaaaacacccacctggtcgagatagtggttagtcaacaccagttgattctccggcgtcccggttgatcggtttgccgtgcacgggaaagagtcttccaccgcgttataggcatctggaataccaacaagtttagtcattgctagccttcacacaaagacagggttggaaagagaaacaacagaccttcaaccacattggaaaattctacgagttgatcagacatcagaaaaggtattcaagttagatgtatgttcgccaatatctgttgatcgacgtgaaacagaaaatgatcttaccgtcgatgatatacggcacagtagtgaaatccgcagagctgtagaaatagagagcaaaacagggctgtcatgagaatgcgggattctaccgacgtacgtacgcggactcttctgtagccaaacccagcgttagctcggatgagagaatgataacttacttgtccatgaacgtgacgactctgaggccagagtcaatcatcgagcccaacgtgggccagtctgcgacagaggttgttgctttcgttggcgcatacgagactttgtctaaacctgacgtctatcaacgacagacgggatatggatcgacagagacagaatgacaagagaccgttcagggatatatggatgaggacgattgagaggatcagcaaacattgatcgctcggttacttagtacgcgtcaagacaagaagatcgagagaatcgaaagagcggacctcgaaaacggcaccgtacatagaggcgttcaagttgtcgctgttgacaatcaagatggacagaacctcatttgggtttgcgacaacccaggtgttgacttctgtcaggtaatctgaaaagagtcctccgtccagaagcaagcacgacctgggagatcaagaagcccgacaaagaatgagaataaacttagtctggagaatagtcaatcagacacgacggctgactcacgtatgacatagatgaatcgatccatcatagctatgggcttgcacctgaagcattctcactccgtcattctgcgcagcacacgatattcatgattgaacgtaggttagtttcttgacaaaagcggagtcctattcagaaagacccggggagagagggtacgaggaatctcaagagtgctcaggacgtacgagttgtgtcgtgatgttttgatcctgtgaggatcaagtccgtatgcgtttcacagatcgtttacatcagccacaaacatttcaactccttacataaaagctggaatgtagaggtaggaagtcgaccaacctgattcgcagccacctgggttgcgctgatcgcatctgtgagattcgattttagatgagatttgacaaccataaccaaaaaaaaataaaaatatcatgagagcccgtcagtccgtcaattgacctcatgaaacacttattgcacatgagtgacatcggaggcaagacatggacgtacaagaatcgtgactcccgatgaacgtaacatttccgtagcttcgatcgcatagctcagcatgcccgttgcagactgaatatgcattaatgtcgaaccaacacattggtttgaagatttcacaaacggaagaggcggtgtaaacaatgctcgatcccaaatgagattacaaaagtgaagaggaaaagaacaaaccggaggccctaggtttgtaggacgaagcactaacaagtccgctattcaacgtcgaagcaaccagagcaaaaggtagcatggagagagcggaggagatggtaacgatcatccttgttgaacaagaaaacaaagatagaccgaaaggatggagtgaagagttgggtggtggtaggtaggtgttgaccaagccagaagtagatccagccagatcaacaccaagcacacttggaaaacacaagctcgccgcagttactgggcgttcacaacattctcttacacatacaaccgccttcttattttggtgttctatttcaagtacagacgttcaaagagatcacttctttttctcttttctttcttctttgaattttattttgatacagagatcgttttagtttgagagaatattgtcacatgtattctaattcgatcatcatgcttattttcgaatcaacccattgactcggtagatgactgcttctgccaagtcccagtagccttctccgacgcctctgaaaccttcgagaccaagaacatccgtcccgtgccagagtgtatgatgagcaaagccaaaggtgatccctaggccgacaccggctatcacctgaggagccgtgtgatgacctagtcttatccgagaccaacagatgagagttccaagtgcgagtacgctgatgctctgaagaggagcgatctgagctgtagtcaagacgatgtatgttgcgaagtctaggaacacgagaccagcggtgtcagcatactttaggtttcagtgaagggttaacttggaaagaggactttgagggctcgacatacaagagatggtggtgctgtgagtggagggcatcccatatgtcgggatcccagcgattgatttaggaacattcttgtataatacctggttcgaccgcgagggcctatggccatccggccgggactgcctgaagagatgtttcattatctttgctggcgaagcagttgttaagtcgaaaggtgctcagccagcttgatctgaagttggtctttctgcctctgaacgacaagcgatagtaatccactcacctgctgcagaagcggcgatggctcctccgatgaaccatatcttctcggccgaaggagaacgtatgaaccaagctgccgtggcggaagtcacgatgatgtttgtctacaacgtttccatccaagtgtcacagttgaataagaggtacccatcagctctggagaactcggttgcttgtcaagactctcgatgcttacctcatctagcacccaaagtgtcaattgaccgagtttagaatccatcttgaagacaaaaccccaaaggtcagtggatcaaacgagttcaagcagggctgggtggtttataatagaatgtttgtgccgactgtgccgtcgatcgatgtcagtcgggatcaacgatacggcgagtggctgggatggaaatatatttgggtggataaacatcttcggcggagtcgacaatcatggaatcaacattggtgcgatcaacatctccacggcctatgcagttatcgtcttatgaagaagatcttatctcgattagatagatcagagcatgtttatcaatcttactagatatatcgccatcgagtttacccccatcgtttttcctttgtttcacactttgttatctctttcctcgaaaacccgcctcttgttccatgtctcgataaacgtgatgccccgtctttaccattctctactacatacaacttaaatgcgagaagaacaggaccgagggatgatggaattgataaataaacatggtcggatttaatgaagacaaacaaggacagcgttcgagccgggcaggacgagtgtctatttggaagatccagaaagaaacaagctgatcgacgacgtttgccagccggcaagtccggacggggaccgaaggatgataaacttctcatctgaattgatcgttcgtttcctttttttaattctctctgcttctcttcctcttccaagaccagtccggtgtgtctagtaaacggaactaaagagagctggaatgatttgaaactcattctgctttcttgtctatcccagcatgatcgcgagggagtatcaccgggtccagattgactcggtgagcggtttatgccaattatacccaaggtatctttctcttatcaactatctctcatgagaaagacgcgataagtctgataaactgaaggaaaggaagtgagcacaatggaaagatagacgagatagcggaactcaggaaagtatagcaaatccaggaaagtatagcgcacccaatggaaacagaaccgtgatagatctgtcgttcttgaacaagagcagcatcaactcacatggaaaactcgacatcatgcaggggcggcagcagaagaagaaggagctatcggacagaactcgacgcatcgtgctaaggacattctagactttccagacatctgtttacctccgaacgtgtttcgatgccgtctgttctcatgcacatgagcgagtcgtggatggcttgtatctggtgggatgagcgatgccggtttgccctctcctccaaaatcatgggccgcctcgtaagaagcaagaatgaagggagaacatgactacattcacaacgtatacattcaatcctgtgatcttctgttctgttgctgatcagagagatcctctcggattctggcctcgtgcggttatatattctttccttcttcgtctccttcctttgccgcctttttcttcactggcttcatatataaatcacatctcgacgccacggcagccactcggatggcccgtcgcccggcaaatgaaggtagaaaggttgatcgacccacaggcattcctatcacccttcttagtccttcttcttgctctgtcttcttctccatcttccaatgcaccaggtgatgagacaatttcggcatctgagcgatttcccttacccacctgctaatcaaccgtcgactctctgcctgtctccagccttcttcccatcttggtcagacacagtcttgtcctctcgaatttgcattgttttcttgccttttgccttatttattagatccttcttgattttcagccctttccaaaaacaaaaaaaaaggtcgaac

SEQ ID NO: 1855 - DNA, 3867 bp, Xanthophyllomyces dendrorhous
ttttttttttttttttgcctcttttgcctctttagtccttttcttctgcttcttctgcttcgcttccttgtgcacattatttatctcatgtcacctcagccgtatgtatatattaatgggtctgaaacgagttctactggagtgcataagcttgactgatgctcatcattcgtggcgtccagtcgtatgtttacatcaccccaccggcgttgactgacctcgtccgtcctggacatagaaggtgagaaccaggaaagccacattgatagagataccccctccatccaatacccgatcgagggaacggttgcaagaacttttttccttctataaagatcaaactatccatttcgacctcgtacaccgttgttcttctcgcttgcaccctgccttctcccttctcgctcctccttctcttggtcccttcatcattccctctacgctttctctcgttgcccgtctcccgtttcctctttttcttcttaaaagtcttcgatcatttctgttctgcttcgcacatcgatccagagagttaaaggtgtgatgatcaaattgctttagccgttttgttttcctatcttttttttgttcgagacaatcaatcattaacaaatagcgcgtatttcatccgtccaacgtcatctctatccgttgtcgccggcatcttcagcaccatcgtcattaagaacagactttcgaagagagattttccgcttccgggtcttgcctcgatccttgccgctcatctggtgtccattctcttaccgcttgcacgaatattaattgtcacaactattttccgacggccttgacgcctgtcatcgaaacgcgggaagcctatcaatagttctcacataccggtcttggctcattcggtctctcggcttcatccacaacatcgccggtacgtccggatcgcatacttctctccggaaaaccttctttccgagtttcctttgcgatctacctatagtctacttcttggtgttccatatgttcattttgaatcattcctccttcgcgctcctcaatgttgctctttcttggcccatatagaggaaaagatctcgtgctgactagactgcattactctgatcttcatcattatcaaaccttgtcaaccttccggcctaactcacgactctatttcccgctggctctcccgttgtcaatgtcgatgtcgatttcattgtcattatcggtgtcgtcgtcgttgttcgaattctctaccctggattctcgcgctcaaacccacacccgtcattcgactttcctgcaaacagccccccccttttgccaaccctgcgcttttcttaatctctgatacgagctattttttctccacggcagacagccgtctgtctcccctcacagactcggcgctcctgcatccttatttctttcttgtttcggcccagcttttcgacagtctgctttacgttcgaccatcccatcccgctatcaagcgaatatcctgtatatataaaggctactccggccgacagtatttctcttagttaaccggtttcttcttgttcatattccactccagtctttcttctctcctcttctgtcatcccactttctctcggtttctatccgtcatcgttcggcgcttcggttaatctctcatccgccgatccctaacaaagcttcgagacttaccttcattccgtcacaatgggaaaccaagtttacaacgctgccggttcagccgacttactcggactcacgatcgataacggaaggttcgttcgagtgcctttttttttctttctcttttcttatttgttctttccttcggaaaacaattctgtttgatatctcttacttcatactcacgtttatgccattcatctgttcgtcctacatgtgctgttctgtctgagaatagattggagtttgtgtcgatcctcggatctggagcgtatggctgtgtctatctagccaggaataacggtgactctggcgcagaatactatggtacataatttgaatctttacatcatttaatctcgaacgccgcgatgtccgagacgtgtgctgactctgcgcgtcatgggggacagccgtcaaatgtatgaacactgccggactggacgacagacgacttgaggtagattcctgtgccccttccgttaggtgtactcgccatgactgaccatcttcctctttctgttccgttcatagtatcagcaccgagagatccattaccactctattctctctgcccatccttccatccttcatctgtacaaagcgatatattctcccacccacattttcctcgttttaccgtactgcaactcgttggatctgtttgctcagataacatcgaacaagacgtatctcacccggaatgaactcatcggaagcacattcattcaactgttggacgctgtggagtcttgccatacgaatggaatcgcccatcgggacctgaaaccggaaaatgtcctttgcaccgagggtggtcggaagatccacctcgcagatttcggattggccacgagggatgcttggagtagtgactttggttgcggcagctctttctacatggcacctggtcagtcctcactccttgattgcctcagtcttttgcaacacatgtctaaccaacattccggttgttcatttcctcccctttatttggattcacctcttccttttctcgcgatcagaggttcaactagtgaactatgaaccaacattttcacccacctacgatccttttgctgcagacatctggtcgctgggaatcatcttgatcaacctggtcacctctcgaaatccctggtcctcgtctgtactcaccgacgattccttcgccgcctacgtccgcaacccggaagtttttttccaatcgatgcttcctatctcggaccaggcgagcaggctcttgaagagagtactgtctgtagacccaagaaaacgaccgacggtgatccagctaaagagttgggttcggttcgtcgataggtgggatatggatgaggaggagttgagtagagcaaaggatgcttgtttcaggaccgctagagaaattggtttcatcaaagatcccaacatgatggagagaattgtcaaggctcgaaaccaacggttcgtagaatctctaaactccgtatcgaacgtcagtgatctcgagactgatatagcttttcacttcttttcactgttaggtcggcaagaagcgcaaaagcattctctcaaccgctcacaccacctgcagagccgcaattcgaactacaacagcacgctcaggtgcctcccaacttggcaactcgttcgaccgtatgcgctgtacctgtcaacacccttcaactgttcaacctcgaatctgcagccggggactcgcacgatgcactcgcgtgctcgactccatcgatggacgcctcaatcgtcacccactcctctttcggctctccctcatctgccgtctcctctcagttcattcaaggtcaccttccgacatggcccgattcagccttttcccgcaccgatatggttgtctctcgatcgactctctcatcgtggtcgacgacagattcagagccggaaacgccctctcgagaaacatcactcgatctcctcccagaagtctgctccgctggtagtcaggaagcccagttgactggacttgagcatcagaaaccagattacagggcatggttgacaggtgtgaccttagagaaggtcaatctgatcagctgagatgcgctctttttatctttgtagtaaaaaccccatcctttggctaggcctcccatcccattcctccgatttccttgcaatccttggtaacggtcttttcccttctccgactacctctacccatatgactctttttcctccattctttatata

SEQ ID NO: 1856 - DNA, 3433 bp, Xanthophyllomyces dendrorhous
atatatatatatatatatatatctcatttgatccttaatcataccaactgacatagaacaatcagatcgaaaccgatctccactcaacattgtatatatcattctctacatttcccacatcatgtccattatgtttgtcctctcttattacatctgactcggtttgtttattcattcttttggttctttttgtaccacccttttgggtgtcccgttctctagggccttttctttttcttgtgtgtcttcggtatttcacgtatatatatacaaacaccttcctcatcgtgatgtgaggacacccgggctttatctttcttgtctttccattcttgttcaatctcttcaccttcctgtatcatgataacaaataactgtatctgtccctgcttggtctttctctttgcaggacaactgtttctgagtcgttgaagatccaagtctgagcgctgaaaaaaaaaacgccgtcttgagacagaagaggaaacgaaagaacattcccaaaaacgagggaatagacatgggtatatcgttgcaaatgcaatacacaagaagaaagaaagaaagaaaaaattctgaatgagggtgtttagaaaagaaaaacgaagttggggcgaaactcgatagacagaaaaataaggaaggggttcaagtgggtgatagttgactctcgatgcccgatcggtaggctagacttgaaggaggagagtgcgcgcgtatgtatctgagaattcagagcaaaacatgaggtgacagaatacatgggcattttgttagacgatgagttcggaaggaaaaataacgatcatagtaggaactaaccgatgaagatcttcctcatccatatcatcctcggtatcgtaatgagataaaccagaaggtgatctcctcacgcctaccggttggtcgtcctgcgcatcgagtaagatcctaactttctcttgcaactgttcgttctccagtttgagatctctcacatccaactgtagcctctttacgtcctgtatgcccgccgaaagctgttgcagtcgatcgacttctgtacttaacgagttaatccgctcgtttgcttgatcaagttctagagtataggcgtctttgagcttctcatgttctaatttgagcgtcttgttgtccgaagaaagcatctggttctcaagggagactctactgagagccgtcaattgacgttgagcgtctgctagcttgagtcggagggaatcagcagtggtgtcatcaacgacgggtgtgtttcgaccgttggcatcccgagttcgagatccagcttctgaagaatttgttcctcggatggcatccagttcggtttgaagactgagattagccgtcttatgtttggtcacatcttctttcattcgacgaagcatcttctcagtagctctgttcccaccaacagatcagacacaatgttagtaaacaatcgatagaatgactacagataaagaaagatcaggtcactgacttgacgtaatggacggccgtctgataatcagcttggatctgtttatgactagccacactctctgccacttgtttctcagctgcctccgctctctcttccaactgccgaatctgttccgccgaaggcgccggctcgacagatttgccttcgttgctctcttccgcctcgagttctctggcccccgaaagaatttccgtcttctgagttgttggcgatatggctttctccaattttttcttggcgagatccagctcccgttcagcggcttccaaagccgacgttttctccgatagtttcgccatcagctcatccattgaattggttgccggcaccgatgtcgatgaagtcgaactagggccatcgtctgtataggggcggagttcatcctcgctcaaagcgactccatggttggacaggacacgccgaaggacagacaatcgtaattccagctcggaaaccatcgctgattgatctttcagttcgaattctctggctgtcacagaatccctgagtttagccgactcggcctgggaagaagcgagtgcggttcgaacttgatggagggttgattgtattgaaatatgctcgttttcaagtcgttgagacctctttcggtgatcggacaacattgattgagattcatcaactcttgtacctgcttcaccgagcatcgtcctcagggacgaggcctgttgttccagagcagcgattttctcgtcatgtcccctggtgaaccgaccttcatcttctttcaaccctcgatgaagttgaacgagttccgctaacccaacagaagcgaacgttcggagtgattcggtctctgctcgagatttagaccaagaagtctcaacctctatcaacctggcgaccgccatctcagcctctcgtgccctggcctctaactctgatttagcatccgctaatctactttccaacatatcgttcctatcccgttcggattgatacatcgattggacttcatccgaccttgtcccagagaccgccaacgcctgttgaagctgttcgagagcctgcatgtggctgtctgtagaagtggtcttctcttccaacgaagatttggcgagatctctatcagtctcatgtcggacgacctgtgtctccaaagaaaccaatcgatccacatgatccctcaatgaccgctctgttgacgtgtgtttatcctgcaatgccatcaactcgtctgacgctagagtatgaacagacgtaaggtcgtcgattcgctgaagagcttgttgttctcgttcttcagctgccgagcggagttgcttttcgtttgcgtgggtttcttggagattggtcaattgacgttgaatggccgagtagttgctcgagatcgagcttaactgtttctcgagttcgatagatcgatctcgttcaatcttagctacttcggtgggagagccgtgctcgagagcttcaactttcgctcgatagaaggcagcttcttcgatggctgcttgtcggactcgatccacctcagagaatcgcgaggaagattgttggatttggatagctagctcggcctgtgttccagaatcatcgacagagcagacatgatagagaagacgtcaggaatctggaatctcaactaagaaccaagaaggaatggaagaaagagatcaaggagcgacgacacacctgtaatagggcccgatccttcttcatcttcagtagcccctcaaccaacctccttaactcgctcccctcctctcccatctcctccagtccaacctgcgatccttcccccagatcctcgacgacaaagccactcttaactgctctccctagctccaacttcaaccatcgttcccgtcttctcgatctctccaattcggcatccttcgctttaatctcgcgcataaaatcttggcttgctctgcctgttattgaactttgcctggcatggcctcctcctcctcctcctcctcctcc

SEQ ID NO: 1857 - DNA, 7756 bp, Xanthophyllomyces dendrorhous
cctcctcctcctcctcctcctcctcctccatgtatcagaggagatgacccgttcaatagcggtgatcgaggattgtagaatgcatcgggaggatggaccgaactgttgatgctcaagttgggcgagtgggccacatctgacgagggcagaactggtgtggaaggcgacgggcttcttgcacttatgggctgagatgaagaaccaaatcgaccggaagctgcagaagccgaaagagggtgctgagaagaaaggagggtgggtgaagcagtcgcttctctagacaaagtctcatctcgaggcgatatcggattaacaggggtcatcactcttgccagcaaactggggtcttgaatgctgtccgcctgctgctgtgattggccactgacggggtcctgcattcgtcgaggcgaagccgctcgctgagggtctccgattccaaaagccgcgtcatcctctctccgaggcctctgtggtatcattcctgcttgtttcttttgacttaacgtgggagacgtcaacccagagatctgtctatcatcgggcgaaagtgctcgtttgagtggttccgactgtccagtcgtaccaccctccgtataaggatttgatttggtagcttgagtgagtgccgaagactcgttctgggaatgagaaaactgagaatactctcgaggagaactttggccggctaccgaagaagatcgaggaccaaacggatttgtgtgcggtggctgttgttgggaaggaagatgcggagcagacgactttcggtgtactacgttctgaccagttggtcgggccggatcaggaggatatttgatttttgctacgattgagcggcgggagatacaccacatagtcattacctctgtctaacgagcagaaaagaaagagggcagtacttacaagtgtccaatacgtgaatgatgtccggtgaatccggcgggttagaagctgactctcctcctagaacaaggattttgtccccgtacgctgttaacgcgtgcccacttcgagggtttggcgatggtcccatgttctggaacatgaaccatctacgcgctgtaggatacgagggttgctgactatcagacaagtattcgcctctcaaaggactaatattgatatatatataaagcttactggatatcttaaaagcagctagatcaccaagatctttgccttgaacgtctcttcctccaaacacatatacgacatctccgacaacggcggctgcatgtccttctcttgccacaggcagatagccaatacagtccaattctgtccattcttgagtctgaacattatatgaccaagtatcgttgtagtggaactcgccatcggtccctccaaatctaacgcagtgtgatgagaaataagagtttagcacttttttatcgttcaatggtgggagcaagtgaaaaaactgaaacacagccgacgaacaagatgatctggttgttgtaggtcacgcatatatggcctgttcgcgcttgaggtgtactgcttcgagggatgattctttcccatgcagggccatccgatgttttgactacgtcaaatcaggagataatttcatcaatgatgtacgttgtgtactcagatcagaaagaagaacagtcttactagttgtcaaatcaaagcaccaaaggtcgtcgaagaacgtcaagtcgacttggccgccaaacataaagaacttgtttcgaaccatggacaccgcgtgtccatatctgccaaagggcatctctctcctttctccacctcttctaccgtctgtacatatacaactccactcgttattagccatattcagcaagtaaagcccctgatcctgctggtcctctgcccgagtcttcgtgtctcctccccaggagatcatcacgttcccaacgagcccagttgcatgtccgactctggcgattggaacatctcctttaggtggcacaggagcaatcgtcaacgttttgcagtctagcacaaagaggtcgtttcgaacagagtcggcgacaagaccaccaaagagaaacaaatagcctgagctggtagttgtgggtggagttgacagaccgtaccgagggaagggcgtcagatgaggcggaagtgaaggaggtgtctgaggaagagtcaatcggcgttgagtcctatagaatttgagatcgggcaaaagagatgcaatcagtgacctaaacaaaacgcgtatgtattttctacagagctctgaaacaaagagaggcgacacaagtaggattaaattggactcaagaaggataaaaataaagcaaaacaaaccatgggtacacgaccggggatgagtttccactaggcgtccgcattctggcttcgtccatcatcgtcgcctgctgctgttgttgctgagaaggataaggtccgtttccgttacccagctgagcatactgagctcgtgcgccatcgaacccaagcggctgagagagctgctgagaatgtgatccaccattggacgtgataggcgtcgagctggctcgtgagcctggcacggaggcagatttgctcgagagggcctgattacttgacgaaggctgtgagctagatgccgactgatcttgattaggagctttttgttgttgttgttgtgcttgttgttgctgtagctgctgggtttgtctttgagagccagctgaagacgaggattgagcaagtgtgggctgagaagcagcggctgctgctgctgctgccgcgttgtttttcgacctcttggagaaaaacgacatggtctccaaggataggaagtttttgaacagaagcctgcctgtctgaactgatcaatttgagtccaataaaaagaatccgacaggaagagggaacggacagagatggagagatcgtcagagaagagccaaagaggttctggacgaggtgaatagaaaaggggcgagtcggtcaagtggcgtcgttccacgtgatctaattggcaccgccttccaagacgaactggttatacagctacttccatctctaggccacaaagttccaccacattcacgtctcactcatcatttgcacttctcttttcttttctttcatcgtcaacactctcatagaagatggcaggattcataggttagctttgtagatctatgtagaagttgcgctctcgaaagtttgatccgcaataaaccgttctctacttggactttctccatcaaaagatctctcgtctacattctctagatctaggcccacattcgatcagcccagtaatgataatagagcaatcatttggctcgacattgacaacactctttatgcgaagtccactcaggtatgcgctcttcgtgtttgaatggtatcctgggagacccatgtcgcacagtctatcttttaaccagttggggttcgtttcctggtcaaacttccactgcaacgtgtgtgcttgatttgatcacatttagatccacattctgatgcaagaacgaattagaggtttgtctactccttttatcctctttgtaatccatctctgactgttcatgagcctttcccatcttcaatacagcctactttcagacacttggtctagaccccaaggaagccgaaaaattacacaagacttactacagccagtacggtctagcaatcagagggcttgttaagcatcacgatatcagtacgtctctttgattcttttattatcggtatccatcagaaactgaacttgttctttgcgcatcgtgatcaactctcagacgcgcttgattacgatcgggtttgcgatgcttcgctcccattggaaaccatcctgtcgagagacgatagacttcgtcagcttctttccgatattgatcgtatgttgtcttgaatctaacttctttcatactatttattagctgacagactcacttctttattcttccgccgttctcagcttcaaaagcgcgcattctcgcactcaccaatgcttataaaacagtatgtgttctattcatcttactcagcttctgtattcagtaaacgttcaccgtctgatttgccatcaccatatgcgctttggatagcatgcttcaagagtgctagagattctcggtgtgatcgatctgattgaaggtcttgtcttttgtgactatggccgacccgatcaagactttggctgcaagccagaaccaagtttctttcaagaggtctgtctcctttatatacgttggttccctctccagtccagaacaaaaatcaactgacaacaactctcttcatctgtatgtatatgtatctgttcaatcaggcgattgagtacgccttaccaaatcattcatcgcctgaagcaatcaaacattacttcgtggatgattcgcttttgaatgtcaaagctgccgttcagcttggctggcaggccgtccatttcaaagagcccaatgaggtttgtctttcttttattctctttaggaaagcatggtttctctgcttctctttttcctaattcgtgaatctgttcctgtctctttctgcgcaccatatgattcgcagtgggacactgaccacgacaggatcagtcaaaccgatatcaaactgcaagacggtcacgtcgagaccgtgtctgtggttgagaacttgaaggatcttcgagtcgtctggaaagaacttttcaaagcatagatactcagacattagagtcttcgtcctctggtgttgaagatgattgtgtgatcagtggcttgtactcgacggataactgttgcatagaagactataacagaagggggtatgatttgtagattggaagatgttcacgatatattgaagtagtttatcatcgaatgaatcatgatgatagaagcttgaacacctttttaagtgcaacttgttcagaatccttagtcacgtcttgaactagctcttccgatgaaacaggtcaaatcatttcaattattcattctgtatatctcttcccacatctcttcctcccagtttgtcgcgactgtttctttttgtttttctctttctaaaggtagaagaaatttactgggtggtgtagttgattcctcggaagaactcccttgggttaccaccggcctcaacatattttgtaaggaaatgctcgtccgagttgacttttgtcattgaaatgaaggcaagaagtttcagtattaagcactgcttgccagaagaagaaagagaaaggacgaagaggaaagagacaaacccatgtgcaaacttttcttgacaaccttgacctcccacaaacccttggcctcgccgacggtcattccatccgggacatccaacaccttcaactctttcgcgtgctccacatgccatttctttaaaccaccttgttcgccgtcactcgagctaggaggatagtaactaggactgaaggatcctccgaatttaccactttgagacttgagaggttgttgttcagtgtgaagggaaagaccggcaagcagtgatctggtaatgggcgagtccgtttgagaggctgatagtgagaggaggaaagttccggatgtctttaagtttgttcgtttgatttatttcaagtacagagtgatgggcaataccgatagtgagtaaatcagtcttttctttgacatggaaggtggaaacaggtaaacaaagaaaagaggaacgaacgaaatcctttcgcccactgatgtagtccaagaataatctggggacagagagatgataactctccaatcgatggttttctggggtcttgtactcagacgcaccaaagtatgcttgggcacaatctaacgcgaacaagaatggaattctttttaatcaagaatttattgcgagaaaatgaacaattagcctctaaatctcctcaatgctagaaaccgacattgtttgaactgactctttctgtttgctcagaatctctatgacagtctccaagacctgtacactaactccaagattgtctacacctaatttgcaaagatcaaccaacgttcttctccttccttcttgttgcgctttcttcccgctcttcccagcattacccttgacctcatgttccatcgcgaccgctcctaacgtaacttccgtgtcggttttcgtacctgttccggccggaagatcaggagtgaagacatggtctttgacgagagatatcctagagagaagctcatggttcgactgagatttgatgaatgactcgagcaatgacgcagacagtgagggctgatggaaggtttgggttttgctagagtggtggaatgcgtatttagagttgacatgaataaatcctgcacaaagacgggtaaaaggaaagagcaaccaagcgcgagcggagatgaacattgagaccatgagttaaatcagggtaagttcagagagaaagacgaaacaaacctcgagggatgtacatgacaagccagccggtctgcatagcgtgagcaacagtctggaacatcaacaccgattttccacacccagatcctccatctatgaaagagagaagatggttctcgttattagagtgggtatctacttgtgtgaacaggaggactattcgagaatgccttactgagcaggatcttttggtccgcaaacccatcggttttgttggcatccaatcttgtggccaaatctaatgtgagctttcgaggaacagtcagagggaacaccttcggaaaacaccaaaaacattgttgtgagagtaagtcgcagctctgatacgaaagagaaggaatgcaagtaaaacgaagaaaataagggaattcggaaggcgcaccgcgttttctccaccggtcggtcggccccaaacttgcgtgatactctgcaagaacgatctatcgtactgatggagttgaccaacagcgtcagggctgaggacagatgggctaaattcggggataccggacagatctgcttcttcctcgataccaggaatattgtccctattgaacgactgttataaagaaacccaacccaagatcaagcgagcagccggtcagatgattgcgaattacatcaagatacctcaggtacagaagacttggccttcagtgaacctaagaatcagacgtacaaaagacccccatcctcctcttctgccaggcttgactggccctcctttcttctgaacaatagctctcttgggtccctgagttcgaactagatcagacgtatggatgaagaatcaagtcagactctagttcccatcaaattcagccagataatcaaggcgattggtgaacgttcagccgagatgttcgttgtattataaatggctactcttcgatacgatcgagtactgccgatcatgataccgctaccctacttctggcgtaagccagtaggagccttttcctctacagccaaccattttcagccgtactccgatgactccgtgaacgatttcaatagaggagaagtaccacaagagctctccttatatttaaagattcaagtccaaaactagcaagaaaagaagagcaactttgacaagaaaggaaaagaaggcataaaaaaagagagaagaacaatacgaaccagcagcagcagccttcttgggaggaagataacaagccggagtcgtcgacaggagcctgacagcagatacagtagagggagaagttcttgctatacgagcgagcgaggtggtcaaacaggccatggctctatgaagtataaggagaggaagaaatagagtgaggtgaacgattgttgagggaacccgtgtaaggtgagagatcagtagcagttgaatcaagccttagatgataagtattagaatatttgattcatgatattgaaaagggtatatagt

SEQ ID NO: 1858 - DNA, 564 bp, Xanthophyllomyces dendrorhous
tgaaaagggtatatagtaattctagtctacatggcactaatctccaccaaccttcctccttctttctcctttcaatatgcgtatggtagatgtatcagatggtgtgttgcaatgaaggaagaagttcgaaacataacgtaaaaaaatattgaagatgagagcattatcggaccggatgaatgtccagacgtccttgactatgaattgaggcatacaaataaaacgttagttgtctcaaatttggcttttgaacatgccgagagtatcacataccgttcaagtcgtactggatcagcctatatcatcaacgcagcgatgaaaacaattgagcgccatttcttcatacagatttagaatcaaaacaagaataaaaaagtacacaccatttttgagattcgcacctgcggtccggtccggactccagacatgtcttgcggtgtgataaagactgacaagacgtgagttcagtgtgatgcatcgcagatggttagcttaagatccctttgcgaacacaagtaggatccggcgaacgaaccatattgagtgttgtcactcgcactatgg

SEQ ID NO: 1859 - DNA, 8028 bp, Xanthophyllomyces dendrorhous
ctatggaattcaatatctgagagttagattcaataaacagtcgctccaagcaatcaaacaacttacgtagcgacctccaactgattttttacatattgagtatccatcatacaaaaagatgagtatccaacgacaccgaaatactgtcagacaagaacttcttactgaccatcatattcagagtctgccttctattcacagcatccatgaacacatcaaattcgtccaaacaccgaattggacatccaaccgcatcccaaagagataatagtaaggcgcacgtcgaaaatgatttttcaccacctgataattgattagggttcttttctctggattgagtcgttgtcgaagcaagatcgtccgtttgaaccttaagagatatgaattgacatcgacatagtaaagaatgggtaggttagtctgtaggaactgattcaatggcagaatatcatggaaaaattacccttagactaagtttaagatcgtggtgattaaacaagattttgccaagaaacccgcgccgagcaagatgttcctggaatgtaacctttgcccgaagagcgatgtaccttctgaatgcgttccaccttgctcctcggacttgaagcgcattcagaagagcctgcatattgtggtaaaataagatgaacatcaaatatcagaaatgtttgatcggctggttaacgtaccacttccaggtctttcatctcctgtatctcctgcttggcggaattgtaggccattagcgcgttaagatgctgctcgttggcatcatcagcagaaatgcccactctgaaatgttcgaattgcatcaaaggatagatgaagatatttcggtcagtagtcgttaaattatacatactcggtatcactcttatgaaaaactcacatcctcgtctgctcatctatccgtttcttgcaagcctccatctccttagtcagtttcttcaccgatttatcaacttgcgctcgttcaggatgagacaaaacctataagagtatagttcaagattcaaagtgagcatgtaaagatagagctgtaaaatgagagcctagaatattgaaggactcaccacttcttcaacccaagcatcgagttgttgttgggcagcttcaaattcgccaagtgtcaactcaactcgcttttcgagttcagcaagttttttctcataatggcgttggtctgagcgtttcttggtaattctttgagcgatctcaacgatatcgtcctgtgtttgcataattttcaatgtgatcaactggagtgatccgaaaaacgccacgcgcatctcaaagaggaaaggatactcactccgattttaaccatcaaagcctctttctgctctttgattgccctcagttgatccctcgcctcttgaagtggaactgcttctgctctgacgcgggcaatctcccgatcgcaatctgccaactgtatctgcgtgttggtcagaagagctgtttcctcctacaaaatcaccgatacaatttattaagcaaaatttcaggaataccgaatatttcaaaacaatggtttctataacttaacaattgtctatagaaactggacttacatctagtacgttctggagaccagcgatattcggaggttcttcgtctctattcgcttgaatcacatcagtgagtttgcgctcatgctgcacaagggcgttgttgagcctctgaagcttatcctatggggtcatcgaagcgaagataagaaaagacgtgacaagacgtctactcagctgtcgaagcttatacgtttgacccaagtgctgacagcattagactacgcacatcaacaatttctcggatctgctggttcaattgctgtagttccttggctaactcttttctctcagcaacgttttgtcgatctacaagaccgagttcattcagcctgctctgcagagctctatagccatgaaatgaaagatagttagctgtgtcacgaggttgaaacttgagcctctttcgaatgatgatgataggtgaactgaagcgcgtactcgatctccccctctcgatcggccacgaagaggccgcctttcttccactgagtcacgaataaagattgtcgagtttgtcccctattgtcaaggcacgaataaacaagggattgaatatcagctcgttcccgagacgtgcatatagtggggcaagagatgtacctaacagaaatccttgctaaaggattggcggtccagacatagataccattgagacgctcggccgttccaaaggccttgtctcgatcccattctaccgcgattcgctcgatgttgtgtcggtcaactagaaggtcgcgtacattggaatcgctgatctttaggtagatgaacccggatgttatgacagagtcagaaagatgattattcaaagtgataacatgaaagtatagagcacacacttggagtaatgatagaggtgtttgaaacccttttgaggaaaggtcgccagcagagatgtctttatcgggatctggagtaaagacgaagactgtcgggttttcctcgttgaattttctgcgctcgtccaatcgcttgatcagtatgttatggcaatttgattcggctctgctcagacatgacttacgatctgtgagaattttgaaattgtctgaacagtgcccgaagtgcagccgcatctgcctggtgggttactgcaaacgaagaaagtgacgatcccaaattagcttcgatcacctgctgccactttggatctactaatttgacatatagtcccagcggtccgatgggtgtttgtccagtccacttcttttgcttgatggcttgcataagaggcatcaaattggatccataagctcctattggaccatctcctctggatctgataaggccttccttcttgctagaaagatgaccaatttcagatttgcacttgtcggcatcctcctgtttaagtcggattcgctcttcgagctcatcttttcgggtttgaaggcctttgagtctgctgttaaggatgggaaattgtgttttgatcttgttgatcttttcttgcatcgtctaaataaacacgcacgagattctcaatgagttatcaagaaagaattttcgatagactagtgaagattcggacctctatttcaagctgtcgcctctgcttctctccatcgttgccatgcttgattttgtcttcttcaagttgaatcgtttcttgcaactgcttgacggtttgagtaacacgattgagatccgccttgatctcttgtttggtagcctatcaagtttacaaaacgcattgttaggatcgcaatatatatgagaaagtcagaacgatagaatcacaaacctcgtgctgtctgtattgtaacttgatattcttcagcttcccttcaacttcagcaagggtttgatcttccggctgatcttctgcagccaggtactttcttctttcctcttctttctcgttggagagcgctacgagttcctgttcctcagcctttaaagagaaacctagtcagcagacaaacaggcagcctacaacttgtcggtgttgatagaaccatacggtacctcaagctcggatattttcttctgtgctttttctaggattcgagctgcttctttgtatttatttttcgtctcagagacttcctgtttcagccaaggatacaaagtgaggttaacttccatggttttcattcaaaccaagaactgtagagaacatctgagcagataaagcgcaaacctcttcctgctgagctacaaacgcccatgcgagctgtttttctaatgaatccatctcatcttgcagcctccctgcaagttgaacgctatcaaccttctctttggcgcgccggatagcgtctttcatatctggaaggacggcatccttttgaactagcgcatttctgatcacgtcgatgttggttttgacaagatcatactcgtccgacagctgagccaactgagtgcctttgagaaagaactaaacaaggcagatttgatgagtgggtagccgaacaaacatttcttcaaaagaaaatttatgactcacattgtacttgtctgaagcgttcgatttcgccaaaaaagctcgggcagcatcctgggagagaacgttgatcggattgtcgacctttcaaagttgaaagaagattaatacaggtttcttgtctacctttcatcctttacactcaaaaggtggacaatttatcacctgaatattcatgtggtccagaatcttgtctaattcctcccttttactgctgacaatctttcctgttaatgagcttttgagtttgtaagaactcgcgttaccctcgcggtgcactccccgctcgatgatgatgatgtctccatatacgtctggtcggtaagcctctggacccctattcttcagcttaacagtcactctacacatactgtgagccgattaccaaatcaaagaggggtgtatgcgctcaggataagacttcggaaatattgtatagcgattcgacagaacatactcttctccggtcttgacgaaagacttaattccagatcctcttccagttgagttggcttttgcaccgagagcgacagtgatggccgtcaaaatcgcagactttccacctgttataaccacatgttcccattcagcttgccagctccagatttctaaatccttgagaaactaggaaactgaagagcgagtaaaaggcggacgaacttccattagctccagtgagaaagtttacctgaggcccgagcttaacttctaagtaagaatgacacatgaagttgactagctcgacctcttggatgacacccatctgggctttctcctacagcatcggtggcaaaatgaattgattcagtggtatgagtcgtttcaagatcagtcgcgtcttggggcttcaacgcagagaacagcctagcactggattacgcactcctgatactttggcatgccccttatcttgcatctctcctctgatccggtcttcgtgagcggcctcatagtcggcatccgcttgctctccatccctgtgtgtattttcttcatcttcttcgtagggttcatctagcccattgttccccacaaattcgtttgacatatttccactcatggatagtcgagctcgtttctgtgccaccattcaggtatcaagaattagtgatcggtctatatgtcactgctgtctgtccttagttgatcgaaggtatgaagatataagcctacgaggatcgcacttacagctaaagaacgatcatcagcatcgaggacctcttcctcttcctctttttcctcatcgtctgcagccagtcgtttagccatatcgatggaatgttgaagtgatgatttctagataagttgatggtgtcagttcacttcacagacgtatcgacttcaagggagttgtaagtcgcatgcgcgttgaattcgaacgcgtgcgattgcaaccctaacatgatgacataagtgacgcgacgcgcgtgcacgtgacgtgcgataagacacgtgactatatgattagtcttgtcgaatgagatcatggcgcgtcctcatccgtttcacttccattctctatttctttcgttctctacttctatcttgctttctttcatagatcaaaagcttcaatcctgttgatactccagaatggaccggacgctggccattcccacattgggcaatccacttgtgtctcttttgatggccatcgttagggcggccatctactgtcttcaacttacgaggcaactgataacctttctgacattgactttgccgaggatcatgatcatcgttgtcaactggagttggacgtttcaggtaggtcaggtactttatttaacagaaggtggaacgtggtatacttattgaaagtattatttgtcttgaatcaatcctcctttcaatagctcaatttcccaatcgtactctttattctgtgcttgatccctgtcggattcttcttactcgttcggtataagtatcttacaaaatatacggagctcaaggaagacccgtaagcagttccatgtatccggttgaaaatatcctacatgcttcggatgttaaccagtttttcgctactcgtcagcttgtccaagtcggacacgaactcgcttcatcctgacgttctctccgagactgctacgaagcccttgaacaactatcttgacgaatttctctcagctatcagggtttttggatttttagagaaacctgtgagaaacccgttgtgattgttatcacacatattcttgttgcttacaagtactgaatatcatctcctctgtgtaacgtatggcaggtctttcatgagttatccagacatctacaaaccaggcgactcgtagcgggagactctctcaccttagactctagtgataaatcgttctactgcgttgtagacgggtgagctcgttctttcttcaaactttgcatcgtctttgaagaataattgtaatactcacgccttgttctgaccgctgatcgaattcaattacagccacgttcaagtgtttgctccctcgccccctagcctgtacccccctcaccctgttcagtctcacttgccatcttctcaggctgatctatatacagaggaagacgaacctcccttaaacggctatgatctcctcactgaagtttcctctggtggcaccctcagctctctctttactattctctctctcttcacagaagatgtcaaattatcatgggatgattcccctcctcaagaaagagaatcccagttcggagctggctacccttctgagaacggcgaaacattagattctctggggttgaacaggcaaggagtcaggtcgcctgcttcatctgctggcacagctcttccagaagatgtccctctcggtttctatgaaggaataacgccatcgggagagtatcctgacagagctggttcgacaaacagtttcatgggagcagaaagtggaagtagttttaaaggatacaattataacagcgtccgcggagacaccccaaatctaggactgcaagcgaacgatgaggaaagggtcgcgagagctacaggttggttcctgtcatgacttcattatggtatcttcatgctgatgaacatgacctttcttcaaacttaaagtggatacaacgttggctgttatccccgctgatgcctttagaagactgacgcgcaagtttcccaaggctagtgctcatattgtccaaggtgtgtcggtccatcgcgagaatcctcatacctatcggacaatattttaacgtcgagcttaaacatggttggatcactatcagtgatcttgactcgcttttctagagtgactttcacaacagcacaccagtatttggggttgacttccgaaggtatgggaaacaggagacccttgtactttatcgcgtcagaagctgactttcctgtcgaataaatccagtccttcgagccgagtccactttgaactctttggtgtcacatcctctacctgccgagttttacgaaggagggggtatgcaagcccttcgagaaaagttccgacaagagacaaaatctacaaagtacgattccaaagaggattctgacgacgattccagacgaacgccaggcagaggtggatcttattttcctacaatcaacccgaagaagacttcctcagtctcatccgcctcatccggaaaaactgctcggactaaaggagctagccctatggttggttcgcctgatatgtcgaaatcccgaccggcaccgggtagtgtccttggaaggtcaaccacttcgcctacttctacgtttgccaaattgaagactcctttggaaccttcacctgagaatgaagtcacgccagtagcgccatcaacggctgtccgtacgcctggtgccttttcctcttcttcttcctctccgagtttctcagcaaaatcatcagccaaggtccttcccccagtagactctcctaattatagtcgacagtctcatcctctcttccgcagatcgtccactatgagacaagttcaagccggcgatctgttgagcatgacttctgatgaggataatgctatgtataggaa

SEQ ID NO: 1860 - DNA, 5442 bp, Xanthophyllomyces dendrorhous
gtataggaacaatcaccagagccctactacccctcggcctatcaagtgggatagacccatgtcaacttttgcgtcactatcatcggggatcttagcaggctcgaactgggataatcatttgaacacccatgctccatattatccagagggaggcttctcatccgaccgagttcactccccaccactagctgcatcgttgaaacctcagtttaatctccgagatgctgtaatgacttctttggccaaatcaatcgggctcattcagccgccagctattgagcaaactccctccatattttccccatccgactcgaactcgtccaagatgaactccccttcgttcggagggtccatcagttctgcattaagaggtttaacgatgttaggtggcagaggcgttgatgattcgagtagtatcatgactgggacgtctggtggttggggagcggacgaaggcggcgtactggaactggagaacgaggtggaaatattgttctatcctaagggagaatatctggtcaaagaaggagagaagaacgcaggtatgtcgattgttgtttgtcaatccatctacaactaactgaaccaaaatatccctgactttgaatactgactgtaatcccgattcaacctgaaactttgataggcttgttcttcataatcgagggtttcttagatgtgagtccaaagtctctatctcatccaatgtccgcaagttgactgatgctttctttacaatcaaacatgatcaacaggtttcgctccctccacccgatgtgccaaccaaacccgtaaagaaagacacaaattctaaaaaaggcaatggctcatccggcactagctcatctagcaagccctcatccaaaacagccacctcgtccaaatctcgacgatattctactgtggattcagctcgatcagctcggctggcatctatgtcttcaggtgaagatcgaagagcggcatcagaaaccccaaaagcttcgaacattgtacctggatcaactcatctatatacggtcaaacccggaggcattgcaggctacctgagtgctttgagcaatgctgtgagtagaaggtttttctgttccatttgaaattttgtcttgtctattttctttaaaaagtatcgttgactgagagactgtgtcttcatttggggagaaaactaggcgtcatatgtagatttgagagcaaaaactgatgtttatgttgggttccttcctgccgaagcgttggagcggctgctcgagagacgcccaatcgttcttctcactcttgctaagaggctactgtccttactctcacctctaggtaagtgagaaactacatgctgcatgtcaaggcttaactgatttttttaatctgcttataaacagtccagcacgtagatgcgtctctagattggatgcagttggatgctggacaggtatggagtttgttttcatacttcaggttctgcggttgaactgatttttcttcgtttcggaacctcgacctaacaaggtcctttatcgacaaggagatgttgcagattctatctacatcgtagtaaacggacgactcagagctttggtagaaaacaagcaaggagatattgatattgctgcagaatatggtcaaggagagagtgttgggtagataaaatttccttcatcatcttcactcaatactattgtcctttgctgacatcttttttcttatcatcaaagtgaaatggatgccattatgatcaacccccgaggcagcaccattcatgctattcgagacaccgagcttgtccgaatgcctcttaccttgttcaatgcgatatctgtccgacacccagccactactgtcaagttcctccgtctaattgcttccagggtgaccaaggtggtcgatcagcggagtcgaccttctctgacccctggctcgctggaagtctctccatcgaatctaaacttgaaaacgatcgcgatattgccttcgtccaagcacgtgccgatcgcaatctttgcaaagaaactgaaagcagctctagaagatataggagcgcccactgcgtatcttgaccaagctactgtgatgagacatttaggtcgacatactttctcgtctatgggcgctttgaaggtaagtccatggtcatttttattataggatactttaggtgcttatgaaacatgcatccggcacttatccgtactcttcataggtcgccggttgggtaagtgttctgtaaaattgataaaaccttagatgattcgctgaatattctcgccttcattaagctctcggacctcgagcaacggcaccgaacggtactatatgttgccgatgctggtatgtatatacaatgtgcatcggtctatgatgtcgcgctctattaagcactgatatgaaaccacgtttataatgaagctgttggaagtcaatggacattgacatgtttgagacaagtaagtgcttagtgcatgatcaagtaggaaggtttgacagagcgcatcgctgactatacacaaatattcttcccaggccgatcatatcatggttgtcggtgagttaaggtcctctttctttgcaatcttagttgacttaaaatgacagcaacggttgagcgtctggtaggaatgggtgatgacccgagtatcggagaggttagttcaggttgactgctatgcggttttgtcaaaatttacttatgctttctgccatttctttacagtatgagaaggttctattagctaagaagactagcgccagaaaggagttggtccttcttcaccctgaacgatccgtgccacatggatcaactcgaccctggctgaaagttagtatcttcattcgaaagttgatgagcagcttcgcttacagtgcaatttcacgaattttacaggagagaccatggatctcccaacaccatcacgtcggtacgtgagagtttgttcatctcttctcgaattgactggcagttatctcaaaatccttaatacaataaacagagttgcccggtatcgtcttgccggctaaatcgacccccatggttcacgatccagctgctatcgttgcgttcaagaacttgagagaaaaggttcagactcagataaagaggttccggcctcgaccgatgtaccggcctcgagcatcgcctcacttaaacgattttgccagactagccagaaacatttgtggagccagtatcggaatcgtactcggaggaggaggaggaaggggcatagctcatctggtaagaccttcagccgacttgtgcaactatcaacttcacaagttatattctgactactgatctcgcaaatttttgtaaatcagggattcattgaagctatggaagatcagggagtgcctatcgatatgatcggtggtactagtattggatcttttattggtggactttacgctaaggatggaaatcttgttgctactaccggtctgttcatttctttgtcctaaatggcagctcaattcgtgcacatcatctcatcaccaaactcttatggccttggatatcgtcttcacaggtcgagcaaaacagtttagtggaagaatatcatctatatggaggtatgttatgattgtctggatgtaagcttatgggacatgcgaatcagccattaacgtgatttggttgtgtaaaaaggcttttgagcgacgtcaccttccctactatagtgagtgaagttgaactggatttattcaactgactttcactgagtactcaacgttatctttgtatgatctagtcatataccaccggacacgaggttcgatatcacctggcttttgtccttcaacgcttatctgacctaacccaagacatgttcttgtttgctagttcaatcgaggaattttcaaagcctttggtgatgctcacctagaaggtcagtgcccgtatcgcttcataaccttccgacgtcgttcattcgtgcaaaggttgacatatcttcgcgcgctgtgttcacagatctttggataccatttttctgcaactctacttgtctgaacttgagtcaaatggagattcatacaactggatatgcctggagagcagttcgtgcttccatgacgtaagaacgatgtcaattctcttcaatctggcactatggtttacgatgttgacctttcatcgattatcttcacgatgtgatagtctcgctggtttgcttccgcctctttcggacaatggcaatagtgaatgctcttgcttatcatacatattcaaacttttgcttactgaaactgcatacttgaccttcttcaatcataatagtgcttgttgatggaggctacagtacgttcatgtttttgttgctgtgaggatttgaatcatgacttaccatatagtcttctcatcttggcttctagtcgataatctgcctgtatggtctccctacctctcaatatctgaggtaaatagcatgtgtttctgaagtgatggtttttcttacattctcaggtcaccaccatgactgccaaaggagcgagcaagatttttgcgatcgacgttggtggcgttgatgatccgtctcctagaaactacggtgactctgtctccggattctttgtcttattgaatcggtgggtgttttcgtttaaatgttccactcatggtaaacacacaatctaatcgaagcatgtgaggattatttccatctgtaggtacaaccccttctcggatgcccggcttattccaacccttaccgaggttacgtcgcgtttaacctagtgcgtcaacttcgccctgttgatgaatcacacgcatctctgctcaacaatcattcatcttttttcatttctctcttcacatcagtgtatcttctgtcaaatcgctggaggaggcaaagaacactccaggtattctctacctagcgatgcctgttcaacaatatgagactcttggaggatttggaaaattcaatgagtcagttcatctcgctcgtttctctcaattttaaatttaaatgctgagtatagatccatttctggaaatgatagaattcttgatatcggaaggaaagccgctagagaatatctcgcaacctgcaaatctgaaggtgtgtttaatgtttcagtccttcaaaacttcaagctcgtgtctctcaaacttctttgtttcataaaatcctggtgttgtgggagctgtaggtacactgccgacgggatatcttcctgaacatgatcgggcggcggagagcgggtcaggacgaattaaaaagtcgatcaaaatgaggagaaattcaatctaggtatgagcgtccttgaatgaagaactatatgaatgattatggtagacaagacggtaattcgcaaaaccattgggaaatataaaagaacagacaaggaatgaaagagaaagaattatcgtcttctctctgccttccatttgaacaccctactcttccactctcccttctttccacctctctcatcatcctcctcctc

SEQ ID NO: 1861 - DNA, 20862 bp, Xanthophyllomyces dendrorhous
ttttgttttatatttattttattattttctttctcttttttctcttttctctctttccctcatcatcaacatcgaccacgttacgacgcccacccacctgcctaatcactcgctcatcacacatgtatgtatctttgtacctctagaatcaacaacagttttgggactgatcttgttcacctctcccagaatggtcaaagtcgaagaagttagagacgcccatttcgaggacaatgattcggtacgattcaatcccgcttctttcatttctcatggccgtccgatcccgtttcccatgccacgatctttctttcgttctcttctctctctcttctggtttgctcggagagaccatgtttcatctgctaactcatggacgattgtttgatactctggacgatgtttctatcttacaacggcattctcctggttctttttcccttccaccccttgcctttttttctctctctacactatcattgcaccataccttatcctttcccacccacatcctccataactctacaggattacgagacctcgtcttccgtctcggatgattccgataacatctccgtcgccgattccgacgacgagcctgagtcgttcaccgagcgaatcgctgctctcaaggacatcattcccccttcgactcgattgtcgatcagctcctcggccgagtccgctgtcagctggacaaagtggggaagcaaagctgtcggaaacgtcatctgggtggtcactactaccgctctcttaatcggtttgccgatggctttggctttggaggatgagaacaggttggttgctcaggagaaggagatggttatgcagcagcagggtcaggccgctgtgagtacatatccttttccttcaccgcgtttttcccccttctgttgctttcgtccatcatgatcatcgatgaaggataaaagatcgatcaagcaatggagttgcttccgtcttatgtatattccttctctaatccttgctgatgtgatggtctacttccctttctctgaatcagatggcacctggcggacagggttctctcgttccccccggtttctaaattgttcgttcttcactccttctcgtcgatccctagactttataatcgacttccacttcggcttctgatctttccggtgttttcgttcaaatattatctagatgtcttgaattgtatcgatgaatggaatgctcatgtaacaaagactgcaaacacaacatcctccgacgccccttttacaattccatctgtgtcatttgaagggaatagtagcgagggaagaacagaaacaatatacacaaggaaaagcacaatgccgacctgatattacggtcacaatgaagatgatcaaaagaatataagataaaaagaagcgtcgatgaatgttgatactgatcatcctacttcattgatcattgggtctctaagggctctcaaccctctagtttctactctccagcaagtcctacaaaacacactgccaacagaatttccataactcgaggcgcacaacgatctttcacaacctggacaaatccttctgggtccgacgccgtcttcgaccacctctgccggtaggaaaccatgttgatgatacttgtttcctgcttctctcaatgagtccccatgaagagaaacgaatcgagcggaaagactcatcaaccgaggtaacggatgaagcattcccaggtgatgaaacttggcgtgaagaccggaaagtttatatatatcggaagatgagtatgctctcaaatcagatgaaagtggtcgagccgtccattcatgaaatgtgctctctgtgaatttcgcacgaacttctcgatgaactgttttcagcaaacaaagtgagtatcagtctcaagaccagagacgatgatgaacgagaaaaaacaacaacaaccacaacaacaacagagaatgaagacgaactctcaatcgatttctgtaggagatcaccttccaaggcctggtacttttccaccgctttctgcattcccatcaacccccatacccaaccttctctcaccgagttttcctgttccttcatcctcttgacgagttccaccattgagaaatccaacacgcctttgatttctattccatgagaatgtttgatctgagcaacgtccatccgaccgtcccaaacgatcttgatcagctgtggatcttcgagtatgtctgctaacagatgaaatctgccatgaagtccgatgacgtcaatcagatacacctcaacatgcactgcagccgtcgggggcttcaatgctcttccggctgatgaggagaatgaatacgagaaaggtggtataggaatccctatctgaatgagtgatagtgaaccctgagaggttcccaaatcttgaccttctgtgtctagataaagttgaaatagattcgaaggcgttgccgatcgagacagtgatccgattcgatcagtcaatttctggagaccatcttgcgtgtcaatgtatgtatattcccaaagttcagcttgtaatttcggatgaggcgctgtggtaggtaatgaaccagaattgcaaatggatgttgatggtgtggcggaagtagcagtcggaccggacgcctgtccaactataggtggacctgtcgtagaggcatggtacgacgatttcgatcttcgttgacgagcggatgtgaccaacgtgaaatctgaatcgtcatcttcatctcctcttcccggctctggcgctatttctgttatcagcgatggtattacggatgctggtcctttcccgattgaagttattgctaatttccgggaaccgctctgtggatcattcgttgaaccaggtgtcttctcataccgtatcgggattgccaacgtgctggatgtattggtgtttctatctgtatgggagtatatgtttgaattcgacgctatatgtgttgtcaatggagatcctaagaccgatacgacctccttcttcttctgttgacgggtcattgcttgttgagtttgtcgatgtttagccttctttggtttttggattgatgatcgaattcgactttggtcttctgataattctcttccgatcttctctctggtaacgttgtttgtcttcttcttgtgttgatagttggagatagaggtgtcgtcttctgagccaggatctatatagtcgacctaatgattatctcaaagttgatgtcatgtgataagaacatacgaggtccggtcagctctagctctatatacaccactatcggatatatcaaggaatcaactccaagcaggcccaaaccgaacgaagaaatcgaatgataagtgatgcgaagagtgaaagaagatcggctcgcttacaagagaaggtttccagtaagcgagcccaaagagacaaccgatcaagaagggaaggtagatccacatgacttggcgcctacgcgacacatccaaacgcaaacacgatccttctttcctcctagtgtcccttgtgtgactctctgaagagagtttcgggagaaaggtaagagaaggaggcaaaaaagaagggaagaagaagatgttgggtggcggtcagaatagtgccataggatgatcgaatgctccgagccgagccgagcctttctccgctttctttgcaccaagacggtgatcacgcaagattcgtcttgttcccgtccatttcctttattgacacacctctcttgtagtcctctcaaccgaaaggcatgtatatatgtatgtatatctattgatcaacatctgaagccaactctatgaaaatgatgaatgaaagctagatgaaaacattgaagttggagacggaacgttgtgaatgaaccttttgaaggctgactcgaagaagacaagtgatccagggaatcagcatctgttcctctgaagtttcggaattgaatgaaagtaccgacagtcatatacgtgggctgagggtgcagagaaagagaaagagaaagagaaagagatactatgaaaacaaagcgaaatagaatggtgttggaggatgatcataaaaacacagcgagaaataggaaagtcttgaacataatgcaaataggtcggatcaatagtccaccggagggtaatagcttttccattttgtgcccgaaatatctgacatcttccgaggcacgcatgcatacgtcttgccccgatgaacaaacgtgccctctgagaaaagagtgtacagccgagcagccaacttagggtttgaggaagcgcacactgtgcagattcagaagattggtattagtgaaccgtcgccagaggggtttcgaagggccttctagtccaaggcgatcgacttacagtccacaacttgttttgaccagactaaagatcacggataagaagaaggaacgaatatctgattagcagccatgcgaaagaacgaacgataaccgaaacaagagaaagagccttactaaaatacctctgagatcgctcaacatcccagccgaccggaatagcgctctgtatcgataaacagttgtgcagcttatctcctaacttgacttgctctgattcatccaatgtgtttcacccacgaaccatcgaataaattaggccattcatccttgagatgaattcaaagctcatagggctatgcaaaaaagagacgtacgcgctcgcttggatttatgaccggcagtctctacttgggcgagttttctcgcacacgcacttagcgtagtatcgtccgagcattcctaacatatcattgaaccaatagcgtagggtgagctagaagtcggcatgaaagatgtttcgagggcagaggacacagatgatcgagtaaacacaacgtacatcaacgactttggcgacctctggcccgaaatgaagctcaatctcatctattgtgcattccgtatccttaatcgtcattacgttccaaggaagagatagtttctcattgtttgagtaactcgatacagaatttaaagagctttgtggagtttaaagaggtacatgctcacctcgaccacatcatgtagaattgccgcctgaagaacaacaatatccgtttcgcctattttggcacaggttgaaattcatcacaaagtgagccaacttcttcttctaccaagatcaattcaagcggaaaggcggaacggagaaaaaaacgagacccaccggtttctgctatgaagtttgcgacacctattggatgattgatatatgggctctgcgccgggtcttttcggcgttgaaagctatgtttctgcagtgtcaaccaaaagtccgaaccgatacagacagcgtcaacacaaattctccatccgcttatgacgatattctcgagtaagaaatgaggaacgaacctgggacgagaatgatagtgttttgagcaagattccaacatcgctgatattcccatcgaggaacccatcgaaactcgtcgttgtcactgtcgtcatcgagttcaacgaggatgaggatgatttagaagaggatgaggatgccggtgaggtcgatgtatatttcgataaggaagaggaaggagtcgccgtcgtgttgtttgagatagaagtgacagatggagacattcgatctagatggtgcgagtataagtttgtttcgggatgttaggcaggagtgaaacaagggagatccaatgggacgacgtacaatgtgtgagcacgatagtcagacttattagaaggatgggacaagaaggattttcttctatgtgtctcaagcaacgagttagatagtggaagttcgatgtgtacgtatgtgtgtatgttcttctcgcttaatgatgttcaaggatcgtaagaggaagagagtggaaacgaaggaaattgagggaaaaagaagagaaaaaacgggaaatcctccgaagaaggtcagcctacaaacacccgctgagtcttccgttcatacaacctttactatgtttttctctccggattttctttcttgaacagctgatggcgcaaactcactcaaaaatcaacaacggtatgacactcacttgacgtggctgatctggtttatccttttgataggattcaatgagtcggctgggtcacatagaaagcccatccggttagttctcagctcttctcattcacgtcccaggttacgtcatcattcatcatcttcatgatttcgtacacacaatctcgaagtatacgttctcaaccacagctcacagtccaaatgtctacaattcgagagagatgaaacacaagtcatatgggacaagaacaaaaaatgtagacacctgctcatctcttcagagtttgctagaacctctaaattgagctagcctggttcgaatcgccaaacctccatgttcgaccttatcaaccacaagttacaaccattgttcgacggttcagcattcatctcgcagattcaaaactgatatgaatgtatagggagagagagagagctagcagagtacgtacagccgatgcttgattcacgtgtttctgtccagactcctccgccctatcctccagtcggacatagtctctcaacgtaggcccgacatagatctgaaattcatcatcaaacataaatcacgataagaatttcctgaacaacctttctttgactatccagatcgtgaatcgtataagaaaataaactcacttgacgaggccgcctatgagcgtcgaccgatacatcgtaaaaaccactcttcagtcaagtcattcatgattgatgcgaaccagcgaagttgattaaaaatgtcaaagagcagaatcaaatacggaccagatcttcagtccgccttgtgcaagcatcatttgacgccttcagtgaaagtcccgatacgaaaataaaaataaattcagcacctctatcagatacgaggcactcattgattcttgagtgcacgtaccaatgagccaaccaaccgaccacacggggaacagcaaacagcactgggaaaaagtcgaagggaaacccctatcataagtaaacaaaaagaacaaggtcaatcaattggtgcaatcgtcgtaagttcctatcgagcgtctactgaccatcgctcggtagatgctaagaatgcattgggccgcatcggtaagattggtcagatagaacattattattgatcaagcgccagatccgacaagagactcacagcccggacctatcaaacgtcgcaagcaatggtccaattcacagcttagcagagactacgaggtttgaattcaattgagataattcttaccagaagtcaacgtttggatctgcgcaaccatcataagttacgccacgaaaaattgcagttttggtcaatccgttatgttcactatgagagagacagaagttctgacatacaaagttttcgagatttgaagtagtctgtaattggagtgtatattttcagattgtaagcgcacatgccgcaagcagtattgaagcaaattcgagcgcagacgatagacacttaccatccttcaaagcagcgtcatgtaaagccatagccacctctaacaactgatctcttccagtagcttcaaaaacttcttctgcaatctttctaatcacgaaggatcttggatcagatgttctatagactcggtgaccgaatccactctacaaaagcaatgatagttcagattgtcagaagagacgatggtcttactacgctgtgcgatggtcgaagcaacgaatagacatactaggactttctgctttgatttaaccttctcaatgaattcagggacgttctcgggcgacccaatatcaagcagcattcgaatcacggcttcgttcgctccgccgtgaagaggactgaatggaaaatcaaagacaactcaatagagtgtcaatatcaccaaatagacgaagcgagaccactcacccataaagcgcctatccggacaaatcatgtatacatatatgatgatcagtatgtttctatgaactttggagaaaccattggaacatacagcacaggcggccctgtattacaagtatcaaagcaggaagacaaggaaattagttcgagcgccgtatactttatacatattcaggggccagtgaagtacacagatacttacgctacaccactgtagggatcgactccgctggatccgacctgcaagattgaggctgtactacaattaacttcgtgatccgcatggagcaagaacaatacgtctagcgccttagccaatacaggggaaggtctgtactctcgctcgttcaagaaatctagctggtacaaaaagctttcggtgtaacctagtccaacaggaggtcggttgaagggacgtccttgtcgaattcggtatgccatcctaattttggaaactacataagttcatttgaacaagtctgtttgaatgtcactcacaagagaacgaacaaactcacgcagctaatgtaggcgccttcccgatcaaccgatagatctgcttatccatgtttcgcaagctgtctggtgttccggttgtgaacagcttttgtccttgaagggaaggattcgcttctgaatggaagcttcctaaagcagagaatgcggacaccaaaattgccctgggtatatacacacatatcagggtcagcgagcgcaaggggtgagctacacaagagaacactcatcaagacaaacatggggtgggcgtcgtatcgaaacgatttcatgaagccctcgagatcagaatgcacatatgaatgtgcctgaacctctttttcgaacaatattttctgagatgggctcggctgtgatgtttgaaccccgacggagtgcgaaaagagtggaaggtcaataactatagcttgtaagatggaaaatcttcgatttgtacttaggcttgatgtaccagatttccgtagagtagaaggtagctactttccaagaaggtcgaatgctcggccagctgttcgatcggatatcctcggtatctgagaactgatataaaacagccgggtatatgcatttgaaccggaatacgatcagacgtcaactgcaagcaagatggaaaccagaagacttactaccggcttcaccatcgatgaaagtgatagtagatttgatgacagcagtattctttcattcacaagatttaagcttcgtatcggtgtattgttgggctttgatttgagcgttatacgtgagaccctactaaccatgtacccagggtcaaaaactctcaaccctttggattcttcatcttcttcccttcctttgctcgacactccaggaatactgagctgcttgaaagcagtggcaggaatagaattttcggtgattctatgtccaagatgatatatgtttacattgtcaatgagccacattcacgtagagatgggattcttcaacgggcgataaacaactcacggaatctcgatggtcttcgaggttcgattatcgatcaccgtaatagtatcggacgaagacaactgagtagtcaatcttcccattgtgattcttatggctcaagagagaatttttaaaaagtgggttgacgtctgatgtgcgttagcggaggatgatgtatcgtaacctagaaaatcgggtcttttgaaagaaatgatgggccggatgagcccggacccggccagttgaaagccggactgacactggttagtcaccttccgagtcttcccttgttttatcttgggtttttgtatcaacatactccgtaagtgttcgtcgactctagtcattgatggaagaacattcatgatcttttgaattcaatcctcttttctttctgatccgtttcctcccggtcgaccgccaaatttctcccatccatccttgccagcctcccaccggtcgccaacctccagatacttcagaggccaagagcccagaagagtatggacgacccatcttcttgatattccagccaggccttcagggctcaatcgaggagaaacctcggttatgctagcccagacaagtgcaaagaccacgccgaggaagaacccaaaatacacttgagatgtagtatggtagtaaagataccatctgaacaaaacgtcttggttcagctaaggttttgggatggatcacgaacaaagagattatcacataccgactgaagcaaagcaagaatgaccaaatcgctgtcccaactaagacgatcaggcgcttccaccaccagagtgttttctgttcatcagtccagctctttggagacgtctgaacctgagtcaacacgacaagcaagaaggtgaaaaggtatccaaaaaattgagcgtgggaagatggagaggcatctgaacgttgtgcagccaaagttttagctcttaattagactagatgagcttgaatgatgcgcacttactccctgagccgatgttagctgtggacgaccaggcaatcaaaggctgattagacaacaaaaacgactttgattccatctacaagccagttaatcagactcaccgtaaggtctttctgccttgatattttgcttcaacacccagctgaaagcctcattgatgagctgagcttcaaatatcgtatcagaaatgttcagtctcaagagccctctctatgacatcatcgtttatacatggtgatgtggatagaagaaatgacctacttggccggctaacatgttgagcaccgttgcttctctttcaaacacaaacgcgacgagatatgccgggatgaccataattggggagagtgttaagatggccagcacatgagacaccgggtccgatgggttatctgtccgagtttcaattcaatcccaaaaaaaatatccagaggatgagtatacatatagagaaagaaaggccataaattctgtacctacaggtcacttggcttagctccagtacggctagcgaggatggtgtactgttcagcatggcttctctcttggcttgttcgtatatgaatgtgtcgtcgatcaatgaggggacctatctgggctgggatttgcaagaacaggacttgacttacatgaattcaaatatgtcacttaagtgtctcactctctgctcttcatcccccatctctcatgctcactgccgatttcgtttgccaaaacaacagacctcagcatggaactcgcattccttctcttcgctcttgtactctctacagagatcctcaactgggttgggaaatctctcttggtcgatttggtaagatttatatgtttcttgtctatcaaatagatattcttcgcgtaaaacacgacttaccgttgtttctctctcaaagctcttctcggcctaccagttctttgctcaagggcctcttatcaaccagcagcgatcgctcaaaaaggaagtcttgactaccaaactcgaactggatcgcacgagttcgcaggatgaattttccaaatgggcaaagttgagaagaaagctggataaatcgatcgctgagctcgagaaatgcagttcgtccttgttctcttcacgctttggccttgattgtgtccaatcttacttatctgttatactaccctcagactctacgctttcgaactctaagagcacattttccaaaaccatctcatcctcactttggttctttaccaccggtctccagtttatcattgtttggtggtatcgaaagcaaccggtgttctggcttccttccggatggcttgcaccaggatttgcttggtggttcagcgcaccgtttgctcctcgtggtcagtgaatcctcctttgatgtgctctgatctcttcgaatccgtggttttcagtaggacactgatcaacttctatcttttcgcaaactactattactcaggctcaatctcttcagctgcatggtgcatgatctgcaagcgaacaattaaatacgtcgaagaaatcggaaaggaccttgtggttcctatcccagctgcagtcacgccagaagctggtgcttctcctgcatcttttggccgtaagttttttttgacctatctctcactcttgcatcgtgcgatatgttgggctaactttccatgtactattctcatcatcttggcgctgaagaatcggctcagggcttcaatgccaccctaccgaaggagaagcaatctactaaagtggaagattacactcctccgttggatctggattgatcgacttgtttcaccactccaataaaggatattcaaaagaatcaatcgacagtatataagaatcagaagaactcggcgatgagacatacgcgtctcatcctgtactttcaaatagagaacctaaaactcggatgacttgtgaatgaactaattggaatgtatcgatgtaaaaagccgcgaaggagaaaatgaactttacgattctcaagtcatgatgtgatgcgttggctaaacaagaacatccacgtcctgatttctttggcatacatatcaaacagtcgatttgaaaggggtcaattatacacgcagattcatgaatctcttcatttttcgaacattcgacaaacgtagaaagcggtcattgatacagtatcgttatggacaaagcccctgctgaagccgccacatatgtgcaagagaaaccatatgatttaagtgctgttgaggaatttggcatggaaagcgatgtgttggtcgataaaagatgagatctgatatggcgagcaggtcaaaagatgagtcatgtgagattcactaaacaagttcgcaagttcacattgaattggaagagcaacgagagaaatgagatcttacaaagtagtagctgtggtcatatccctcttgtgcctcgaccttgacttgctcctcaccccatcctttttctctagctgtcttcttaaatgtttccggcctgagttgaccctgcttatagaagtcatcggccgttccgtacgtgatcaaaatgttgagcttgtgatcatgttcagaggaagcagtaggaagaagagaggacgcatcccattgagcagcttccttctcaggggaggcaaggtaacctttgaaagctttctcgccccatggaaccacggttggattcctttcagcatcgatgagagcgagtcaataatctaatgcgccacacaaagtgaatgccaaggtagaggcaggatgaactcacgcgataggagaaaaggcagaggacgacttgtatgtaagtgtaggagacttgagatagatcgtcaaagcgccatgccctcccatcgagtgtccgatcagtgatactttctggatttcgatgtgtgagtgatgaggaaaaaaagccaaccgtccgaggaaagtaatcagacttttgtcgagaagagaaaaaagtgatctctttcggacgaactttgggatcgacagcaagctcagccttagagatctcctcaggcagctccttggtgatcaaatcgtacatgttgtagttctttttgtacttttcagaagtagcgttcaggtagaacccggcacctgtggagatgactgcgttaaaaaaaagactcttgtctgaagacttcggagggagaaggcaatctgagacgcaccagtaccaaaatcccaatcatcttcctcaccttcaatcccggctcctcggggagaagtatctgggaagatgacagccaacttgtgctcagctgccgctcgtagaataccagatttccagggactagtacgaaaacattacataaatcgacacggaacgtgagatcgaaaaccgtataggtttaagtaaagctctgattcggatacttacccagtatcttcgttacaggtgagtccagagagccagaaaagtgtgggagcggggctttcttcactagcctcggaaggaatgaagacgttgaattgagtgtcgagacctcctaaagatttggactatgaatacgagacgaaaaggaggggtcagaaagcccgatcgatacctatgtacctcttgagtagacatatacaacaacaggaaacgtacagcgaacttatatttagtgagagaccctccgaatgctttattggacgagactttggagagcatgttacgtgataaagatatggcagaccgaatgttattgatgatggtgacgatggtgatgttggtgtcggaagcataagtggaactagaagacagtcagagcgactagccaagatgacgtaatgagatcttgattacgtaataagtttagtcgcatccgggtctccagcgataagccaaagctcggaagagacgtctgacaatcatcattcatacaaccgttccgaagcagcatcaactctcatcatgtctaccgcaggggtaaaaataaaggcaggaatcaagctgttcaatactcttacagcagagaaagctcatgtaggttgatctatatccaggaaaaaaagatcgatcgtcgatcgttcaatcgccaatttcatctcccatctcttttctcctcaatgttaactgagggctgataattttccttttctgtcatatcttggcttttctatatcaatatttgccccttcttgttaatcgatcaaaagagctcggttactgactggatcgaaatcctgaccaacgataactatgctagagacgagctggatggagtagcagagcttgtcgaatcagtgtatgtaccactcgagtttcggctcaaagatgctcaacgatcacaaactcatgaagttttcgtcacattgaattcatgaagcgacatccaacccgaaggatctacagaggctgcccgagcgatccgaaagaagctcaaatacggatccgtacatcgacaacttcgagcacttacactccttaatgccctctcagagaactcccggacgttcccaaagtcattcgctacctctcctcaacttctcgagcgtctcaaagagacggccaaagattcgcacgctgatccagaagtcagaaggagagttttatgggttttgaaaggatggaaggttcaaagtgacgaaggtgatactgctttcaggagagtttcaacactctatgcagagtgtgcaggcggacatggaggtcaaggagcaaatccctccaggagaggatcgctcgcccttggggccgtagtcgagcctacagtacctactaaacctactttgagggatgatgggctctgggaggaccactcttgggatccttctcctaaagctgctgctgccgctcgggccggtatgttttttatttatttaaattatacctctgtcgtcagtcaatggtatgcttactctaatacgtcatgtcgttgttgaaactttcgatctataacagagtctaaagcacaggagtccacccgactggccgatgtagccatgcgaaaactcgaggctgctaaagagcaggcgagaaaagatgctgaggagaggcagcgaaaggagatggaacgaagagagcgagacttgaaatctagagaagaaaaaatcaatgcgttagagaagcttagggctgccaaggcggctgcaggtaataagaaggatgctggaagtggaggcgcaaccggccccaagaggcctcctttcaatttcgaaaaggtcagtaaacattcccttttttgcgctcacactactcgctgatttttttgtataccgatcttgccttatgtaggagaaaccgataatccttcaaactgttgcttctgcttcacaagcagccaacaatctgatcaacgccatcagagtcagtcgaatttgctactcggcatctatgtttagagactagcacacattaattggttgtttttatcaaaaccttgtatatctatacaacagctcgttaatagagaaactgagtctatcacggagaacagcagagtgcagaagtatctggaagaatctaagttgttgaggaggaaagttattcgatatattcaggtctgtgtattctgtacttcttctttcccgtgcatctggcctgctgattcctgaattcatgttcaaccttgaatactgaagttggttgaagatgaagagtacatcggaaccttgctctcaaccaatgagtcaatcatcaccgctttgcagctctacgataaggttagccagatgtctttcaaaccgtcacttgttgtttgaatattttttttgacccgtcgctctatacattatcgaccagatgtccaaacccgcatctcaagactcagacgattcgagcccacccacgccgaaccctgcaaatcgtggtgagagtggaggtgatgaggatggcttgacggcccgaatggcagctcagaagttgcagaatgaacagcgagagggagaactgatgaagcttcagaccaaacaaagaatggccatccagaggcaggtcagcagaagctcgatctctaggactccgacgggtactggtgccgatgagttaagaggcttggatttctctggagggttcgtttccttctcttctctcttttcatctggaaaacatgaatttataaatcttaacatgttgcgcggtatgtctctgtcaattaccatggatgtacagaagacagaaccttcctcctccgattggaccgaccgatgttggttattctcgttaccccccaactcagatcgtagactctggatctgatcttacagattacgactcatcggatgatgatttccaacttcgagctcgatcgcgacggccgtctcactctgctggtgcagagtacaaccacgattactcttacgggagtctggacgagggagcggtaggcaatctgttggactcacaggggcaggccaacgaagatccatttgcggacccgttctttgatcaagtccaagagagggaaccggaaattgactcgaggtccaggaaggagtggtgcggtctcttctcagacatatctttggatttgggaaccccttgactgactagttttgttgcttgacatgtgtatctggaacctttcctacaggacatctgtctaaatccgcatcatacgttgtctctatttttcccttgacatatctcttattcttcctctccttgtcaaatcatcaagcttttatctctcatcttgtcagatttgttccttcagctcttggttctccgtcaaatttcctttctgttgttttcttcgtgttccgataacttcctgtttttgttcgatgtcaaatgcaattgcttgtccctctggctctttgtccacatccttgttcctgcttttggtatcgacgatgtttttttacctactatatatctctcgcatatgcagaaaatttcctcaatccgatgctgcttgaaagtcagacgaatccaaaggtgatcgagaacgacgatcacctacatttcctacgagagaacagaatattcgcgtgtctcactgttagggttcatcttgatgaaatgatttccacacaataaaaagcggacggttggtcaaaaaatccgataaaaactgacatatcaaatacaacgtaactagggatagacaacagataaatcttttacatgaatagacgcgcctagagggtcgtatagagatgtgtgaacttttctggaggtgcaaaggcgcgatctgatttaaaccagccttgaacgcttcaaggaggtgtaagggcgaaatcgaaaaccacccgaccgaagaacacaaacagacagacatcgtcatcgaaagcgtcaatctcaatgtcagagaagctgctgctatcgagctcaccatcagtctctggccgaagaccaagaattccggcgctgatgctgatgtttctcttgttatagtggtctcatactatccggcctatcgtatgtctagcaaacgcgcaggacctttgccgatccgaccgggccgagttcaccgggcgaactcatgtccgcctttcggggttacgtccgctttgcgcatcccaatcactcacttacactagatacgacaaagaactctccatcgctgacccgtcttgctcactctgatgataataggcataactgatctttccgatgagcgggaatcactaaaaatgaacaatatacagaggtctttctatgacttacccggtctacagatatccttctaacttggtggatgttactgcatcatctattttcctttagctatggggcgaagcgtggttcagtcccatccaacgggtttcatccgcactgatcaaattagagatactgtgccttgaactcgttcagactcatacttttatctctgatacattttcgcacctcagcagagagcaattttaagaatgccaagatgattcttcacgacaatattggggcttttggaaagcgaatcagttggaaggcatacataaaccccctctacttcgtttgcgtattctaaaacttattcttaaaccgatttccctgtcacagatacgtaccaaagcacacaagtcacagtctatctcaactctccacaagcgcaaaacatcttcacaacaccctcaccatgctctctgtccagaattatgttcgagaagatgatcctgtcggaaggcgattcgatcaggtgttcgtccattcgtctttgactgtatatgacatcaacctgatcgctgaactttcgttttctcatttctaattatttcacaaacagatctgataatattgacgccatcaacgttgggaaattatggcaatgtcagcaggccgaagaggcagaacagaacgcctacgccgcctcccagtttgacgctgaaaaggaccacagtagcttcagacacttcgctgatgagaacgagactcccaaaaacttctatcggtgcgtccgatgtattttttcttcagcataggcgtatagtacaaggatatctcattgattgttctctcgtttcagtgagcaacacacaaagcagacggtggagtacaatatcgaagcacggaaggaagcgttcgcgaagcctagagcgacgctctccatctgggaagccatggaactactcaacaccctcatagacgcttccgatccagatacagataacactcaaattcaacatcttcttcaaacagcagaggctatcaggaaggatggaaaaccagagtggatgcaggtcaccgggctaatacatgatctcggcaaacttttgtactttttcggttcgccttatttctttctcttcgatattgtcccattacctttgtttctgcttggctgaaaccttttttacattcgcgcgccttaacggtttgacgttgataggctcggaaggtcaatgggacgtagtgggtgatacgtttgtggtcggttgcaaggttccgcttgaacatgttgtatacccagatacgttcgaagcgaatccagatataaatcacccgatatattccacaaagtacggaatttacaagcctgcctgtgggttgagcgagttgatgctcagctggggccatgacgaatatcttgtgagtcccaacacctagctttgttttgttctcttcccctcgttacagcgctgatgatatgatcccatcatactaacagtaccatgtgatgaaagaacaatccactctcccgaaagcagcgcttcatatgatccgattccattcgttctacccatggcatagagagagggcgtacacctacttcgagtcagatgaggacaaggaggcgttaaaagacgtattggctttcaacccttatgatttgtattctaaggtgcgcctctctcctctttctcgaatcaattcatttcctagttccctttcttctctaggttctcagactaagcagacgacctgtatgatcagtctgactcgataccagtcaaagaagagttaaagccatactacttggaacttatcgccaaattcttcccggacaagattaactggtagtttgtctcctcaatcttcttcacctcactgttccctcctcttgtccttttcttcatccatactttgcaaatctatccctatatcgcatgttattttgtcctgagtccttgaaaactttctctcatcttccaaataacttctctcattgacttaatggtataatcctcgtctgtagaatgcatcctttttctcatcttctccataataaaccgaggcattctttctttcttactcagtgctttcttatttcacggctgcctcatgtgcactcttctttgactacctttgatatatcatatctgtcaagtgtctagaacagactattataaaatcaatcacagaacgatggtcatagggaaggacaaagccgagaaaataaaacccaaaagaagagagaaaagattcatcaaacacctttatatatactgatccccagccactttcacactatgaacccccaagaagagagagaaaccagcaagaacgaggaagacagggaagccgacagagaatgagaaggaagagaggaagacgaagaacgcaaaggacttgaaatggactaacactcccaaccccaagggaacctctcaccaaggatattcaaagtcgcgaacatcacgggatctcctccatactcaatgtcggccttgagcatctcaactttcacttccagatccgtacctacttccattcctacgtccatgtccaagttcgtacttatcttcttctttaaattcggctctgacgctgaggataacgataaagcctgcttttgatcatcgcctttcgactttctggtcttgacaccccaactagattcattttcttctggttccttcccgtggcctttgtctcccttcatctgactcgacctcaaccaagacccataagaaccccctccccgaatgtttcgtctgaatggtctcggattcaaccatggacccggcggagcgcgcacaggaagcggaaggatcttacgagttggcccactccgagaaggaggtggttggccaaagtagaaccatggtttagcgaggtaagagctgtctgtagtagtcgtcaggggtttgagtcgtagatctggtgggttgattatagagaccgactggaatgcgtcaggtagtggtgttgaagctttctccacgtcatctcgcgctctctcgtcctcaacatggttatcatcctctgcgcgggatgaataggcaagattagataactgagaattagtgaccgttcggcggtgttgttgagtattacaaagaacacg

SEQ ID NO: 1862 - DNA, 4268 bp, Xanthophyllomyces dendrorhous
aaagaacacggttgtgctcccgtcgtaacacttgtcggaaaaactcgctcgatcttggctttggacgaacaagcggctctggcgcgacattcgccttcgtctctggcctcgagaattcaacagaagacgaggaagaagttgctttcatcaaagaaagtgacgaggatgagggatagttgaaatcaggactgtgatcagaacttgaatcgaaagagatcgatgcatatcccgaatcgtcatacctctcctccttctccacatcgcccttcaaatcgacttcgtgcccgtggaaattctcgtcacgacccgagacgcactcaggctgatcaggaagaaggtacgtagcgaacgcctggtctagttctcctctgtctccgtccctctctaccattccttcaatttcatcgttttgagttatcccaacattctctgatgagaaggaaccttccaagagaggaccatggatcgataagaatgcagagaacccatcaaatgccagtctgcctgaatcctcaatgggtgggtgtgttggttgtcggttttccccaggatctttctcttgtttcgtgtcaaactgggcttcaagcgactggaactgggatcgcgacttggtttagagatgcgggtgggcacaaacaaagacaagagtaaaaaacaggcctgatcatgatcacgattcaaaccaacagtcaaagaaaaaatgacaaacatgatttaaatctgcttcatcagactttagttcttcacgcctcttgatactcatcccgtggtcaccaacttggttactgatgaagcccaactgacgctcaacctcttcgagatccgctaaaagattttgcgcatcttcacccttttccatgcgtacaatacaataagggaaagctggtacaaggcggatctcacgtctgatagggaggggggtatcggtaatacgttctggagggatataactttggatgctatttttttataacaaaaagcgaagtatacagggatggatgctgaaaaagggataaacaaagaagagatataataacaggcaaacaaggtgatcagtcctgtaacattcatttccctgccttgtatacttgtgtttcgatgagtttagttggtcgatcaggaacgataaatgagcgtgtcggttcctgaaagacatataagcctctggccatcgcgatataaggttagttttacttctatgaaaaccgacggcttaaaaaacttgagtatgcgttgttgaccggttggcaacaaaagccctccaagagatgtggctgatgccaaagagaagaaagacaacaaaacacgacatgatattttttctttgatacgtaaaagcaagcgatgttctttatcgcttatcgaattctgtcaattgaaacacagatcaggtcagcaagatagaaatatgtgtcgtcagagaggagtaaagacatactgcttcctggaaagaaagattatcatgatcaagccaaaaatgatagaaaacgaggggggttaagataatcagcaaatccgtcgaacggcaaacgaggacaacttattcttagatcaacgtgttgcttaccctaagtttgacaaaggaagaattcaaacaaaggatatcatttagtgagtcgatacactatgcccataagccaggtcgagtgaggagagaaataacacttacatccattcggacacccagatttttattgatatcgtatccaaacgtctgttgtaaaaaaagagagaaagcgatcagttcggtttcatcttaggacacaatgcgaccgatgaattaacctttctctttccgaactcgatccgctcgttttggactcgtctaaggtcctccaattgttgtttacttaagtaggtctcggtttctacagtcggtcttctcaagctagacgaatgtgccatcagatctttgttgggatcataggatgactgagtatcaaccgttcctccggatcgaatcaaatccatcttgacagaataagcctcgatatcataatactgtggtgttaagaggaataggagggataaaatcagaatgtatgtatgcaagatgggtgaccgaatgtatataatcaccttttcatgaggaagcgtagctaaaagtgcgatgcattgacggagacaagatgtcagcaacatatggaccatttgcaaactcttgaagtgaagactaaccagtgttgaaatcctcaacaaataccgcccactctttcttttctttgtccttcttcacagtttctgggttgatcttccgctcttcgatcatccaagctcggaattcctagatgtatgtttttttccgtgcgcaaatgattttgagcaatgaaatcgaaggcgatgaaacaaggggtgaagtacgactgacattctctttgctttgacgactgtatagagagcgatattgacaagatatcagtcaggctctgagaggaagtagagcaatcataactcactctgcctcgtcaataataccatatttgccccattgggcagtacttgaagctgaaagacccttctttttgtcctatcaaaccagagatagtgatctgctaggtcagtcacatcaatcttgagggcggtcgatcagtcagagacaagagggaagaacggaccttcttctctttctttcgatccttcttttccttcttgcgtcgccttcgctcagatcgagactcgtcctccgaatcgtcagatgaatcatcatcccgatgttttcgggagcgttctttgtgccgtcgtcgacgtcggcgttctctctcttcttccgagctaatcgaacagagaatgaagttaccagtcagacttgagattcaagtctctcacaagccgaattgaattggacatactctgaatcagactcggtttcggaagcgtcccttctgcttcgacgggaagttgtgtccttgtatctgtctctgcttcgacttctactctcgctcctgtgtcttcgacgcccttctctacttctgcttctgtcccgtcgactgtccctatccctatctctatctctatcacggtctctagatctatcgtcatctcttccggcgtcccgattcctatccctacgggatggtgaccgagatctctctgaaggccgtcggtcctcatctctgcgagaccgagccggactggctgacttctcctgccaaacttcttcttcgcgttgcggattcgatgacatggtgagaaggaacagttcgtgcgtatgttggttgagctcaaaggagatataagatgtaatgttggagaaaactaggcatgagttagcagtcgcgtggtggttacggtgattaatgtgccattgtgtcagggatgtgacctgagtgttacaccccggtaatcttctcctgcttctgccgttcctcttgcttcgttattccttatgctttctgattgcatcaacatgctggtatatagtctggtagcgcaggtgcttctagcaccttctatgaatcgttctcttatgcataatccctgaagtctgaggatgatatataagacgggtttcctttgccaatcctagcatagtccaccaagcctgaatcctttgtcattactttgtcactccttggtttcctagtacccttgtttccagtatcatatcaatattgttctaccaatctctttgccctgcgccctcgtcaaagagtaacgatagaagctggagaaggttaccggggtgtaacatccaggtcacattcctgatagaatgagcccgcctgatgcaccgtcaaagatgagcgcacaacatcatcatcaacacgagtcaagccatggaaggaacgaacgaagggaaggatacagcacgggtgtttcagtagcagaaagggggagggaagagaagaaactacaaaatgggctatgtaatggactatgagtgaaatagtgactaaatggtcgatcattacggcggacattcgaagaattgaagattcacgtactctcacacactatggagatatgaatgaccacctggtctagatagttcaaattgtagtcgataaactaagcagccgagatcctccgtggcgggcaagaaaggcagaggaagagattaccttccccatcggaagaggcaagtctcgtcagaaggtctaaacagacgcaggaagctttttttggtcatgagattcatcgaatttctcaaccttcacccgctcgctcgcttcccattcttccgtcgttcgtcttcactccttgtattcctattgacctattctatcttgcttcggccgtctatttccactgctgctgacatgatgaaa

SEQ ID NO: 1863 - DNA, 4697 bp, Xanthophyllomyces dendrorhous
caatacatactgatcacacacaagtctatggttcctatgagtagcagctgctccatatcggtggccgaataggtctcttctttatagtgcctgtgcctgcctgtgcctgtgcctttagtgtaatgcagattagatcacccattcaaacaactttccgcccgggtaaacaagaaaaagaccgtcattcagtccctgcttggaaagctgtttacggaaccacacacaacaatgtccatctcattgcgccccatcgcagatcatcacatcaactagagcactttgttcatattagtcggcatgttcttttgctacgggagagagaacgaacaatatggaaaaccaagagaatctagcgaaccactgttcttcccgatcctttccgataaatatcttggccgaacccatgttctcatcttctcgacactttccgtttgactgaactctttctttccggtcatttggtcttctgaatgtctacttaaaatccattccttccttctgtccattatctcttccgaagatctttcccttttttctttcagagtcaccatctactgaagccttagttcatacatacgcactcctttcaattaacatagccatgtccgccttgtacacaaacgaccctgagcgtcagctcgaacacgatcgcgtagagaatgaaaactcggtccctcggaacagaacgatggacaagcaagaggtcaacacactttacccgatcaactctaccacccactggacaaaccagcagtgggtatcttttgcttgtctacggtttattcttgatcttttgtcctttgttcctgaattgagccttcatcctgtctatctgaacactttttcactcgaaggggtacaccagcagctcctgtagagcgtgagcatatcccctttgggttgatctgttttatctcaagattctgacgcatactctccaccttgtaactgtctcgaatgtcgtcctaatcccgcggccgctctgaatcaggtgtacccgcattctacaagacgatcggtaatcgtacgttgcgttctcttcttgtcgtccagccatctctgtagtcagctgaagactgagccttacatcaattttattggtctaaagctggtgtcctgtaagcctttcaagatctgtttcctcgatgaatgaagaagttccgggcaatcacggatcactcatgtctgtttctggaggggtcttgacttcgttcagtggattggcagtgcatgcagtcacgctcatgttactcgccacccaattcatgggctggagaggagtggggagtcctcaggtctacatgtgagttttcctcggacacaatgaattttatcgggtttgtgctaacagatcgattgggtaaaattgcgcgcagcggaaacttgtatttcacagcagggctatacatgttcactaccgctcaggtcagtctattttctcctatatgcttccctctctttccatgcgctcattctgctgacaaattggcttgactatcttctcatacagtggtgtttgatcaaaggagaaaccttgtcctactgtgtctttggagtgttttccggtatgtaattgtcttgattctcttcttcatcacctctcaagctatacatgctgaaactcatacccaaatcattattcgatacaggattttatctttcggcaagtcaatctcaggtttattctggcctacctgtcattttaataacatctttctctctcaatttttactttattcaaatcattgatagtttggagccatcttgacacccgcatttggcgttgcctctacatatgtcggtgaaatcggtagtggaaccggaattgattccgagtatcaaagcttgggaatcttcttgtttgtttggaacggaatcttcacggttcgtcagaagcgctttgtttatgtcttaatcgagcgcgtgcttctgaacgatcaattgaaacactataacgccctcaatgcatcaatctcgatgatatcagatcttcttcttcatctcgctcaagacaaacgttgccttggtggtcgtccttggtggtgtgtccatcggagtattctgtctcggtggaatgtactttgcgctagcaagaaatgcagctggacatggaggtctcggtttggccagatcgtgcagcaaggtgaactctcgctctttttactcgtttcgcagaggttctcctatattgaccgctctacttaaaacattccaactgagcaggccggaggagcattcctgtttatctccgctctctctggattttatcttgcattgtcccaattgagcgcaagtgtcgagatgcctttcacccttccagcaggcgatcttggtcgagtctgggctccaaagaagaagagatcataaactgcctgagctatctctctgcccccggtctccctccctctaccactcctaagcattcattctccctggttttgtctcagggaatacctctcttgggttcgtcgtcgctttggtaggagatgattcccacatccggcttgtcttgttctatatgtatcataagattcccctacgctgttctctattcatgtaactcttatcctttttcttcttctcatctctgctttccttcgttctttgacttgcctttctatcgattctttcggaaagatctcgatcgtttccctctggtcttcgatttctggtcatgttgttcgtttagtttgggttttgggagtggaaataacatgtattttcttaactatatgcattgtacagactggaaacaaagagagaaagaagtcaccacagcagggttccattccttctatgctgctggcaggtcgttgatacaccgtgtagatgaatacgcgattgggcaagtcgaggctaatattatgttacaagagttaatattatctgaaagaagtattgagagttttgacagagtgattatgttaagggtttaggtgaattatcgtttcgagctgtgaagcaaccaggatggttgctctagttgttccaagccttggcgacaaacttgccccacatgttgtccgttccaagaacctcactggacggcgaggttggtccgtaagtcttgaaaacggccgtagtgaggttcagcgtggggtcgatctggttaacgaactttgcgatcgtgggagcgaagaaatccaaaaaaaccaagtccacagggtcctcatccgcgagtccgacagggttgggagaagagatgtaagtaggaatgtcggaggagtaaggaatcgggttgtggagagtatcatctcccaatccagggcatttgtcttctgtgacgtaaccaagagtcaacgtgctgttggccgaccgcgccttgagctcaaggtctcgcttggccgtgtcttcatgggcagctccagctcgaacatagttctcccaagctcgtctgagtacaagcgccatcaaaccaaaagagagctatgtttaagatctgtggacagtatgcaacacaaattagcacgctaaggacgcaccgctgagctcgctcgaacgctccgtccgagttatcgtactccccggcctcttccagtgctcttcgcctgggcgcatttccggtgataagcgcgttgagcaccttgctagcgactcggttgggcaacctagagggcgtattgatgatcaacaagacatactctatctttcgtcaatccctgcatcaaacaggaagtaaactgcttactccacgtagttgaagaggttgacgaatggagagacgatgtagttgtctccatcagtgaaaggtccttggtaactatagcaataaaataatccgaattatgttatcttcaggttccaaatccgttgaagtcaccggtcgacgctaagcatttcaaggaaacaagagcttacaggtcaaatcgctgagaaccagagttgacgataacaatcttggggttggttcggttggcctatagttttgaaagtctctagattgattcaacctcttgtaaaatattgcccattatgtatcaaactcaacttacatctacgatagcggtggggaggacctggttggcgagcacagttagcaagctgtcgttcgctccgtagggggatcggttgaggtagtaatctgtaggacatatcaaagtataggcagacgtttagatttcctaaggtatgagtaaacgcagacaagactcatatcgaaatcatcataaacaggtcccttaccttgggggacctcgccaaggggagtagagacattgtagaaggagacgacgttttgcaattgctgagtaatgttgattccaaccttggtatcgaacacatcgtccctcttagtgtgccaagcgctgtcgtacatcagattgagcgagtcaatatcaagttggtaccatctgacctcaggatgaacctagatataggtatggaatgatgtatacatactagctgtttcggttggcgtcaatgtatcgtcctgacatatatatcaagaacacagtttgatcaattatcatgagcagctgggtcaaagtttgcggcaaagaaaagttaaaacttacggctaacgactaggttgtcggtagtgttgggagcaggcaaagtagaactggcccatccgatggtctccatgtatcttccggccgaaagggcgatggatcgtccatcgtactgcaagcaatctcggatgtgatcctactcatatccagacgagtgaaaggacattcagtcacatatctcatcac

SEQ ID NO: 1864 - DNA, 2462 bp, Xanthophyllomyces dendrorhous
tatctcatcactcgagatagtcaaaaactctcaaaactaccactaacatgaccaccgaaagtaaacacaggcacgtgtgggtgaagggacctgattctagcctgaatagccgcgaactgagagtttgatccttgaaccggcatctttcattcgtagaagtcaagacgtcagcccattagcgcatacacaagacgaaagaccatttgagataacttacatgtccaagaacaaggaagaaatcaggttcttccacgatggcctcgttgaaccaagtctcattgatcatggctacaggatcctgaaccttaacgtttgaagcagctccagtgaagttgaagagcacacctgcggaccagaatattatactgtcagttttcgtctgataggacctgtacatgacacgtcgtatttacgaaccgaaggcggtgacctttcgaccctttcgagtagtgaactttgtgaatcgctctccaataggaacacttttatgttacataaggtcattgatgagagcgcagatcaaagtaagaaggtgatggataggcacgataagagtaagaccggacaaacctggtgttgactccattgacagtgacggtaatgttaacattgctggtcaagtaacgaccgttccacttgggcgcgaagttgtagtgaacatctagaggtgcaaaagtgttggtgagagttggtaagttgttcagacatcgtagcgatgtatgagagcgaggactatatattgtttaccttgcgagatattagccacgtctattttgaaagaaggttcgttttggatatcagatatgttgtgtcaaaaatatcgaagcaaacgctctgaaaactgacaaagttcgtggtttccgatctgatttcaaaaaagaaagttatctagtcaggcgcttttacttttgatttgaacaaaacggtagtgacttgctgcaagtgcatcgtagggaatctatgagaataaaggaagacacgattaacaacaggcaacctagattgatgtgagatcaatgtgatgagagctcacctgagcaaagatgttaccagatcgagctccgttgacttcccctttctcgacggcagcgtcagtggtcgggtttccgtcatgaagatcacctggagacaataaggacagttgaagcaaagcaagttcaagaataataagaatatgatcagacgcagctatctcagggcgcaaacgtaccagagtcgaccaacaaaagatcgacgtccttttccacagccttctgtttcatccagtggatgaacgacgcaaaatctccgaaatcaccactgtagtttggctctgggaacgaagacttctgatgaccgacgagccatccgtgagtgtcggtggtagagatgaagttgacatctccccactggagctctctatcgaagttgatggcagatgtggtatcagtcgttgccaattcacgagacatcataacgttctattaacccgaacatgattgagctcttctacgttcaagaattaacttgccgtgttggataagaaatgcctgatacgtataggcgaagagaacgaagaagctcgtcgttagtcgtcagtcgtcagtcggccagcttacgataagcagttgaattaagaaaccaacccaaagtagagccaggctggatacgctttgcaaaaagcttgctaccggcgtggccaggatcacaggcggatacacccaaagcggagagagcgagaggaagggcaaggagttggccgagcatgaccgaaggaatagcttgcgtttgtgcttggtgaagatttgagaggaagataagttggatcaggtcaagcttacagtgaaccagacaaagttgtttttcatttcatcaacccatgtcttgttatatgaagcgaccagagaagaattcagagaattcagggtaaagattgacaagttttccatctgtttgagatcaatgatggggtaggttgaaggggatgagatgcaacacgttgtccacctcggatcaaaccccatagtgtcagcgtcaactgatcaacaacatggggaaatatgagatgataaatgatccaaaaaaggaaaagaaaaaggctgggcaagaataccaagttctgtgacgataggtcaattcagccatgagccctttttttagacccacgaggaaaagtttttggcatgctcataccttccgtatcttatggtcagcaacgtgttcatcaggaagctcattccctattgaacccttcctcaggtggtttgattgttttctggatatcacgtttgtgaagtcgtttgcacgtgctttctgttgagctacaggacttctcaagaaacaagaaagagaaatctattcgacgaagagttcagtcaagaatgaaagttatttacggtgacgagaatgaggagtaaaagagagaaagatcacaagggattgccaggcttataagtaaaacttatgactgtatcgtccccccc

SEQ ID NO: 1865 - DNA, 2417 bp, Xanthophyllomyces dendrorhous
gggtgatttgtactgtcgttcagcaagactgttatccgtataagtaatttaaatagtcataatttctataatcgaataggctcagttaggactggtgtagtaatggagtaaatacaacacgagaaatttggaaggtacatggtctgacaagaacaaaacgagaataataaatgcttcagaggttgagaagagtgaaagcaagcgaagaatagtcagaagtaggtgggtttatgaaacagcgcaactccgttcagaaccacgtttcatcctctgtctcctcctcatccactacgtctatcaccgcctgttgcggcgtgcgtctatctatgtccgacgcaggattagcatgcgagtttttcaattcccgatggatcgctgtatttgagtctggtctcgggtctaatgttgacgctggatcgacgtgagatgtaggtttagacagccgggttcgggaagaaacaacagcacgatgaggcgtgagaagggtcgggatatgggttctgattggattgaatgtgggatagcgctttcggagtgttgaatccctggaggtagattccgaatctggtaatgacgacgaagcaggattggcggcaggatcactgtttgacgaactcgtcgaacacaaagccggacaagaagaccatggggaaagaaccgatgaggaatccgacgatgaatcttcatcgctcagatccgagctgtcatcgccccgctctccctttcggccaaccgccagcgcagagaccactggccgatctttctgctctcgggtttctccagcagctacccaaatctcagcaagtgccattaatcctccttcttgcatccacctctcatcttctgccttgttttccatcaacctctcgctctctatttgtgagagcatggagctatcgcaaggcagcggtgacgcgacgtcggtgtagagcggtgatgaggatcgtgagcagcgaaacgaagagggaagatatgactgaacatgtatctggatgggctccatcagatcagtttcttccaattcttgagtagaaaatgtttctctctttgagtcagatgagtgaaaaaatagaaactatcaatgcttgttcgatgtaggagacgattgcagacagaatacgtacaagagagaaagcacatcctcgaacaatccatgcccagatagtgtgaaattcaggatgagtacgagggaaagctgcggcttgaagggcctcatcgactagttttcgaagaagctgaatgagagtacatcgttgacggcaaagagagaggatttatagaaaagaagggcatgtcagtgaggaccacgcagcggataaccccaagagaaagacattgaacaaacaagtttgttgagtgcggcgtaacctgcttggagtgtttctctagatgcttgtcttcttcttgaagtagtttcgtcggatgttaatgatttaccatcttggttttcctctccttctctcactcttcgaagtcgttttgatcgctccttgatcggcttctcatgcatcatcctttttcttttcataaccctcatcccttcaatgccccttgctggactcgtgatgacatcttctgaatcctgttcgatcaatacatcgcctcttgagactttgtctttgaacaactcggatttgataggtttgataggtccttcacccacctctccatctgaagaaaacggatgggaaaacccaacgtctgggggaggaggagggcgagtggactgagttttcagctgagttcggatgttcggccgggtgtttacataggccggtcgggtattcgtcgttatacttgttggtttacgtagaggaaggatatgtctagatagctcgacttgagttttagaatttgaggagcgacgtgggagaggaggcgctactgtagaagggctcttcgaggaatatttgagcggcgaaagatctgattgaacgctttgtgtgttttgatgtatccaatccgttgatttcccttgattatttcctaccagcctttctctccttcccttttcttcaactctctctgctttcaaatctctttcctctctactctttctggcgctcgtgttttcttcctgacttccccctttcttctcctcgtccgcatctgagtctgaatctgatgatggtgacgatgacgatgattcactcgaatcactggacgggagtatgttcttctgctcgatgtcaccttgggcctgcgctgtctcgatgtttggctttgaagtcaagtacaagctagacttcttcaatacgatccgtttgatcgtagtcgatggagcgactgatctgtcagatgacactttagcagggatcgccgacggagcagtgaatgtgaatttcgatgttggaaaagacgtgttcttcgcaatgttgacagtcttttgcccatcaagagaggaagtataacaggac

SEQ ID NO: 1866 - DNA, 6723 bp, Xanthophyllomyces dendrorhous
tggtagagctggggacggatgttgaaggtgtcggttgtgagacggtcttgctggtagctaccacggggacatcagttgattcggcctctgttttcgagggccgaggaagctgcgccggactgactatcggtataggagagggttcccttgagctagacagaattgatgatgcaatagcgacatttgagagacgaggatgacgaggagagaacgttcctcggggtcgaagccgacaagatggagttgaaccaggggctgacatctggctatatgaagccgacaataaacaaggagtgctaggagcgctgcttgaaattgctgactcgatcgatgctgcagatggtggaggggaaagaggagtagtagacacaggaaaagggacggcgaagatgctcaacgacggcttcttggattttttacgctctgtctcggaattcaacgcaagcggagtggatttgatgccatatatcaagagggtgaggtgaggaacatcatgatctggatcgaagggcacaaagtcaatcaagagaccgtgaagagttcgaccttgagtgtcgagcgaaagtgacgcggctttgggttccgggatcagggctgcgtggaagtaaagtaatccagaaggctgggtggagtgcgttgcgcgtctaatttgaacaggaagagtggagtgttgtgccaaagcagaagtggggcaatgtgtcaaccaatcgacatcaacggagatagacgaaagagaatgaccaacatcttgtaaccagaacgaaggtcctcttccactgaatgaatcaacaccccagagtcgagatctgctaatttcacaaccgaatcaggaccttctctcaccacgaattcaccttcagaggcttcgttcttcaaacgatctatccatgattttatagccgcaactttgggtgccgctggtcggccagcggtaagattgagtttgattttccgaatttgtgttctttgtaccggcggggaagatgtttcggctgaagatggatgtgcatgatgcttgaattgtatggaacttcgtgaggtgatgagggatgtttgagcgtctaagtatgtcgagcttgaggaggtaggtggaggcgagggaagagcaacggattctccagaggaaagagaggtgatacatatacctggagtcggggtagaaagttcagcacacatggtcgggataactagatgatcaggaatgtaaggctacctaccatccagaggcttcgagggtgttctcagagaaccttgccagatgtttgtgcgcgccatgacccctaagcaagttgtgtatgctgtaaaaccaaggaactgctgaatccgatagatatgcttgtatgtgttctgatcttgacgttagtagaaattacttgaactcccatagcaattcgagcgccacatacacgtgcgcgttacgtcatcacgtattcgtcgaatcgactttcaccactctctggccatctcttcttcctttattcctagctatcactatcctttaatcaaaccatgacatccagagctcaacctgatactgagccacttcttccaccggcacgaggtgccgctgctccatcccctcgaagaatcactcgggcttcgatttacgtcctcgtcgtcgctttcatcctcctctttgccgcggcaatcacattgatcttaactggcaaagcatctccatctttctggaaagatgaagggccaagtgatcctctcgagagagctcattggctcctttctcggtaagttttcctgttttctattctggcccttcagaattgctgtattgatgaatgtaaatgcgctctgatttccacaactatagaacgaagaccccaatcatcgatggacatattgatttgccagaatacgtccgaacgacttattccaacaatgtctcagaagtccacctcgacaagaagatgggaggtcatgttgatatcaagagactaagaaagggtcacgtcggtggtttcttttggaggttcgtttctattgttttccttaatcacctctccacagtcgtgggttaaacccgaccgagagaatatgaacacgcggtactgaacaaggatgtatgaatccatgcgataaaaacgacagttgttacaccgactgcccagaggagcctctgttgggcaaaggccagttcctggatcctactaactctgtccgaggtaggtgcatccaatatgataatcatcagttattattatacgatcccactgctttgactgatctgtatctctcctttcatgatagatacccttgaacaaattgacgtttcgaaagtactcattgccaaatacaacactacattcgagctagctaaatcggccgatgatttaattaacgctcgaaagaacggcaagattgccagtttcttgggaattgagggagctcatcaactcggaaactccctcgctgtactgtacgcagcttctggatactctacctgctttgtgtgcagaaaggttgtagctcacaagggctgctttcttttgtcgtagtcgaatgtatgccgagctgggagtcaagtatatgacactcacccacagctgcaacaacgcatttgccgattctgcaggaatatttgatcagcctactcctgttcacggcggcctctctgagttgggtagagagttgattgtagaaatgaatcgattaggagtgattgtcgatttgagccacgtgagtgaccaaaccgctgagcaagctttggatctaagtcagtcattttcgctgcttgtacacaaaccatgtggatcaactcgttaatctacttcatgcatatgcagctcgagcacctgtgatatggtcccacagttcatctagaaagtttgtcgacattcaacgaaatgttcctgatgcgtaagttgcactcattcgcttcacataaacactgatcgtctccgtaatcatcaggctgaaatgtcagacttttcctctatcaacatttatcctcagtattcttcgtaagattggatacggcaaaggattggtggacggagtagtccatgttaactttgccccctacttcagtacgtatcatagacggtctctatttccacacatcaatatatgtacgaaacgctgataaagtacccggttgagtttccagttgtcaataagggacagccagctactgccgaggtcgttgcggatcatattgaacatatcagatctgtcatcggatggaaacatgttggtcttggctccgacttcgacggaatcggtacgtcttttgtccatttcaaggaatatagggtattctatcaagaacctatctaactttggcttttttctttcctttgcatgttttcttccagagatcgtgcccaaaaatcttgaaagcgtggccgactatcctaagctatttgccattctcattcgacgaggctggaaagacgaagagctcgaggcgctcgctggtggcaacaccctcagaattctcagagaagtcgagagtgttaaaaggcaaatggaggaggaacatgtgggcgcctccatgggccgatatctcaagcgagatgacctctaagtcgactggtttgaagatgagcagctgagaagcaagctatgggaatgcgggagcttcggaaagttgccgcgtttcagtttgggtttgaaaaggcgagagggtagtatcaatcgaatgaatattgcgtttataagatgtcccaagaaagcaaagatccagcatgtctgtcgaacggggttctgttcagacaagtcttgttgatgtattcacgtcatcagttgctttgtttggcaaatcctcccgctaacttatagaattccgtcttgtctctattcagagaccacaaggcctgtagttgtcaacgtgaagacatcgtacagctttcatttatattcatgaaaatatattgagcgaaccaaacaaagaagatcttcagagtggtgattttcatctagggaccgataaacttctcggtggtgtttgatgagtttcttgaggaataggtccgtctaattcctcagtttcgtcatctgtagatacaggggtccaacgatcttcaaccaggctttgtccatcaacaccgaccaccaaagagggtgttgatgagtagaattctggtgtttgaacgcctgtgtcttgaagatcttctacgatcaacgcaggagacccaaccctcctcggggtcagttcttggtcattggtttttctgattctcgtggcgggcgatgagggtcgatcgaactttcctgctcgaccacttttttcaccacctgtcatagtatgaagatgggcttgcctggccgctttgcggaacccatagtgggaattggcgctcccagaagggtgtaaagtatttctcaagcgggacgtattactattcaccgaattacgagcatgagtttcgattggtgaaacagagttgacaggatgatttagaggtggaagaaggagagaggaggtaggagaagcgaaagatagaggtctacgagtcggtgtgtaagtcgaatttttttgacgaggacgaggatttgggtataggtaagtgggagaagacggccgaggggttggatccaaggaagaatcttcaggggatggtgaagttggtcttttgatggaattcgagcgaaagattggcgaggctagcggaaggcagataagaaagagaatttagacagcaggaatggaacgtatacaggataattatgtcttgaaaatataaagagtaacatactcgctcttcgatatttgtgatcgaaatcttcgcttttgcctctccgatttcgctctttgctccttcctgaagtcttggacacaagatcaattgcaggcataacctcagccgacccaatttgtacagcgaagaagcaagcaagaatgattatctaaaattgatcgaaatgctttatttttgagttggagtccgaacaggagattgaaatttacatagctagatgaatttggcacataccataaggacaatagaagcggttaggagtttgcggtgtaggcggacttcagtctccaaggcttgcagccgacgattcaaatcagttttgtctcgatcgaagtctctgcgttgacgatcccaatctctcaaggtggatttcaacatcttttcttgttggcttctctagattttatgaaaattaatgacacagcgttagacaatgagcaacttaatctaggtcttcacgaaagagattcaacataccagtccttctaagccacccgcccatctctccctctctttgctatcgaaactggccttccacgtttcccagcgtccctctagaccgtgccaggcctcccttaggattctgacttgatcgtcgacataccatgtggcgagagatgtattgtcttccagagccgtcaatcttctgatgatgaatgcatagatagattcaccagaatcagagggagagggaggagcatggtggactgctgattgggatgaaggaggtttagaagaagaacgcggaggagaggattgagagggatacgcaggttgttgatgggcatgagaatgattaacggtagagatagttgatgagccagaggaaggggaaaggctgatggttgatgcaagaggagagttggctagcgaaggtatcgatgcagaggctactgtctgggcagaagaagtatgagaaacgaccggcacagcttgtttatgggaggcttgaactgagcctggcagaacagtcgacaccacctttagagttgattgttcggcctcggctgcactttttggcgatgtttgcggttttttctttttcccggttccaaatctagccttcagcccactgattttctcctctttcagcgtctcttctaccacctctaccctcctagtcgagtctcctaaactcgtgctggtaggcttcaaatgttccattccttttcctccgcttccttcttttaaatgtgatccaattttgggaataaatataccgacaggctctggaggaaatgcgtagtgttctatgaccggcgcggcctctacttcatgtccttcttcgtcctctttattccatctggcgagaagctcttgttccttctcttgcatatggacttcgtatcgatatgcctccatttggttcatcccgtaaactcgaagtaaagacaccggacagtagtattctgttccgtaatgggagaggaaatccagtcgtatgtatcgatgaaatgatgtaggtggatcgaacttgaaagactactcttcccacagaatgtttgtggtttgaccataacaagtgttctatgaatttagcgattatatttaagtagatcaaagaatgaaacacgaacctgcatcccccgaatgttagccaaccgaacggttcctaaatctttccatatatccccctgtgcatcctccctaccgtttccttcagactcccctgctctgatttggatatcttttacaacactagaaaagaattcaaagttcccgatctcgagagtatcgattctaatctcgtcacaaagttcgatgacgacataataggaggatgcctgacagggtgtcaacatgtatctgtctttagatttgtgaagaagtgcagcaggtgatcgggtctgtggagatgagtaactgttcatcagatgaaggtcagatcgttatccaaagaaccttcaagtacgatgtttggaaaattataaagataaagtcatgtaagaatgatacatactgaacccgggcggaacagtccaaggatgcataattgaatctcctggat

SEQ ID NO: 1867 - DNA, 19615 bp, Xanthophyllomyces dendrorhous
ctcctggatggtgctcggatggaaactgaaggcgacggagcttctgaaatggatttagttgtgtgtgatatgtctttgaaggaatctgaagatgccgctgggtgaacagggctcgttactgctgatgtatttgatgacgataatgacgtgggtgtcactggaatccttgaattatgtgcatccaacgaggaagcagttggtaaaactgagctgtaaggcaggccagtagacaacacgtgtggtgcactggatgatgtatactccctgtggagagaatctgatgcattttgggtctgaagcagccgagaatcattcaatggcgggagggaagctgatggagaaggaggatgggtgatggaatgtcggttggcctgtttcgataattggagagatttccactcctcgaatgaaagcaactggacaccaagtgcggttctttctgcagacaaggttgctgttgaagaagacaccgggagcgagctcgaatttattttcgtaggtgctatcgagggagtaagattgagtgaagatgaggtagcctctgaccaagatgtctgccggggtttgtcagtcgaaaaagacgaggtgctgagcgaagtggtcgatgaagatgagatcggtgacgatgatggtgggctctcgccatctacctgctggtcgagagatatcgcttgctcgtccgtgtcgttttctagccaatcttttgagtttgcctcttcccttatctccccctcgtcctcaggatcatcgtcaaaacaaacatccttgcatccggcagagtgagcttcgattctgtagccgcaagattcgcattggaaccggtcagatccgagagctcgaaacggatccaccgcagtgaatagtgaagaagcagcaacgtctgaagatgaggatattaaggaagatgaaaaggtcgctgagtaaacctgactggtgaaggaatagagagcgagagcatggactatgagtctcatcggagatgttgtcgatgagaagaatcgagtgaaccaagaaccttgttgatcttttcttcatcttttgatttcaacgactgacccagctaactcataaagtcgaccatcatgtcaacatcccttccgttacgtctcccagacaacaaggattcacttccaatcagaattaatctatcagaacatcagcagacagagttgttctcaagttggaaaatggtatttgctaacagattatcctctccatggcatgtaaatgattgaccctgagactaaaaccagttcgtaccagatctgtacataaccgaggagtatacttcatcgctttatgacgcacagaatccaggactgaaactgaacgggcaatcagatcaagaatgcagtagtgatgatgatgatgatgatgatgatgatgacgggctggaagaaaacatttacggctgctcgtgctcgtcaagcccatgctgtgatctcactatatcagcctcgtctggaaacaccgacgactgccaatgtataggaaactttgtacgtcgttggctgcctctatctcattcatcactctgcatttcgaaatctgaggtagttgattgctttttgacactgaatcccagggtgaacatgccacttcaaagctgctgttcatgttcatatatcatttgcctcgaagctgatgtccctcccttcttctgtttcccaatctaggccagttcataagctttgacggctcgacaccaaccccaatccttcacctacctcatccagctcacttacctctggtggaatgtggaccgttatgtcaccctaaatcggatggaaacacgttgtgcaaaaatcaaatatccaagacaccgatctttcccttgtaaatcttctctcgtcgtcttttccctttcttcatgttcaccattgtcgtgagctcgtcgctgaaacctattgcgctctccttcacgcgtacatcacatccaatcaagccttgaactccgttcatcccccgtctcatcttttggtatattcacaacacatccgatccctaaaggtgcattcatatgcacctacgcaggtgaactcatcacgtcttcgtctgcgcggaaccggtggctcgctcggtcttccagaaccaacgttgctgttgatcatccttgtaagaggactgaggaaagttcagaagatgagaatacatgcatgaatggagagatgaactatatattctgtttgagattaggagtcaacgacgtctacatagatgctggctctataggtggaattgggtgagtaatcattttgtttcactctttgcacaacgatcttcctcttgctatatgcagataactcacactattttctctccccaatgttccttcctggaacaaagtcgattctttaatcactctcactccccaaacatcatacctctcccaacatttcagcctcccagccctagattccaaagctttagacgaaccggttccctgtcggtgactccgacggtgatgccagagacaaacgcatcaacaggttcaacaaagacgacgtcggaagcgacgatgactccacgcataggattctttgcaaatcgaaggataagtgttggtgaggagctatgctgggattacggagacggcgcgtctctctccgcttcttcctcgaatgttatctcttctgctaccgcggtggctgatcacaaatctgaaataagaagggagaaattggaacatctggatgctgacaggaaaggagtaacaggacggaaagttggagaaggagcaggtaggctgccgtgcttctgtcagagtgaaaattgtgacggatatctacctttcgatgataatttatgagtagattgggtacttccagccatgagcgaggtaggaagtcaaactagtcgagaacaggaggcgcatcggatcgagttttataaaacaatcacatagacaagagagagagaagaaagaaaataaaacaaatagagataacaaggcgtgaacatggttaaacatgcaatctaatctaaggtgtccaaggttgagtatggtttgaacggttagacataaatcagaagaccgatatgtttcactgatcaaatactctaagatgaggaaagaaagttgtcaagccacaaatcaaactgttctcttgacatcgcagccctcatcgaatccaccgttcttgagctcgttggaccatgtcctgacgcccacccagtttttagtaggtcgtcgagtaaggactgctcgagaatcttctgtagaatattgagaagacagaggggccagagcaaatgccatgacaagctgcgctgtaaagagtcggaggaataccaactgaaattcacaagagacgatttgttcagactggttagcttgcaaaagatacaaccatgattgaagaaagtgtggatacgacgaacagccatcttcagtccaaagcaagccctaggcccagctgcgaaagagagcattggtcccgcatctttatcgaaggtcccatccggacgcaaccatctgtcagggttgaacctatggatatcgttcttgtctgacctccagccaagcttaggatcatcggaataaacggcacatgaggtattaagcaggcacattgcgttaaccccggccggaatcaagtgttcctggccgtctggaccagtgacggtggtctctcgaatacctagtatccaggcgccaagatcattagtctcatcatccgtaatttcaccaatagatgtattcaacgcgagctacccactctgtcgaccaacggctcgaacggtttcgccatgtctcagactctcataaaccacggcctcgaggtctaacacgtgtcaaaaccacaacaatcagcgagcttaagtttgcctaccgatcacgccaatgttggaaaattgcactcacaatcacagactccattgccaacgatgtcgtcgtagtttgggtttcgttcatcagaggaaggaagcgatctggtcatctcctcatggagacgactttggacatgaggattctccgaaaggaatttgaggatctatatggtcaagagacaaaagtgttaaacatccagccggtcgattcgagagatttgagagaagatactgacccaacacattgtcgttctattttgagctcgtcgaagagaagtaggtccattgatcagcatcagcagaattaagcgtatgagaaagacacttacgaggtcgtttcttctccagcaaccatgactaacatgaattggactcatcgttaactcggtcaaaagagacactgctagaaaagaaagaaacatacaagtcccaagctcatcccaaagctcgtcttcaggaagaactgaaccaacgcccgctttggcttctttcgcaaggatcacatcaatctggaaagaagatgattggagacatgagagattagaggatagtatggacagattttatcaaatttcatactcacaacgcaagtaatctctgcgatctctcctccgttcttaatcttcttcctggattcatcgactcggccaattagccaacgtctaaaacctccaaagctagattgaaaagatcaagatttgtgagtactaagtaaatgaaaataagcgacatgtggcaaggtttgcgcaggcactaacgcccgttgataactaggcttcaagcgctgaatagcatgtttaagccctggagcaatgccagacgacaatgactgagagttttgatgaatttagaaatgatgttgaaaacaagagattgaacacacagtcagatatgacctaggaagacaacctggatatttaaagtgtcagtacaacggtcgactcacatggaagatgtcgtccatatagccagcgatctcgctttgacccttggatccaggcttcctattcaagtcctcaagtttcaggaaggtcccagatggagactcactgaagagctgaatttcccggggtagttgatcaaaagactctccaaaaacgatttgcgaaatagcatcctaaatttcaagatgtatgttggaagatcagatcaccttttttttttgatacaatgcacatataatgagacatacagtggtcaacatgtgtaagtcgccttcggcgtcccagaagacatcagcgatctgttctcctgctccgaatttacattctgaggccagttgtagcttgaccttccacaagctcatcagccgagccatatgaatagcgaacacatcggccgagattgagatgaaagcaggagacatggactatgttccgtttatttgatagcgtgaaagtttgatcatatcgtcataagtatcaaggaccggcggcgaattagatgaatgagctatcttacaggagccagggcacgtcgatgaagacgaagcatggaatctacaaaacaagtgatacgttaggaccggcaatcttcatgttagcacggttaatcgtcaacttatgagacgtacccgttttgatagccaacatgcccttgggagtcactccaccaaagatgccttgcatgagcgctcctcggtcccagtccttactgttcagaatctgatcgttcagtctcttgtcggccacaatcaagactggttcatacgcagacttcatgaactgcgacaaaggtcctaaaggcttgacgaagctatctacgaaataatccctgtagggtttgagtgatttgaatcgagttcagatgtacacatatgtatatgtttttagaatgaaaagtagactcaattgatacgttagatgagattataattttgcacaccagatacaaagttactaacgagacggtttcatgataatacatatgccttatgagctcgtgagcatggcccaggatgggaagcatcggcctggagggaatattcttgatcattccagggcgaagaacatagtgaacaattgcggcggcgaggacacagacggcagcggtaatgaaggaagtctgaagagaggacatcctgggtgtacgaggagaagagatgcaacggaaggcagacagaagtgactgtttgaaatcaacgagagatggttggctgtagtgaggaggactgtcctgaaacgactgagatatagaggaggatcaaagcggaaagatagcaacaagagaaggaaggaaggaaggaaggttggatgcttgaaagtgtatgtatgtattgggtgcgcgcgttcttggtcgccctgttgaacaaagaaccagaaaaacacggatatccctggtgcctgtatgatggacacagtcaagcctggttagtcgtcagcttgttcctgttcctgttcctgttcctctctcttagctgccatgcaggtcttggttagttcgaagcatccttgttgtgcgcggggtctggcgtgcctgtgttcctgtgttggtgtgttgatgtcaagctggtctgctcaggaacgaagggcgctgaagcgacgagtcggttagggttacatgacccggtggccacacgcttacataagcagtaaccagccctcgcaaccaacaccttccccctgcttgctctctcattttccaccagtacacaaaattaatcctaaagctatcaacttttcgaccatctgagctctcccttctcgcacttgcacatcctcttgatcacttttgattgcgtctggtcaaacaggaacctttttgatatactggtaagtatcgattccaaatcttcttgtcattttaatattatacagggacctagcggaattacagatggggcaaatgacagtggacagacatcatccctttttttcctcttgcttcttttttttcttcttttttctctgccatgcttctcttttcctatatacctccaaagccctgcccatcttggacagatagcatggttaactgattatgctgctctcttgctttgttgtacacgccttcggtcgccctgttcaacacacgcttgtccaaataattccttttttcttgccttcgtccatcctggttcaatcactactcagatacatcaaaaatccctttggtcaagcctataaaactataaatcatccctcttcaccacaaattctttcttacaccaagtttatctcctcccatgagctggatccctaacgccgacggagtccgtgaactcatctctgtccttcgagattcgacaagtgacgacagtgccgtccaggcccaggtgacgaagagactggagtcgttcgagtcgatacctgactatcccggatacctcgtccatatcctcacccaggcttctcaggaagatgaacgattccgagccgttgccgggttactgctcaagaacaacctggcctctttgagctcgtcttctcctcaggtggtcgcctacgtcaaggccagcgttctctctgctttgggcgacccgaacgcaatggtcagacagaccgtcggcacggtcatcgtctctatccttaccgctgaaggtgttcaggcctggacagaagcgcttggaacgttagtcgtctcgttagatagttcgaacgtcgaggagcaagaggtaagtctggatatctctcagccttttcttcctttcttgaagtccaactccgtccggttatctaacctattagatccatatccattttttcgatccgtctcttagggagccttctcaaccctcgctaagatctgtgaggatttgccgaaacagctcgatcttgaaatcaacggccagcgacttctcgactttatgatcccccgattcatcactttcactgatcacccgaaccacaaattccggtctcaggccattggatgcctcaactcgttcgttgtcacgaaccccccatcgtttgcgaccaacatcgactccttcttcactgccctcttccgtcgagcgtctgatgaaaactcggacgtgcgtaaatcagtctgccaggccttgactttgctcctgactgccaggccggacaaggtcgttcccgaattgtcaaacgtcgccgacttcatgatatattcgatgcaagacaaggacgaggctgtcgcgctcgaagcctgcgagttctggcttggatttgccgagtctgatgacctcaaggagcacttgagaccgtttttgagcaaggtcgcccctgtccttctcaagggcatggtctacaccgaggccgatctgatttggctagacggagaggaggatgatgcggcagtgcccgatcgagcggaggatatccgacccaaacactacggaggaaaaggccatgggttcgagcatgacgagtctgaaggtggcgcccttggcggtggcggcaagtcgagagcgcttggagaggacgaggatgaggacgaggacgaggacgattatgacgatgacgaggacgacgatgatgatttctcttcggaatggaatttgagaaaatgctcggccgctgcattggacgtgatgagtgtggttttcgagaccgagctactcgagatcctcctgcctcatttgaaggagaagctgttcgattctgattgggtcaacagagagtgtggtatcttagctttgggagccatggccgagggtaggttcaatgctgctttcaacagacttatatgcgtctcccctctgatcatattttccaaatatactcgaatcatttgacctattcaaaatttaggttgccttgatggaattaccccccatttgcctacccttattcctttcttgatcaacaccttgtcggacacaaaaccccttgttcgagctatcacctgctggaccatcggtcgatactccagttggtgcgtcaatgctcagactccagaggagcaggcccagttcttcttgcctgccatggagagtgtaagtcgttgttctattgatgtatgttggttacgaggaacacggacatgcgttgattgagaaacctcttatctcccatatcctcatattttgcagctcctcaagatggttctggacaacaataagcgagtccaggaggctggttgctcagcctttgctacgcttgaggaagaggccggatctctactgcagccattcttggagccaatcgttcgaaacttggtctttgccttctcgaaatatcaacagaagaaccttctcatcctctacgacgctatcggcacgttggcagattccgtccaggaaggtttgaacaaccctggattgatcgagatcttgatgcctccgttgattgcaaagtggaacgcgttggacgatgatgatgaggatatcattcctctcctcgaatgtctctcctccgtcaccattgctgctgccgagtcctttgcgggttacacaattcctgtctatgaacgatgtctgaagatcattcagaagtctctttccgactactggcagatgcagtctggagccgctgttgaggagcccgataagactttcctcatcgtcgctttggatcttctatccggattgactcagggcctgaaggagaacatgtcggcgcttatgagtccggcaggaactcccgagggaacgatgcctttggcaatccagcttcttgaaaactgtttgaacgtaagtgtcatatctgtttcgaacctttagtcatgaacacgttctgattgtatgtgaataattctcatgaacagcacccggaacactccgttcgacaatcagcctacgctctcctaggtgatatttcgatctcttgcccatcattaagccattacctcccgttatacctccccaggatcgccaaagaaattgctgatcaggtccaacacccgaagtatgaggaggtcagcgtgtgcaacaatgccgcctgggctttgggagagattgcgatgcaatgtcgacaggccaacgaaggtttgtctttttatatcttgtttgctgcaacaaatgatcaatcagatagttgatatcaatctttttgttttcttctatgtatatttacagccgatcctgctcctcctcttcgggctcatctcgagcctcatgttcaaggtcttaccgagtgtctggtcggtattttacttaacacaaccactcccaagtcactacttgaaaatgccgcggtaaccatcggtcggttaggtttgatctacccggagatcgtatcggtcccgttggcctcattcggaaaacagtggtgtactactctctgggatatcaaagacaacgatgagaaggcatctgcgttcctcgggttctgccgattgtgcatgacgaacccgcctgggatcgtgcccgatttgatctatctctgtaacgcgatctgcaaatggaccactccttcggcccagttgaacgataccttcagacaggtccttacttctttcaaggaaatgctcggagagacctggaacgccaacttcccgacgtttcccccagcgttacaagaacgactgcgatcgcggtaccaactttaatgattggttcaaagcatttccattctcttgtcttattaatctttttggaactttgaaaaaaaaaaacccttcctttcctttcctttcctcccttcatatctcctgcacctcgcatagttagctctttcctttttttcttaatcctctatacaaagtagcttagtttagtttagatcatacccactctcttcctttcttgttgaattattcttcctcacgttttatctttacctcttggtttttttctcgttcttgtttaaacaggtgatcacaatctgcccttttttccattgacgttcaagttttacacatttatttcaacaataaaaacactttccctcttcttgattctacattcgttctcaatttatgcatagtttagtttcccttatcttcaatttatcaatctagtttagtgtacctttcttcttctatatacgcttgctccatcaagtccatccttctcttctacttcaaatctgcactgaatgactgaaacttgaaattgaaattacggtgaccgaaaaacaaatatcaaaaccaagtctacattttactgttcaacggcaggaacgacaatggcggcaatttgggacttggactccatccgtttgtcgagaaggccggtcagaagacaaagaatgagctgaaggacacagaaggggatgaatgagagaaaaagtgataaatcgttctatccaaccatcacagatgcggccttccttatgggttccgccttcatttcaatatccccgtcctcatcttcatcacccaccccattgccttcagccgacccgccgatagaaccattgacagacccagaaccagttgtcggtttgattccattcgtctttgtggtgatatttcgatcggctaaggggggcggaatcacaggttggacgggtggccctttgggtttcttggctttcgtcttgatagcattcggatctttggccggtcgtttccagtttccttttccaattccttttgtttccttcttctttggtttcttcttttcctggggcacctttggcacgttggtggcctttgctcctgagtctccctttcccgccgacttcttctttcctgtgacctgctgcaccacaggcggaatcggaatttgagcgagcgagcccaactttcgaaggatggctgggtcgaaaggttcatccgccaagacggtactcgcaggcaagtcgctcaacgttggtaccgttgccgtgtttgagatggaatcaggttttgttactgtaggtttgagctgagatgcagttccatcggtagacgcagaggcaccgttgatcgttggtaaaacaggagtgtttgaggagagaactgtaggcgtggatatcgaaagagggtctgttgaagaattggcagctgcatcattgatagcaaacgatgatgaaggaacaagcgtctcaggcatgactggagcaggcggaggaggaggagggggcacaagtttctggaagcaagcttgatagaaagattggagcaatccaagctgtgcaggtacagtgcccagagagagaggaaccaaaggtggtggaagaggaaactcgagttttggttctttgttgctattcaaagtagaaaagattgtacgggtccgggcaaaaatgatgcaaggtcgacattagaaagaaacatgcatataaaagaaactttgcagagaacttacatattggacaatatgggtcgtttctcccttccgtgaaagagtctggaagggacagagaacgaagagagaccgaactctttgtcgaggcccaactcgcggaatccaaagaaatcttcgcccagatcctcggtgaagtttctattgccaacgatcagaaaagttagccatgttgtcaagtaagagtttcgacataaaccaactcacgacatgaacatctctccatcccctgcgaagagtgtatcatcttccagcgccgtggtctcgagctaaatttatagatcaaccccaagatgagaacaaatgctcaacaaccatcttgccaaggatatgatagcagatatggaaacaccgtacagtctcatcataagcctgctgcattttctttgctagatcggagattttggcaccgtaacgttctatatcttcccgaacatgtctctccagttgctcgaccttagtcgtgccattttcgaaaagcgcgtggagaatcatttcctttgagaagagagacgaaacgtcagcaagatacacgaaagaaatatcgtcttccaaactatcaaaacagaatcaacacttacctcagcagacatgttccgcgcttgggtatctaggtagtatcgcatcgttcgaccaaggttcatcagataatccgacatatagcttgtcagggagtccaccgccgtttgattcccgcctaccagaaacagacaacagacaacagacaacagacagaatccaagaagaaggacgaaagcggtgactgtcagctacaaacctcatctcacgaacaaagaagggcaaacatgatggcaattaacataccctcaaatccaacatgagccaacaccgtactagtcaacaatttcattccctccagtgcctctctactcgagatctctaatccttccaaagactttcctcgtcctgcgtcccctggcccaccgtttacgggtatcctcctactctcttccctcagaattcgtttttcttccctctttctatttgactcgacgtcatcttcttcttcttcgtcctccgtcgttgttgcaatgaccatctgcggaatttgatcacctctccaggagctgttgcccccctgagttcctccttgccctagtgagttgtttgaagagagataggttggcctggaaggcgattcgttcccttccggatctttttgaatgttggagagtttactgtgggctcttcgaattttttgtaaggaatggatattttggtcaattaacgagggtaaagaattagggtatatagaggaaggtgcggcggtggttgctggagtaggttgagatctggtccagtgaagcgaaacaggtggaggaggcggttgtggtttcattgatacactgaagcaagtatacgcaatataaggtcatgagtaagagaaaacgaagcaggtcagcaggaattgcacactttcctctctttctataccacatcaagtattgaaatgaacctctgcttacctttctctttcctttcctttactcagtccaatcttctttcgccgacgtctccgaaaatcctgaaccataccgatagtgctcggaagaccagatcgaatcatttccggctttgaaacatgactccaccatttttcatctagatcgtcatcaacacttcctcctgaggttgagccagtgccagaacatgcaccagcaccagcaccagcaccagcgccaggcgtcccgtcatatccagccttctttgatcctatagataacagagagacatccttggttgagcgatggtcccatggcgctttatgaccctcaagaacctccctggctttcctcaaacccgagcttcgagtctttggaacgatatacggggaatttcgagtaggaattcgagaagggccggcgacaggttgagacgtatcaagaagggcagagtcgagttggtaaaaatcgaccatcgaggtggacgtcctctgaagtagtggttgggatgaaagaggaggagacatcgggcgggattgtgaggtcatctgacttaatccagactggtcgtcaaaagaaacaagtaagtgttctcttccggcgggaatatccagaatgaaaatcgaacccactctagcaggttttcttcctcttgccccatctttgtcccgctttatgatagctgctgtcggttctgcagcacctcctgctgtttttgatcgcttgtttgcgtgttcgtcttcgctatcgtcttcgtctttgaaatctaatccagccaacggatctggcttagaagccgctgcatcgatgaggaagtccaggtggtgatcggcttttcgtttcatcagaatagcattagatcgaatgggatgaacctgaatgattcgggatgtcagtacaagaaatcatgcgcgacttctattcagtgctaagcacggtggacaaggaaatgatagttgacatacggtcgacgtgttgtagagcaaacaattatcccatataagattcaaatcgtctttgaactcctgtttggtcttgtactgcttccccttaactttcttagcgactgttcctagatccattgggtgtttgacaactaggtttccgaaagacatgcgtgaggatgtgttctacgagacatgaaacatcaagagcagagtagaagggagaaacaactcactggtgtgatagtctggcacgtccttcttcgacacaggtttgagaaaccagtgaccttcaggctgtagaagtgcgcatcaagtggttccgtcgtttcagaccaacgaatcagaacaaagtcgacgcgtcgacgcacatagatatgatggtagcacggtcagcggcacgtcacgggcaagatccacgacatgagggcgtttttccgctgaaacattgaaagacggagctacgtacggttgatctcagttcttgaacgaccttgtctaaactctcgaaccaatcatcgcttcccctcgtttcctttggtcggtcaaaatatgatatcatgtcagttcaacaggaccagcccagctgtgaactgagagaagaacaccttacccttccatctttcacgtcgcttaggagttgtttgagatcttgatcgctgattgaaagccgactatgccggctttcgagcgcttgaagaagatactgttgcgagaaaaagatgaaagaaacgtaaaaatcaaaccgtgttcaatcaaaaaaaaaggctgggctcgaacgacccatattgggtgaagggctgaaagaacttgtgtcgatgaacaagtaagccagagacaaaaagattgttgggagcgaaccttcattaggcgaaatcgatgaagtgcgagaaatctttgaaacgtcttgaggcccagcgtctgtgggtttctgttcggacgggaagtatgtggaaagaggaaaagaacaaaaagaaagttcggaaagggagatgttgaatataaacagcgtgtgtatgtatacggatgctcgtctgctgcgcgtctgggagagccatcggcgagaagagcaggtggacgggaccaaccaaggcaaacacacagagcccgaccggatggaaacgataggcctgacgggaagaatgctggatggcctataggtgaactgtaggaaggcaagataggggatacaaacgggtgaaggtcaatcctgggtagtggatggatggaaggttggtgatggttttcagctgaaaagtatattacgaaatttattacagttttccaactaatttcccaattatcttctcaaaagtctagtcctctctttttgtcaaggcttagccatgagcgcatacacttgagacacaccaagcaacacaacgacttcctgatattcattttatcccagacacttgtacatatgtgtattggcccgaaaaacagattcgtctattatcttttgggagcaggagtaggctcaggcgagcccgcggctgatcggccactcactggcgtgggagtggccgacacgggtgaagggacatctccttgggagccaccttcctcaaacgagctgatgtaatctctgaagaagtttcggtagctggcttttgaggggacaaagtgacctggagaggggacgaaggtttgtcgtaaacagataaacaatgtaaggtaagaaccgggtatcaaggtgatatgtaattagcagttataaaacaaaactcttacctccgtcgtgatactcgaccctctacaatccgtatggaggttgaaaaaaagcagtgagtggatgatgtattggacgaacacattcgaccgaggcgagatgaaatactgaccgaatcctcgcaattgtctgccagagcaagacttctggcctcgctgatgatcacatccactttgccgatgatgtgcaaggtagctgtatttccgtcgataggaaagtacttctcaagaccaaggttctttgcattcggcacaaaaccaccgacgaagatagcgactgcattggcaatcgatcagtctgactccttctctagaaaagggtagaattgctgaaagagacaaacatttgaaagggttgatcttggaggtcgaaaacagcgggtgaacactaggtttgttgatcagtgaacacagcagagccttgagaaccgtttttatataagatcgatcagtctcattgtacttatatctgaagctagttgtttgagatatgtgtacttaccgccattccagcaccctatcgtttcaaagagaacagaaataaatttccaaatcagacggatttaatcccaaactgctatcagggcgatagatttatacatacctgagagaatcccatgacaccatcaaaccccttctcatccttttcgatgaagtccctcaaatatctgacagcctcatcatagccgacaaagttttccttcttgtccggctcgacctcccaccaagaccgaggagtcgtctctggggtcatctctcccttcgaggttgtagcagatgagtcaaagtcggcgagcgttccgccgaacgaagggttcagcacgatatgtggaggctacacggccgataagaacatcacggtgcattcaattaaagatctaagagcaagcaggcgcttttcgaaagaagggtagagacacttacatcgacaaaaactgatggacacagtgaagaatgtataggtcagctcgatgcgtctgggtcaccttcgctaggtaataaccctttgaaacgaaccaaactcaatgttctttccgcatgtctttcggagtgcgcccatacgtttggaaaggatgattgcattctgatgtgcgttaagtatttgtgcggtcaatttcactgatctatacgtgatctgctgatgaatgaagatacctacttgggtgtacccagggagggctgagctcgcacgagcacgaatatgatcgcaccgaaggtatgacgaatcgtcaacgtcggaatgacggatacgaacaaccagtcgtccacaactcacttaaaattcgcatcatgttcactatagttctactgaatctcaagaaaggaggcagtcttcttcccgttcttgttcgctgtgggtgtcgttggttggaaagaagtagcaagagtatgttcaagaagaaaaaagtttgagaacggaagtccccgcattttctccgtaatcttcggatctccgggtttatgttcaacattcgacatccaacatcatcgactacgatacattcaatcttcgacccaagttctgatggccacgttcctctttccgattcccacgacaggatcgcttgcgttttcttcttttctcatcaatggatcagatcagaaccttgatacccatcttacagaggccaccaaccatcggactgcccttcgaggaattctgaagacagagagacgaactggtgatggagagaaggatgctttggccgtattcaacgttcgttcttgttgttctcgccaatatccgtctttttgttcatgaaagttcagactatccatgtcaaaagtcacaaactgaattaatctttggtgatatccatgctcaaccaggctgttgagaattacctgccttgtttgatttcgatcacgaattcccttaaagtggatgatctcctacttggtaacgaaccaggcgagtttcaagtcctatggtttttgctcttcacacctgacgatacacttctgataagctatctggatcttgttatcatacttcgtttcatagtgttttcctggcgagcgacgtgtacacagtcattcagtccgaacccatcgcgcctgagcctatcatcattcttggcggaggagacttttgtcttgttgacatacacctacgcgcttgccaatctatcaacttccatcgttctctcgcttgtttcgacgacggcatcaacattttcctcatcttctgcatcttcccgcgcttatgaactcgacttggcgttaccgacggctgagcgaaagaagaaggacgaacggctgggccaagcagcggatctcctctgtcgagcagccggagtggcagagtacgccgcggagaacgtcgttggcgaatgggagagggaccgagttcagagaggaggttcagggagggggaagggaccggtcgaaggaagtaaagcgtttgctttgggtctttccaagtagggttttctgtccctttttgttttcttgttttcgtcatctcatgaacatcaactcacctttccatttggttcgatcgtatgacttgcatgtaccatcttttttgtaggatgcttctggctgatgcccaactgctctctatccgtaagctgttggcgccatcgatctcgagtgtccttcatattggccctccccttcctaaaccccatccctccccttcccttctcgcaaagctatacctcaacgtcctctccctttattcactatcccacacgcttatcctctcttcttcatcttccttgacatcatccacctcttcttcccttgctacggattcaccgatcgacgagctgataaaatacgtcaaggacgggaaatcgttcgcagaagctatgagcagaaaatggttaggcatcgacgctggtgaatttggtgatcacaaacggatcggagaagcaatcgtctggttaagggaatccaaaaagatattggctgatggctcttcagaggggagaggcttgaacgcaagtggaattctgggagggatcggaaaagggaaagggaagggaaaagaagaaaagaaggagaggagagaaaaatgggcggatgaggagatcatcgttgagtctttcctaagagcttacgagaaagccaaccaaacggttcgtccgctcctttcatcttgcctgcccagtagctttctattgcatcacatatttcttgataaactaacagcaaccgttctcttcatcgatacgcgccatttgcccaaatataatacaaagatatatttcgttcctatcccaactttgtcttcacttctttctcagatccctacaggtcgagccgtcctctcgctcaaaaagtttgttcctccttgtccgacctttggacctggaagtcagggatacatctcaagaagtggagtggatttggaaggggccctggataagatgactctgagaggattgaaccaggatgcagatactggaggagtgacaagtggaggatactattaacggacagtgcgcaggagacgtagcccccttgtacaagatctcatggatttgttgtatatatatatatat

SEQ ID NO: 1868 - DNA, 5715 bp, Xanthophyllomyces dendrorhous
gtatatatatatatatatggatgccaatgttgaggatgttatgtcagatgctttttgaagcaggcgcctttcgtgtctcattacaacaacgcaggcttggtaaccgaaaggatgatgatacaggagaatgtagccacgttcttccaccaattgctttttcctatgtgagcattatatagctggtctagacctaacttgatccggataagcatgggttctttggctttcagctacgatcaaaacctctcgccgcttacatcacccatcccaaaaactgcttcctccctccttcttctcattagttctttctcattcagatgagaaaccacatcgcttagcttgttttcacctcctccacttccaccgcctgccccgtttttagcattcgacagattcaagggcgtctgaggtgtgatcgaaccagctggtgtgaacctgggagcagagataaacgaaggcgggaccgatgaagatcggaaagatccagttccagatccatgagttgccgaggaagaccttgagagcgccgaagccagaatcgaaggaaacgtttttggaccaggtcgattcctttcattggcacggccagggtgcgcttcttgatctgactgttcatcaggggttaacttctgaatctcggcggcttgtcgcgccttcttaagtatagaaactggagtaggaggcgtccgacattgtttgggagtgaatatgactaggtcgtcttctgtcatattagacggatcttgagaggacaattcaccagggtctgggtaagaagaagatgtggtcggaggaggaatgacgagaaacgtcgagggctctcttcgcctcggtgtagccaaaccaacgacagacggctccctcttcagaggactttttcgggatgaaaagagagaagcgaagaaacctttagacgattcctccgatgcaaagggggtccctggaccaagaggcgtaaccgattgtggcgaagccgacaagttggcaaacgtgcacgccatccagtctgcaagctcagtgtaaacttgatccatttccgacactttttttccccgaaagaccgtgtgtgagtaagcgattgagagtgcgatagagtagagctgaacaagtatcatgaaagaagaggaaaattatgtgggctcactgagagtagccatctgcaaaaaccctgtttgatggaaagaaagcacaagttatgagctgggtatttactttcgtaatttgattgaagaaatcagtgtttaccatgacccctgaaatcaatatggagaaagtgagttagacaacatccgaccgagttctcacaacatgaatgtgaaaaatgaaagaagcgcaccatccttcaaagatcttgacttggacccaatcctcttcttcctcctccaagattgtatcctttaccgccgaggcaaaattctgatcattgttcacatcgatctcaacggagccagatcggctgcgacctatcatgagcgactcttggtctatagcatctctagcttctgcctgcctcgcggcttctgcttttcgcgcccgtttagcttccctgatccggcctgttgctcataaaactagagggtcagcccttgaacttataaagtgagagatcaagactacagtaagattggataaggctggagagactgaccagcccagatgacagtatcatctacgaacggatccttctcgccacagatcatgagcacgggcggaaacaaagcaaggagagctgagggagcaagaataggagaaatatagtaatctgtctggaaatctgggttctgttttgggccgatgtagaggatagccattgcccgcatctgtcgtcataccacaaagatcagtcgaggttagtgggcctcagctcgagattggatgaaggaaggagacggaccatagatggagagatgatacggtcctggaaataaccacttcgactggtcatagtcaatcttgtcccaataggtgcgctctttctctgctttcgaaccttttcgttcgtaaaacttggccgattcgcctccgagtttgatttgttgtgttgtgaggtagacgttccttcctgttcttctttctctgtcaacgttgatcgcgtcgacctcgacaattccgtctcgctagactgcgtttttataggcctgaggtaatcctccccttcattctccggagctacgaccataggcgttttcactctttctttcaatggcctccattcgtcctcaagatcgtcttcgactttttccgaggagttcttctcaatatcaaaatctgttttgttctccaaggaagcgatagatgaccgtgagaatgagagatgcgatccgattgagcgagaccaggacttttttctactgagtcgggttctcgtccgatcgatatcatctacgactgcaagtggtgatcggtgcgcctgtcgacaagcaactcggaggatttattaagtgaggggaaataaaggtgaactcgaacaaaagtctcctcaccaggtggtctttaacctcttccataccaggcaaatgagtagagctctgctcggatctcaacactcgcaaattatcagggctcatccaagctaaataaccagaagatgggggttttagtcagtgtttgcaacttcttgtcatagtaaacctagatattggtatgagaaccatcatacatgtgaagttgaaatccaagcaggcatatgccagtaagagtgagactggtgtaggaatcggatcaggatgttccaaaatcttgagcatcacggtagctacaatattggcccctctgggatttcggcaagagaggtaggaaataaagagaagaaaatcgatcagtacagagatgtaagctttaaaaccgtcagacaagagcgaattgtaccaacgcagagtcaccgcagaggaccatgttgatttctccagatttcattcctatgacactaccttttgacttgacgagcgcaaggtacgcatcaaaacattcttcgatagcccatgggtatgggtctataggctcaaaacatgtcgatcaatatgtagttaagcatagaatggaaggttgagcggtacgcacattccggactctttccataatcgatactgagcaccactatctttcctcgtcctctcgcctctctgccgactcttctcgaccatcttctgagtcgttcctcatggtgattcggtcccatacagataaatcctccaccgggaaagtccaagatcacatcccggcacctagcaagctcgtctacagttccgtcgaagaacaggagcgccttgataggtggtttcgagccgcttggacgagcgagaagaagggacctcacaatcggaattgacggacgacgagacgcggagatcaagcggagctgtttcagatgtcggatggtgcaggttgatatgtgcatcagccgactgacagagacataaacatgaagacagacgccgacgataaagatgaatgcatacgtaagggttcgtttgcttctcccagcacgctctgagcatctcgactgtggctaccgctctgaatttgcgaagctgtcatttgtcgtgtgcgatggtgagccagatagtgcttctgaccatggaggatactaggagacagaccttttcgtcagcttcgtcggcatacaccgcgtaatagcacccaaacagctgtcgggaagaagattagatcaagctttcggttggtcaggtgccctgatctatattttgaagaacacattcaatgaggtcgtcgaggggactactcacaaatccgcatagatccctgagccataaaggacggacactgagggcggaggaaatgccggcatcaaaagcggttgctatccatgtcgctcggtagaacgatggagcatacttgaagcacattcaaaggaagaagttcaaccagccgcgccgaaagagacagcttggttaaacgaatgatgcttaccagccgcgcgaggggttcgggtgctgagtgacgatgatgagaggtgaagggttgcaaaacggtaagagactgacgcagaaaggcagacaagaccagacgacttgaacgaaccctctagaccgatgatatgatccagatgacgaatggcatatacggctgtaagcgtgcagagcacgatctggtacggtgtgaacctgactgaggaacggaatgagacggcgttagctgtgagtggtgttcaagacttatactacattgcgaacgagagttgaaaagacatgtcacaaacgaaccgagggctctgttgaattttctgattccaagaaatcttggtccgttcgctggtgttctggacaacgagcctagccagaagaacagaaccagaaacacctgggtccgtctccacttggctgacggccgacccaacagatgatctatcatatgaagtctgtgatgatgtgtgtgtgtgtgtgtgtatgtgtgttagtaagcttgtaagtgagtgagtatgttcaaggatatgtggtgagtggaatgtctagtgagggtcagtgcatgaagggcatcgtccacactgaactggatgtcttgctgggctctaagagacgtaaggacgcgctgggcgttgagaccggctaactcgattgggctgaatcatgtgatataaccgaatgctcgagcccgtttggttgttcgtgtaccaggcgtgatcggtgatgagtgatacgttcacatcgttaccttgttcgtctcagaggcagacatgttgatatgcacagtgtctactggagggtatgtagggtgagagatacatattcaggcagtcaagagagtttggtgggtaccatgaggttcacgaatcatgtatagatgatggtttcgagattggtcggtattgtgaaaagttgagctgcatatatgctgctttcttttgagacaggccacttgtgactttcaacgtggttgtatgctatcgcaatcagatggctcacgaatagactcgtagagatattgatacatccaaacagaacaagggaggggtacgacatgctgggttgtcatcatcacagagatggttagatggagagcgaaggagatgtatgacgtcggttagaaattccatccaacctatcgtgttgcttcatccgtcctcaagttttctgtcacctctggctgttttgactacagggatcatcaacacacacacatatatcaggcatctgctcttcctacgtatccgacctttcagtaaaaccatactcaactcagggtcatcctcttgctagatttgcttttcgccactacagactttattgtccgaatcggaaggctgaccgaccaagatcttgtaggcgagatatactgtacataaccttttcttcttcttcttgatggctacgacgcaagctccgagctctagctttaattcttccctgcacttggcccggacgttgacgacccaagcgcatgcccatctgtcattgagtccggaacgagcgttcccgctttatctccaatctgcccagctgtattctttgctcgtccgacaggctccggcttatggattgacccaacagatcaagaaagaatgggcagccgtgttggatctggctgggaagaccaaggcggtgatcaaacaacgggacggacagggcggtgtcagagcaggaatcgggcaatggaagagatgtgatcccagtgggtttttgacttccgtccgagcttgctctgtgtacttggttgaatctatgcagacaagattgggctgatggtgaactctgtctt

SEQ ID NO: 1869 - DNA, 4118 bp, Xanthophyllomyces dendrorhous
actagatcaacaggctttggtactctcaaaatcggccgatataagtactcctgtaggaaatcttgaactgccggtatggaagttacctccatctgtatctatcttcacctcggccatctacacgtgagctattcaagttcatatctttctttcttttcctttgggacgaattgcaatcttgattgtttcctatactcacaaacaacaacatgttaataatgatgtgcgaagcgatccatgcccgccgtcgataccctcatacttgaaggccgcatacgttctgccctcagatttgccatcactcgacaccctctgggaccacgacgtccgaccagagatgatcatccagagtcatgttcggaattgtagtctggtcgctgggatccaagctgccatcggttggaacaaccgattcggtggggttgataaaaaggtgagtctgagcgaaggttcagtaatgagttgcacgagaactcacaaacgagctaatcgttgtgggctatgttcatagaacctgttggcgcctacgctctatccgacgtctccctcgggtctacctgtccaatcgacttccggtcggtatgtgttcaaaccgacggtcaacggttccgcccgatctttaactatagacagccagctgctattttctctgcgtggtcgagaaccgataggactctccttgctctcactgcggtcccctgcgctctctgcgaccgagatcgattgcgtccggccgaggactcgagggatggaatacgcgctcggtttgatcgaaaaaggatggatgaagttgatgggcggttgggattccggagggagtaactcgagtgtggacctggctggtttgacgggatggatcccggaggtcgtcaggtttcatgagcgggactttcagagggagaatgtatggaagcgggtgaaggacgggttcacgcaaggtgagtgacatggtttgactcgatgtatttgtgtttttatcaggggaagggggggggagagtgtttttcgtcaacttgccgtgctttgctgataccctctcttgtggttctctaaaaggaacatgcattatgactctcggcacgggcgcgttgtcttctctggttgaacgttacaccggtctaattagcagacacgactacgccatcaccggtaaattctactgaggatatctgctgtccagctggtcgttttgatgctgacgctgatggtctcttttacttttgtcatcttgaaactcgatcgtcgatgttgatgaaacgaaatggaatcaagacttgatcgagagagacggagaacgttttgttcagatcgtcaacccttggaaccgacctggcgaccgtctttcgctcagtacacccccaggcgccggggccggatcgggtgcagtcggtctgtcattggctatagaagctttggagatcatccatgaagggtctgaagaggaagaagagaaagatggaaggacgtttgaagaagaagaagatctttctgggaagaatcgtatgtgaattgactttgctctgaatatgttgtgtcctcgggctctcagagtactgagagaccatgcttgctgcactctctcactctctctcactctctctctctctttctctcttcttcactcaggtctgttcgttgtaccgtgggaaacggtgatctcgacgttcgacgctttgtacctcaattgggatccttcgatctttgactcgagttgtaccgtccattcgttcgttcttttttatttaccaatttgtttccacctttggttcgcgcgcgtagacacattcgcgggttaaaatctggaagctaatgccttactccttcgctggttcacttgtcggtctgtccttctttactgacaatacagatcgtggtcgagagaggttaaagaagcaccgatggcatgtctgacgactccacggttcacactagatttccaagctcaaggacaggaccggggagagatctggctctggctcactcgacatctgtccgccactggctttgaaagttttaggaatagacacgaggacgacggggacgtggacggggacggtgagcattccggcaggaagggtgggaaacagagagaatggataggactgaactgtatggaggatgacccggacgggacggccttccggacgttcggtgtcggtgatatttcctcgtcgaaagtggtgggtctcttttttttcttttttggctttggcttccattgtttcaatcgaatcaagctagagagaaaaccccccgttggctggcaattttcgacaaactgacaggattgataatctgacttggttttgttgtttcgttttgcttttcttcattcttttcctcttcttctgatctgccgatggaaaaaaaggaattgacggatagcacccatgtcctcgtacgttctgtccaatctgtatgattcattttgggggggattggactatatgatcgttcgcaactgacaggatgaggactcaaaccgacagatcaagatccaaccgacgaaatcccactcgagacacacactctttgtccttcgagagggatcgacggacgagacaaggttcacgctgagtgctttctcgaccgggctcgtcggcttgtccgatgggccgccggatctgcctttttcgttggtggttcgtttgtttctttctctcattttcaacgacagtcctcacggcaagagatttcacaaacgatgaagctgacgagcgttttggattgaacgtgcataacatcatcttggataaacaaaaaaaaaattactacgaacaaacctcatcaggaggaaggagaattttcaccgaggtcagcaggcgggaacgttcggttttcaacgttcatgaacaacccgatgtacaaattggtgattcatccccggtctgggaatggaggtggaagcggaagcggaggaggagggggaggaggaaaggacgagagggcagaggttcggatgatcttggagagtaaccgaacggagcgcgcagagggagcggacgaggggaagggtatcggcccgatgaacgtgttacttgtgtggggaaagggcgaacgggtcgtcaggttagtgtttgagcatctatttgtcccaaaaagcaaggggagagaagctcggagaggactgaagagatgttcgttctacatgcagcctggtccaagcggatattgtgggaaattctgggccatacagagaaaagacgactatctgtcgaatcccttcactcgctcgttcgttcttctcttggtcgccttaccttagggaagggcttctgttctctttctattcccttacctgtgtgcgcgaggctaatttgatgcatgtgttttcaatcatatgcatatgccgtgttgaaaaaaaaaacccctccctccgacgacagccggtgtgtacacgttgattgtgtcttcgttctttccccgttcactcggctcgttcaaactgggagtgcagtgttcgtgtgcgatcgacctacagccgatcgctccggagggagccgggatgtttacccggactgtgcgcggcgaatggtgagtgggatgaaagagggagagggggagagagtggacagatgatgagaaagaggagcaacatgactgacgactgtttcgatacgagcaggaattcgaacggtaacccggtgtatagactgtcgttgacgaaagcagggtcgatattgtgcgtatgtctgtttgcattgtgcgcgttcgagcgttggtctgaagaggcgatgtctgatccaacacaaggaaaaaaaaaacttgtcccgtttggatgaattaaatataaaacaccgattgatggtgggaaaatgttcgggaacgatcagtctacgattacaaccggtatcgctgtcgactacaaagccgcctggcgtgatgcccatcaggctctctgtgctttctaggacaaaggatgggacgacgggggagatgacgaattctggagcgttcacagacgaggtctctggcgcggtgacgccgagggtgaaggtggatggtggggagtacgacgtggtggtttgtgcctactctcctggtcaccacgggcgctttgtgttaactgcctatggggatgtcaaacttgacttggcgcccagggggtagggcagggt

SEQ ID NO: 1870 - DNA, 1036 bp, Xanthophyllomyces dendrorhous
  misc_feature (636)..(645): n is a, c, g, or t
ggaggaactgtgtaggtgagagaagagttgaagctagcgtgtagtcggtgtaggtcggatatgacatgtgcgttcgtgtgcgcgtgtgcgtgtgagatgtgtcgatcagactggaagatctctgccggctcctttgagagagagagagctgggaaagagctgagagaggagatgaccagcagaacacaacgagcgcagggaggggaagagggacgcgtgagtggaggcagcagaagagaggaaacattgttttgatttatgtaactatctagctagttgtttgtttatttatttatttatccatctgttttattattattattatctattgatcttctctcttgtcctttgggcgctctctgagtgatggcgtgtgtgcgtgcgtgtgtgcttgctggctgccggcaagtgcaaccaagggggagtttgtgctctggcaggtgcactctcagaggcccactcgagcacctgaactgggcggtgcagtgtgccttgattggtgggctctgtgtgtttgcgtgtatcaggtgagctttgaatgggctctccctggttatgagtgtgtgggtgtgtgggtgtgtgggtgtgtgtgagagagtgagtgactgtgggtgctctgtgtgtgtgtgtgtgtgnnnnnnnnnngcttgtgccttcggtagggtctgtgcgctctttctctctctctctctctctctctctctggctgttcccgctggattagatttccccgcacgcccgcccttccgccgtacaaggccagtacactgtgctgcgtggctctgtctctgtgcctctctatttctctggctttccctcttggtctctgtcggctgtgtgcttgaggacgactctctctctctctcgcatagtcactggcccatctttctttgcttttgccttttgtccttgcccttgcccttgcctcgctctgttccctcactgtctcccacgcactctcacgcccccagtgcctgttcctgttcctgttcctgttcctgcctctattgccctttgctcccccctcccctccctc

SEQ ID NO: 1871 - DNA, 1193 bp, Xanthophyllomyces dendrorhous
cttcttacaccaaccatgggatgctcaccatcagcacccgacaaaaccgaaagagatcgatcgttccagatcgataaacagatcgaagaggattcaaggagtctgtccatcctctttcttctctcttctctcttctttttctcttcttctccatgtccttgctctcttctcttccttcaactctcctctttgcccttgctccgttctcctcggacttttctcctgttcttgcctttcccattcattcctacagaagaattcactgacgcttgctcaaccctctcgcttttcgttctcatccctcgctactcactctacggttcccattcttccctctcggcttcctctcctctgctcacgattctcttcctcacccgatcctccctcggaatcgttcccaatagaatttcagaaagaatggcaagtccgcaggatcgatccttgtcctcgtggttctttttcctcctcctctttctcttgaacaccgagacatccaaatctcatccttgtctttctcctctctcccccttgcttgctttcttccttccttgcctgcctccttatacccgtcctcaccctctctctctctctctttccctcgccctcgccctcatcctgttctgtggacgtgtttacctcagtaaaatactcttgcttggtacgcgtctccttctctcttcgtcttccccacccctcccgctcaccaggccttctgctacacccatcaggatcgggagagtccggcaagtcgacgatcgtcaaacagatgaaaatcatccatcaaaacgggtacactaaagatgagcttctgctcttccgtttgatcgtgtatgtgcttcccctgccttcgttcctcctcctttgttcacatccagctcacgtcttgtttcatctttcgttcctttcgaccgatctcttccttctcgcttcgttttccctttcgaaccttcctctttttccgctcaaaaaaacaaaaaaacgcactccagttacaaaaacttggtcgactctgcccaggcgatcgttatggcctctagaaagctaggaatcgatccagaacagccagcgaacagagtacatctcttcaggtctctttctgttctctcgagattcacaactgatctcctttcatactgtctgatttgtttcttgattctccttgttttcttctctttcttgttgttcttccctcc

SEQ ID NO: 1872 - DNA, 2683 bp, Xanthophyllomyces dendrorhous
aggaaaaagaaaaaaaaaaacaaaacaaaaacaacaacaacaacaacaccaccagcaaaggcgcgtcgggctgacgatacacatttcccaaacagcttctttggcgcggtccgccgtataggcgcaccggattatatcccagacgaaagcgacgtgttgagagctcgaacaaagaccaccggtatcagcgagaccaggtttaccatgggccaattgagcatacagtcagttctccattcttttccttcccagagcccttgatctttagcttttccgctcaccggtcgtttctcttccttcttggcttctgcatttcttctccgcccccctcgtcatcctctttcctcattctccgcccgcttcgttcggctcctttcaccttcacttttccctaccccatagtatgtttgatgtcggaggtcagagatcagaacggaaaaagtggatccattgcttcgaggcggtaacaagcatcatatattgtgtcgccctctcagaatacgatcaggtgctattggaagaaaacggtcaagtcggttgaactttcctcctttgttttcacactcatgagctaatccgctgcttcgacaaccaccgccacctcacaaacaaaccaatagaaccgaatgcaagaatcccttgtactcttcgaatcagttatcaactcgagatggttccttcgcacgtccgtcatcctcttcctcaacaagatcgacgtctttaaagcgaagctctcaaaagtgccgctcgaaaagtatttcccagaatacaccggtggaccagacatcaacaaggccgcaaagtacatcctttggcggttcacacagacaaacagagccaggctcagtgtctacccgcatctcacacaggccaccgataccagtaacgtgagtcgcctgaagcgcaagcttccacatagccaacgagactctctaacctttcttgtccttatctttcacgctccagatccgactagtctttgccgccgtcaaggagaccatactgcagaatgctcttcgagattcgtgagtctttggtcgtcttgttattcctttcaagcgttccttacccgttcatcaccgctgaccagagatgtctgctttcttcctcttgtcacagcggcatcctatgagattggctggctccttttcatatctttccctctctctccatccttttctctctttttggtcctctttcgcttccttgtcatgcccggggttagggttcacctctttcttattaatctgtgtaacgacctatactgtttttccctctttcctctttttttttctttcttttttcgtcttttttctcttttccctctcttgttccttcattccttccgccttctactcctttttttcggtccttcttgtttttccgaatccttccttcttcccattcaattcagacatataagccttccccatcaactgcagtgggtgcctcttgtttttctccggtcgatacttgcctctccccctcctctttatatctccgttctctctgtctctatttaaaagctctttcagatctagacgtccgtgccatggattccatcctcctacccgttcctcatttcattccatttcttcctttccctccttctcctgacccgcctcgaccactcagacttctcggatcctagaccctagaacccttcgattcttcttctcttgatccatgcttccttttctctcttcttttttcttctcctttcatcttgttatttctatttgtgtgaacgtgagtgtgtgccaagaggaaggtcttgccgatgggcatttcgattctacttctttgactttttcttttcccgctgctgtcgatatgatctccttctcttcctctgtccatcattcggcattcaacatctgacgtttctcgtccgttatgtttcctctttgtcttgtcgatctctcttttctgctgtcttttcgaccttgactcttgcctcgatcaagatctttgtttgatttgactgggaacatgtcaatatttgttcggtcattctctccttgaattcgatcggtttcactttttctttcacatttttttcttgtcttgtttcttgtttagtatcctatcttcggtctccaacttcatttccagtcctaatcccagcctcactcttccaattcctcttctcttcttctcttcttctcttctttttcaacggttttcttgtctctttttttgtcgcctctttttcctttctttctattctcatctcgtacttcacggattcgtttcccattccttcctcactctatctgatttatatatatttatatatattctttccggatgcgttcttgtccctccttgtgtttctcatgccttcactcccgagcacgtcggccgagattgtgtgacggacgatcgttctcatggtccccacaaagagcaacagaaagaaagtccctgtacggagaaaaaagaggaggaagagtggaaaaaaaaagaagaaaaaaaacgaataaatctaaagaaaacgagagcaggctcatcgagcgactcgctcgatcaccttaccggattctaaacgaaggatgctccctgtattacgatccgacgcgtcatgtccgatattcagagcggcaggaaaggaaaggaaaggaaaggggggggggccgagatcgtagaggcgcggcgggaggagcagagcgacggaagagag

SEQ ID NO: 1873 - DNA, 51565 bp, Xanthophyllomyces dendrorhous
catatatacatatgttgttgatgtgttgttgttttttttggttcagaagcgcagagttccggaaacccgttgttgtgtttggaatttttaatttgagaggaagaaaaagtagctctcaagtcagtgagatgcactcaatatggatggcggtgacgaaagaaaacaagtcaaagaagaaaaaaaagaaaaaaaaaggccttccccctccaagaacgcacctctatcttcggtccaaggacgttcgccagcccagtggccgacccagacgacggccgagcgatcacccagtcgatccagatataacctacaccgttcgatcgagtcctgctccataaacgcaaacggttcgtccaggatcaacagctcgggtgaatggatgatggaccggatgaacaggatgacggattggtcgttcgggctctgctctgcaaacttccggtcgcccaacgagctgtcggccggggaggggaagaacgatcggaggaccgtccggatccgggtcgtttgctcgtccgagagcgctcggcgagaatagatcccaaggtagcccgtcccgatcgcttcctcgagcgagagcccggtcgaacgggggaacgatttgaagatctctggggagcagtgtccgatgagcgatcccaggatgggcgtggcgatctgtcgtctcggccggccgaacaacttgatcgactgtgcagggagcgagaacgaccgggggtggtcccctaggatcagcgacagtagcgtcgtctttccggacccgttcgaaccagagagatgccatcgagttccagtccggatggtccaatcgacagagtccaacactcgcttcggtccgtaatggatgtcgacgtctttgagttctaccaccgtctttccttgcgcgctcggtgtttccatcgatgattgctcacgtcgttcttgttcatcgggtccggctttcccgtcgatcaaacctatctcagactttatccggctcatccgttccgcccaccattccttttcgtctccccgtacaccgaaccggacctgaccatcggaaggcgactcgatcacgttcgtcacccaggacggtaagctctcgcctccccgaacgacgaggatgatccggatcgtctcttgtagtttgtacaggacgtccgagatatctttacggcctgcagggtccaagcccgcgaacgctttgaccggcataaacagtcccgaacaagagggaggagaagaagaaggagaagaagaaagatattagtctcgtttatgttcatcgaacgtgaattaggatgaagaaagaaagaccatgttgaagggaacaaaaataaattaagaaaaagcccactcacgttcctccacgacgaggaatttcggatcagacaacaatccaagcgccatccttgctcgtctggtctgaccgttactcaacccgacgaacggagtgtccaacagatgttccacccctaccagcttggctacctccctcgctcgctcgcccccctttttcccacccgtgagtgggtccgggtcgagggcccacaacatcttttccaacagagtcagtcgatccgattcgtgtagggtatggtatcgagcggtgtagtccgagaaatcacccgaaggagagggcggggtgctgaatttgaggtgatagatcgaggacggagacgaaggctcggtctcggaatacaaaaacgggtgacgtccaggtggaccgacgtagggtgatagccggtgatgattaaggagaacctttgagggaaaggttatccaaagatgcaaaacaagaagaaagaaagaaaaaaaaaccggaacagatgtgttcaatcgtctgttctcatatcgcttgacggttgactaaaactcacctcgactagagatttcctccctgacccaccaccgacgacagcccaacgctcgttcgattggattgtccatccgagatcccgaaacaacggatgagtccccttatgatcgccaaacctatgaaccgctgtattcggtggaattcggaacgtcggcgctgtagaattgatggagatcagacggcacgatgggctgtatcgaggggttctgagtgatcggatgagcagccggttgaacatcatgtgccgatccgacagatcagacgagatggttagaagagagggtgaagactgaaggtgggaagaagacctcggaggtgaaggaaaaaaagaataattaaaatcggatggagattcggacttaaccgcgatggatgacgttctatcgcatctgcaccgaacccaccatctacatcttcgtctacatgatccatctgctgttatatctgctctcgtttctatctcctcaagagccggaggaggttcaatcagttcctatcagtctggaaagatattttaataacaaggcagcttcttattctggcgaggctttgaacggcgggttcgacggcgcaggtcggacgtacccatctgaggaaaactgtctgcctactggctcttggaaggacaaaggcgtacaggtaaagagcacagaatgattgaaaccgaaagtcaaggtatgagaaacgaacatgttgactcatcagatgggtcttatcgcagtttgatttgccgagattttgggcgggtcttcagtacgataacatcgtggctgaatcgcaggtgagactcgagggaatgacatagtgagatatcaacactgtcctgatcacacataaatttgctcttgctcagactatcgccttgccagaaccggtcgaggtttccagccttcatcttttggttgcaggcgattggtctgacggtgagtgtagttcgaaatcctacaagggaacccaccgagtactaacatcctggttcaggagcatcgaaggaaaagatcctggctgagttcactgacggctccagcgaagagctcgagggtgagtggctctggcttaactgactctcaaaaacttgatagagatcctgatctgttatttatctaatgtgattgatagtggatgtcaagaattggtggtccatacattggctcaaccaaggtaccattcaatggtatgtagcgcacctcatcttcatacagatcttgttctgatcaacatatctctgcaacatccgaccaaacaaacaagcccataccacttcacatcttacaaacaaaagtcatacaattccacccagatacattctgtcacacttcccgttcactcgtcggcaagccttggatccatccgtttgcctgcacgagcgtccctcaatgcactccatgtgttcgcagtcactctaactccgtctttacgttctatagatccttaccgcgcagtcgaagtactgaacgttgaagccacaagcaactggatcgacgatcatcaaaggcgggctcagattgtgaaggtctctctcagaaaccctcattctatctctgcccactcggacgttcgagcctggatacacgaagcgattagcatcgatcttcgagggctcagacccggctgggaagtcgtgaaacaagtaaccgtaacaaggatccccccgggtgattatgtggatgtagaagttttagtgcagccggtcggtgggtttagagaatcgaagccttgggatcggttgggagagatcaaagtagttgctactaaatcgagtagaacaagattcaccgaaaacacctggaccattgggaaagtcaacgggacaggtagattggtccgggattgggagcactggagagatgatacagtatgttgcttgccgtcactgtgcagataacttgcctactgtataagatctaaacatttggttagttcgtgatagacaagtttggagttccatcagtccccaaagtggttcgacggggccaagtttggcagtacgttctgtgcatgtatttgttactgtttcattatcattcgattctaatatggatcgacgtcttttgatatacgttctctatttcagtattcatccattggggattatatagtgttcccgcttgggtaagttccactataccccgcttcggttggactaagcatttgaagcctgtttgatcaatgatatcatgcatctactcctgctatagaccaaccaaggaagatagtgagtccttcatacagttcgtttagattttgtcagatctcatctcacctgtcttgctctgtagcgcggaatggtactggtactggttgcatcaggacgggaaacattctgagagtgagcttactaattgtcgacggtttagtaaaaccatgctgtctgagctatcgggctgaactttggactgatttcagcttataatcaccatctcgatcaatatggccctgtaagtcttaccaaagactgacaaaataccgaagattcaacgttgagcactgagcgcttccgactctttcgatcgcaggatgtcaaatacgacgatttcataccgtcctttgacggatctgagttcaacgctactttctggatagatctgtttgtatgtaactgatctccttcagtctcgccattaaaatccgctgatcggatttgcgcccgtctttgatctacagacttctgcaggagcaaaatactttgtcctcaccaccaagcatcacgatgggtttgccctgttcgacactctagacacaagcaacaggagtaccgttagcttgggtcctgggggtagagattatgtcagggaattgttcgaggctgccgatcggaaaggagggatcaagaagggcacgtatttcagtatgccagagtggtttaaccctgtgagccgtttgtttaacatgatatctctttcaagtctctggtccattcaggctaatcctttgatgtgacttattcgaccaggattattctcgatatggttggcaaggttgggtgagtaattttgtgatcatagtgtctctacacttcatactctgactactatctcgcagccaggaggcctagcaaaagatatataccaccctggccagcttgagccttataccgggcatgttcccgtaagtcggtgtcttcttgttgatttatagaacagatatatgatcaaacttatttgcatatattcgcctaccattgtggggctatcatgataggtcgacgactatgttgatgatctgcagttgcagcagatgaggattctgtcaaacttagggtcagatatcatgtggtgcgatgtaagtcccagctcaccctcagtttatgagcttgtggttcgttttgtgtcaacatgcttacgcgcttaatctgtttggatgtgctgcctgtgtggtacagatcggaggggcgaaccacaccggacttttcgcatccgaatggtatagaaatacctccaaaacgggacgacaagttgccatgaatgatcgtaagctttgaattccatttcgagatacgactggttgatactaacatattcgctctaccgagcaggctgtggaatcgcaccagacttttcgacccccgagtatgagcggttcagtaccgttcaagttcgtctgatatcatttgggatataatcatagcgcatccttgtccttactgttttttcatgatggttcgatcaatctggatggaacatcacatgatgatcgatagtctggaaagtgggagacctgcgagggtgggttttgaccttcaaactgtaccatatcgttccgaatgactagcaccctgccatgcgatgccatgagctgatgtactgactatttatctattgtctggtctcagggatcgacccatattcgttcgggtacaacaaggcgacgaaagactccgagtacaagttagagtatttcagttgtctcttcttctggatgggcaactgacaatcgttttcgtctggccaggtccgccaaagaaatcatacataacttgattgatatagtgcgtcgtaagtctactctctcataattgaatctgtataatgctgaactcatagttgtttgcgcacgtgctagacctcaaagaacggcaactaccttctgaacattggtccaacaggtgaaggaaagatcatccccgtaatgatcagaaatctacttcaagccgggagatggcttgaaactcatgaaagggctatctacgatactgtttgtattctcaggttgaccttcttcttccgtcattgcatataccgatacctgacgtgccgtgttgtttactatatgccggtcgtaggtgccatacccattgcttcctgagcttgtcctgccgtcacaaaacatcaatcttcgtttcactagaacgactttttctttcttcatcatcgctctgatgcgccctacatcacctgtgttcacgattcctactcgccttcctatcttaccaggggacaagatctatcttctgtcaaacaagagacaaaagtcaattgacaaaaggaacggtgtagcaagagagctcgagctcgattgggagtttggaaagaacgaagagcaagtaaaaattactgtagaagagaatgacacagacgaggattcgctggcctgggtattcgagatcaggtatcagtagaggctgacgaatatctgttgtatgattatgcgctccttcaatctttggatatcatgatttgtccggtattcctttgatatatcatcttctctctttagggttgaagagaaacaatcatatatgttacctatgtgcaaatccgtaactaagatacgcgtccctctattattattataattatttcccgtcgcttgtgttctgagatcaagagatggtaacgacgatcattctcttctatatcgtcttccttcaagctcttatcatctagcagagaacagcatgatatctacgccgccatctcgtccgacaacatcgtcaccaggctttgcggcccaaccattcccgacattaggcgctcttcgaagaccaagacagtctctttctggctcgtttagtctgggtcctgagggtttgatagagcaccttcagttgggagctctcgacaatgaggacggtgagtgagacgaatatgccacagcctcttcgtcttcctcttccatataatacgccttggaatctgtcttctcctgtttcttggttgatcgacgcgatgtcggttttgttggcaactgaatgatcgtactcggcacaaggcatcattttcgaaatcaacgtatactgatcagcaatcgtcttccaatcttaaactattctagatgatccaagaggagctaataactcttctattattcctgtctcaccaagactccctcgtccatcgtattctgctcttagacttcacaaacctcatctgcgccgacgtccatcttcattatcggtctcatcctccaacaactcaaactttcaacttgcacctccttcgccctatactatgcgctcggcgactggcacacctgggctctcgagattgcgtttcgggagtacgcacaatcttgccgcccaggtagatgagacccgaacagaggatgagttttcggaggacgatgtgacgaggaacacggagggtgacgaggaggatggagaggaagatgggctgaaagggatggacagtatgagaagttggaggcacgacgcaatgatgcaacacctttatgaggcagctgctttctggggggacaaaatttttagtctaacaggtatgtgaacagtctcatatttggctttcatgttcgttgcttgttaaaatgatttcaatttcacgccaaacgttcgtccgacgactgctcaggggataaaaatgatgccttttggcttgctcagattcattttctcacctctcgatacgctcgagccgttcggatcctcatccaacctctcgaaaaacctgttaggttgagagagaaatcaacaggaatgtccccttcaagaaaaggcaaggaacgcgcgtctatggaagacgaagaggccgagcgattagaagaagatctcaagaagggcagaggagacccgaatggatctcttggaggactcttcgaggaaggatggatcgagggtgatcgtctgggaagagggggaagaagaattgtagatgtcagtctggcttgtcggcatttagcagcgcaatgtctagtgagtgaaatataatttaaatttcaatatcgtcttcccatctctgtctatatatgttgtaacaaaacacttatgtgcacttgatttgatggatacggtctctgtgatgatcctttaactattcttagacacgaatgggacacttggatgaggctttggaaatgctaggatcgacgaaccctttccaaggagcaggtatgcgacaatttacgtcatattcagtcgacactcacggttgaagttcgttgacccttattctgtgatgatgggattccaccgtacttagcaaatagcgggccacatgtaaaatccgatggaggaatcaaggtaagcctaaattttcagcttggtaatttgtttcgatatgcattgttttaacaagcctatctacgctttgtatatgtatctagttggagtcttcttgttgtcttctgcgtggtcaaattcatctccgactgtctgccaccgctcgagcgaaggaatgttttgtggaggctttgagcttggacgttaggtgctacgacgcattcgtggctttggtggatggtcagatgatgggagtagaagaaggtttgtatatcattttctctcttataatgtatgctactaaggcaggaagaaaaaattaatccaaaacttgcgacctgtccagaatgggattttatacagaacctctgctatcgagaacaatctgatgacctgtctgagttcattcaaatgatgtacaccattcgtcttaaaaaggtttgctcccttcctccaattcgcattattatctcagaaaaggaatgccgtgctgaccgctttttcgatcattacaatttatcagtacaaacaccttcgggagatcactcaggcaagaagaaggcttctgactgaatacggtttatcaggcaatgccgatgtgatgtgcggattggcagacacgctgtatgcccaatttaaatggaatgagtgctacgccgtgacttcaaagttagtttctattccttcatcagtataacttctcatacagtattgataccttggtgccattttccctcaaatgaacgatgatagaattcttgctctagttcccttccactcctctgcgctgttgctccacttagcatgcatgcaccacctacctcgacttcgttctgccctctatctacttgctcacaatcttatttctgccgaaccggacgccgcaacaagctggtatgctgttgggctttggtactacactggtgagaagtggagtgaagcgcggcggtatttcgggtgcgttctgaaattctcattcactgtagatgtctgacagttgctcatggctacgtccttgatctgaaatggaacatcagaaaagcttcgctgatggatccccgtttaggaacatcatggattgcattcgctcattcattcgctatggagaaagagcatgaccaagctattatagcttactccacagctgccagattgttccaagggtgcgtttcctccttccttgaatgacgcaaatctggcctttttcgcatagtttcttacgattgttcgtattggggacgttgaactcagatctcatctacctgttctattcatcggaatggaacaccttcaactcgaaaacgtcgcagtggcaggacaccactttgagtctgccctgacggtctgtaaaagtgatccactgttgtttaacgagatgggagtaattgcttacatgcaggaagagtgcgtagtttcatctgtttcttcgtctccctttattgaccaccaatgtgttctgattcattttaaaattggactttgatggaagcagttatccaaccgcggtcgatcaatttagaaaggcattggctgcttcggaagaaatgcaaggaacacctgctacatgggccaaaactcatctaaacttaggacactcactccggaaactcgggtatgcgcttttttctcctaaattctctttaaagtctcacatcaactgacattggattcacatctcttgaatgaaaaggaaaattgacgagtcgttcctcgcgtacgagatggcgctgaagttggacccaacttccgacagcgcttacggaggaatgggcatcgtctttcttctcaaagggaaattaaactctgccatcgagtgtttccaccaggttcgcctcccttcctcctcacccctgcttgtgtaattttctatcttctttcttcttcacgaatctaatctggctggcatctccctttttcttgttcgtcctaacaaaacactttaaggcactatctctagacccgatgtctccccagataacatcaatcctccactcatcactacatgcaacgacagagtttgaaggtgcattggggtcaatcccaggcttgccgagttgtttgagggacgagggatttgatccattccgtgtggttgaagccggggtcgaggccgaggattttggggtggacgatgtatcgcagatggacgaaacgggactggctgatcagacaggatcagacgaaaggagtctacgtgacctaagcaacaacagggatgttggattggatatgactgtgagtggctatgagggtgatacgatggatatcgaagatggttccatgtgatgttctctttgtatatgtgatggttctgttttgtttctgttggcgcgtgtctccttgtgaagagcggtcttcgaaagagagaagaagagggaggcgtggatgaagcgaaatggaaaggacatgagatagaaagagcatgacttgatgtttacaaaaagaattggcaaaaaattaaacgagagataatgatggataggacaaagagacaaactgaaattgaccaaggcaaatcgatggacttcgaagcaatatgaacaagaattgagagggtttcgggtttcaacaaaccaaagagaagaagagaaaatagcaagtacgtcgatagttcttagaaatgggggaaaagcgagccgtgcgggtccggtccaggttttccatactcagaagtatcacactctgcgtaacggtcgaacctgattaaataaaaatgaaaatataaagaggagagaaaattagattgtgtttttcgaccacaagacaccaaaggagagaatgagtaatacgcactggctagtatccccatcaccctcgattttaggaacatagggcgccggaatgtcccttctataaagcctgttccagtcgacctctgcgaaccaaccatgtccaaagacatcgtgacttccagacttcaagtttccgaaccgcttggtgagatcggaaatcaaaagagatttcaaaagatccttcgagagttcgtcgaagtaggctgggtatcgaactttcccggcgataatcttttcgtaaagtttcatcggatttccatcttcggtgaagaacggcgggtaaccagcctgagattcgaacaaagaaagaagtaagggcgcaatgctaatgggttgagctcgttgaatcagataggccacgtacaagcatttcaaagatcaacacgcccaaggcataccaatctacactcttgttgtatcccttactctgaacgacctccggggcaagatagtccggtgtgccacatagagtccatgtgatatctggtacatacttggcgaacccaaaatcagtcactttgacgtgcccgtctgcgccgagcaagatgttctctggttttaaatctcggtagatgatgtcgagcgagtggaggtaatcaatagcgagcgcgacttcggccgcgtagaatttggcgaccgaattaggaaaccgctagataatgaagttgtatcaagggaatgaataagggcatatcagatagggatatcgcaatccaaagtcagaaagaaacctcacctggctcttcctcaaaagactaaagagttctccaccggcaacaaagtccatgaccatataaaggttcctcgggtccgagaatgttccccacaggttgactaaaaacggatgcctaactcggacgagcatctctcgctctgaattggtgtgttcaacctgtttcattctgaccactttttccttgccaagtactttcacggcgtagaatcgaccattgtgacgagatttgacaaggtgtactcgtccgaacgaaccagtacccaggctaatcgaacgggataaacaagacgaaaggtcaaactccagttttgccttcaaagctcaattgaaaggatatctcgacagactcacgttcgttcgacttggaaatcctttaacgcgtactttccagcagacttccggactttctcctctgtttccccagttccttcgacacgaggtgtctgagcatgtccgtcttgaccttggctctgaccaccggccgataatttgccgctcaacgcatttgcgtggatctgtgcgactctagcgttctgctgggcctgtcgaagagcagcctgagcggccgcggcttgctcggcggctatactggcgggagtcgggggctcggaacgcgtactcgagagaggaacggggggctgatcaactggaggagaagaaggggtgggtgacatcatatgagaaggagatgccggttggacttggggagaatgtgagacgtagatggggaccgagcttggctgggatgtagttggatacatgggataggacatgggttgttgagtctgatgataaactggcggcggttgctggggctgctgtagttgatggtgttgctgttgctggtgcaactgttgaggttgaagctggtgttggtgctgcatttgatgttgaggaacgccctgcatgtatagaggaggcgaaggcaatggggatgataccgagatagcggggttggaatcgtaggtgtggacgacgttagggtgaccgctagcgtattctcctcgaagggcagccgagagagatcggttggaatgaacactgttggagcttccggtgtgattagaagaagcccaagaggagccagaagaattgccagagtcgttagatcggaacgggtagtagacctgttggtttgtttgatcactggttgaacccaagatgttacagatagacgagagatggagaaaatgtttgaaggaaggagaagttgtgtaagttggggaacaacatgaacaagacgaaaagagagagaagaaaatagatcggaaacggtaactcgagtgagacacaaatcttgagataatccaaacagaacgagatgaaacgggaagagacgtacggatgatacattgctccttgcaacagaagagatgaacggtgaggatactaacagttcagacccttctcagtattgctgtgaccctatcttctgaaggagatcgaatgaagatagaatcgagatgagagatgggaggcaagtacagagcggggaagaacaagagatattgtcaagacagagagatggaaaaaggcacaagttggttactaggcgcagcaaaacaaggcacaaaatgagtcgtaaccgcagtgttggaaaagagtgataattaaaccacgcgaagttgtacatcatcctttaagcgtttagtttctagatttctaaagaagagagatgttactgacaatcggtcagaacggcggtcaacttagggatagtgatcgagagagacaagacaagctttctagaagtgcggacgcccttacagtcttacacagatatcttcaaagacgtagatatcaaatatatgtgagtggctagaacacagtgatgaaaagatgctacaactgcaaaggagtgacatttagcgtgttgtatggatcaatggtatgaacggcataaaggaaaaaattaaacacggaacgtttgtagaattctaaacggatatatgtgtgaggtaccacctcggatggagatttcaacaatagagttccgtcacttaagtcgctaacgctccacacgatcggacggagtgcgacggcgccccatctggagcaacgataacgataaataatgcatcacgaaacgtaatttcaccagataaagagacagacacagagatgttgaatccctttgatctgtggtattgatataggagacgtgagggaaccgatgttgagttagaattcaataagcagacactcatacatatttcatgagatcaaaatgatcattcgtcggtcaaacggctaagtatgttgtcgaagatgcaaggtcctagactagagtcaattccgatggtcagacaattctggaaaccaaccaccaatcatccatccatttgcgcacaatgaacgtccatgaggagaatcatgaaggcctagagaattaatcgagtaatgtaaccctaacgagtgagattcgtatttttcagttttcacgcaattttttttagttttgaaacacttgtcactaatgtgtcggaattacaattcgaagataagtttgaaaagagcgtctaagccttgatggaagacccaaccgactggactagctgaattcattcatatcatgaaagcctccatgtttatagacggcagaaatgtctacagacacaaatcatcgcttgggaccgctcgtccaaactttttggtcatcgtcaacaagtcaatgtagaccaataacaggactgtcaagagatttcggttcatagcaattctcttcatgcttatagcccgtccaatctatcgacatagacgatccttttctaattttgttcaactcgtgatgtcttcagtactaccactgtatggagacttgtattgcgcgtcgacgcgcaccttacgtaatccgccattcacacgcgcgtcaccgtctgcattgacactctcagcacctattctaaagagagatggtgaagaaatatacataatcgatcatctctatctttctctttctctctcgctcttcacttatctctctctgtttctttggtcatatcgacccgtatactgtcgccctaagaatcgagctcaagcttttccgctctctctttcgattccgccggagagaatggcagacgccaaggatttttctttgatagatgatccttcctctcatctagctctgactgatagtttgtcaaccacgtgtgctctcagaacggacgatcgagcggaaatcgaggagacagctccatcagttcagtcgaacttatccgaatgggaacaagacttcgaggactactccgatgataatagtctggccgacggagcctatcaccgcgccttttcatctagtccatctggcctgtcaagattactcgtctcaacagaacagcctgtctacacacatcctctggaatcaagcgttgctagagagaacaacatactagaagacgacggcgacgacgacgatgatgatgacgatgatgagggactagatgaaaaaagtagcatggaatcagatttggacactgatgattacagatcacaagattcccctcacgagtttccttcaaaccagttgattgagccgaaccaagttcgcgctctgatggacattttcccaccccaggttgatgaacggtcgagtggagaggtaatatccgaacacaggctccttgaattgcaatctaggaggcttgcttctgaacatcgtagaaagttgctcgccagggtcccggctggagggaggaacggaaagcagtggaaagcatcagatctacccctcaagatcattcggtttgtcttgattatctgaaacttctcttcgactttgatacaatacacacctcgcatcagctgattctcatattctcattaactattcaaatccctacaggcaaatcatccatctggtagcgatatccattgtgactgaggaggtccaagccaaacttgctgacggagacaaccgaatacactttggaaagcgacccgtcggtcttactatagctcacatccgagccaggtctcggatagcgcccttgcgtttggtatgtagagcatggaaacaagctagtaagtatcctcttcttttttttagtcctcatcagcgctttcctctgcaatatctgatcatgacactcgatgtatgcgtaattatttcaatcactttagccgaaactatccctttttggtctgaacttgcaactgtgtttgggttccctcataatatcagaccttatcgcgagaacgattgcctgatcacacaactgtgctgggtctgtcattttgcacgttttcctctctcccaacctgccgcctatgtccgcacaacgctcggaacggtttggatatgtaaacttcacttggctgttccgttctgcggtcggtgtctacggtcgagaatagatcctgcctttcgctcaagacgacttcagtggataggtcctcgatcgagtcttccggagtataccgcgccaaacgaggatatcgaccctgggttgagactcactgaagatgatgatgtggaggatgaagatgacgatataaacggcggagtcaacgccggaagagaactctatggacccaacatggcatgttgtcaacgctgccgatatgagtgccttcaggaagcagtgactaaacgagaccctgctgtccgtatcgacctcgaagacaatggggatctcgagtgtttcttccaatacgtcgaaagagctcaaggatcagccgaatcgattgccgtggatcttctggaaagacgatggttggcccgttggactaaattccatgaccttgctacgcaagtcgtccagaccgagaaaatcaatccggttacagccgcatcggccgatggtaacgacatgagagcaattttcaaggcttccatgggaattgaaggagatggaagcgagccaatgacagaggcactcgaaagggagctcgctcagttcgagtacgaagctgctgtcgctcgcgaggagaatgctgctagagttattggagcagagcacaacaatagcgacggggaaagacagacggatgaggaagggcaagggcaagaagatgaggaagaagaggaagaggaagaggaagaagaaggggtagagttgacaccaggagggtacattcagatcgtagaaatggccaccgaagcttggattcatcaacgtgtgattgacggattctgggtctctccgctcgaacaacgagcttttcaagagactttctctcaacaaacaccatcatccgcagagggagacatcacattagatgtggttcacccgctcagttcttcaacccttggatctagcgtatgcaccacttcttcgcatcccaacggacctcttccacccgctggcggagctcttgaccaaaagaccatcaatctatattcccgaaagcttcgatctatactccttcccggactcggtcagattgcgaggctttgtgcactccaaaaagatccattgaacgtagcaccaaaattaggcattcataagctattggaactgttgaggctaccaggagcttgggtgcacggaggtttggattgtatggaactcgcattggatcaagctgatgggcccgagcaaatctcgaccatgcctgcggagatcctatcgccaccaccattgatacgccatcctaacaacatctcaccctcagaaagcttatcattcatgcctacatcgtcaacagccaaaatgtacacgatcgaatcaccatcgtctactgactcaataagtccgtcggcaccttcatcccatacaacctctccgattcgaacaggatcttctcctcctacctcgctatctccaccatcttgcgctcctacaattgcccttataaccccagatccgcctattgtttcgtctaccttgagctccgtgccaagccccaagccaaacccggctcagaacatgaagaagattgatcctcgatttcctctatctcctaaaacatctcgtccggtcccgcagatccctcgtgtgcctttggatgcttcaaggttaggactatatactaaggacatcataaaaagggcttggtgggatgcttgtgatgacatgagaagatgtgtatgttcgatctgtttgaggggcctgaaagctcagcgagaagggaggcaagacgagggaattgtgtcagatagagaaccgaaggatgaaaatgacgagatgcaggaggaacaagaggagagaggtaagaggaaaggaggtaacgaggattcaagagcaggggacaagaagcagcggattgaagttgatgattgaagttctgttcctctttgataaatttcgtttctttactatccatctcatttatttctctccttgtcatttcctagactcgtggcatactctttgcctagcgatcacgaccttttgtagatctttcgttgttgattatcaagccattacatctcacatttctttttcccataccttgcattctttcttacaatctatatatcgttgcattttcttcttatagttattttctcacgagtctttcacgatcccttattctttctgctctctggacaatccattcttatgataacgacgacgagtcacgtcacaaattaccaataagaaagtcatcgatcctgtcttcgtctatcctctctttttcttttctgttttctatctctttactttttgagaagaccaaggcaagcatagtcaactctgtctacttcagtttcgattatcttcgctcatccaatgaagaaatcatccttatcggacaagagagaagtcgggccaaatcaaacaaagtggaacagagaatgcaattatacataatcttcaagatcacgagaaggacggaaggaaagaaatgaacgtatgggaaggaaaaagcaatatggtataaggttctgatggctctgtaaacggaaggtgtaagaatgtctaaagcagacatgacacgagggacattgagaaggtaagaaggtttacaagtatacacagctagtagtggtcaaggagaaaaaagaggctcaaaaagacgaaacggaagatatgggcttaagcagcctcttgctgatggtccacgaactcgttggcgttctctctcgagatggctttgatggaagaaaccttctcattgttgaagaacacaccataacatttatcagcttgagcaatcatttctggtcggaaagtcgttgtgatgaactgggcattggcggataattgatggatcatctctagatgacgaggaaacgaatacatggacgataacctttaagtcaagagtatgcgtcaacaaaacaagtaggggaaaacgcaccagcgacagaggctcggtattgagcgtccagattcgcgtcgatctcatcaaacaagtagaacggagcagggtcgtttctttgaattgcaaacactatttagatgaaatcaaggacaaatgactattagagccgggattagagaattaagcagacagattccatattctcatacctaacgtcaaagcgacgagcgccttctggcctcccgaaagctgctgaattcgaagtccttcgtcggatttcgaattgaatgacacctgtgattcacatacataccatgtcagctttagcacacgcgaagaaccttagataaatacaactaactttgatggagactccagtataactgtcgatgaccgacttcctggtctcatctccagagtcatcatcctcatcgtcctgattatctgtacgcttgttcattaccaatcggcctcgtccagccggaacaagcttctcaaagatttctccaaagtgcctcgatacttcgttgaatgtgttctcgatcgccgcatccttctttcgatccaagttttcaatcaattttcgaattgactcggctgatttggccatgccttcaaatcgactatggatatcgtcccgttgcttggaatacttttcgtacatctggagtgcttttttattgacatgggagtacttgctgagcgcagtctttgtcttgtggagccgtttaagcagctgtgacgagtcgtaatttgttcaagtgtcagcggagacaaggtgataagatgataagatgaatgtctaccagaaaatacacataccctagccgaatcgacgtccttgtacttttcgaaggcctcctcaggtaagactcctaaatcccggataagcttcgtacagtcatccttgcgctccgtaagggtctgtctcttagtaatgtaccgctccactactttctgagatctagcaatatcacgaccatctttcatttgttcaacttgggtcgcctccagagttgcagtcgatcttttgatctcttcagccagtttgtctttgcgtgtctcattctctgacgagacagatcgaatcaaatacgggggtaaactcgccttgtgataagtttcaaagacgaactatgtcaaacaattttagtcaagttgaacttactcttgatcaaatcctgcaaagcagagatgtttcgttggagagccgccgactcgcgttgtcgagattcgagaccttttccatcaagccctccatcatcggcaaccatacctagattttcgagctgggtacgcaaaccaatctgtcttcgaagtaaactctcattgagctcaatgtccagagcatccctccggcttgtgatctatagattatcaacgaatcaaaacagtatgagtattcagagaattgaatcctacgtaaatgaaagctcaaatagagaaaataaggttctcacttcagttcgttcggcagctgtctctctcaactctcgctctctgttctccgactcctcagataggtcttcaagtcctctctgatcttcgctagataacctcccagtcatggttgtctgaagttccgcctctagtgcctccttcttcgcctgaagttcggtcacgtcttgctgagcttcgtctctgacagtttcaagcctatctatcgacgacttcaattcgtcttcctccttcagtaaaaacatcagctcatcctcgagtttgcctctggctgtatgagcctgtcttcgtttagactcaagaacctgggtggaaccaacgagccgagttatgtcctgttcgattctggcgatactttgcttgacctcagatagacgggccgaaccagtgtcaagtttgtcttgccactctttttgaatccgaacagtcgaagttcgagatcgccggacatcatgatatccaccggttaatgctccttgccgatcggctcgatctccctcgagtgtgatgacgttcaaacgatgagatcgtctgaaagccgtagcgatttgtaaatccggagcaactacggttcctccgaaaacctgaagatcaaacagcaacagaaaagtgtgagtaacctttcatacgataatcgatatagatgaaaaatagcctgatagcagatatagaactgacctgctcaaaagctttagatagctctggtgcgtatcgaagtgttctgatgagtggaattatatctccagtgtccggataagcatgagaagcaacccgaagtcgattgagcggaaggaaagtcaatcgaccagctctctcggagttcatggcctccacaattcttgaggctgtctcatccgtgtcgactacaacatggaaaagactgattgataagacacgaggaagttcagcatggatgcatacgtctcgttaaggcgcatggaaggtcacatgatctgtatcttgaagaaacactaacctgttcccagcagtttcctcgacagccaaggtatacttatcatcgacttcgaaaagctgatagagaggtccataaacgccttcgatatgtagtctttgaacaatctggttcagagaactcaatccaagcgcggtatcctatgatccagaaacataaatatacgtcagaaatgatagcgttcataatataatgtatatgcatatagatgcacgcactcggtccatcatcgtcaacagacttcgctgggcttcttcaagcttcgtccgagcgtggttgacagacgattctaacgtgtggtcttctctccaaagatccctgaggagattttggttgtggtacagtgagcccgttcatacgacaggatcaattgatgagcatgttgtttacaaaggatgagagtcatttttcttttggaaaaaggcactcactttctctgatcagtaagaatctccatctcatcttgcaccttctccagctctgctttagagtcactcagtactgtcctcctctctgatatttggcttcgagcctcctgaatgctcccctgaagctgctctagcttgtcctcctcctccgataatctagatccgaggtcttctgccttgcctgtttgctcctcagtgagagtcacgatagaccttagttctgatcgaagataatcgtcccgatccgcctgattcctgaactgtgtgattcttgactgcttggcatagaggatgtctagcctagctcgagtcctttccaacgcctgccgattttccttttcctcaccaacaacccgtctgaactccggttcaacttcggcgagctcggcattgacctgagtaattcggtcctcaatggaagcgagctcctgctcgagatattctctacgttccgtactttcccctgacgaaagctgaagatcggcgatcacacagttgacctcggttcgtgatcggacaaggtccagtagctctttctccgattgttgaatggacatgttcagttgcaaagtctcttgattactagccgagacaaggttctctaaatcctatttgacatacacattgtatcaaaacattccgagagtcaatggtcaagcacacagcgcacaagaaacttaaataaatacatgatggaaatatatgcgaacctgaatgatcttctctcttttgataaactcctctctgcgaaccctgctatcatccagactgcttgccctgtcctcctccatctaacggatgtacgcggccacatcagcgcacgagttcaacttttgttatcttgcttgcttcaccacaaaggaaaggagaagaaactcaccttagccaaagtttctccgatctcttcaagctcattggtgtagatcgagtattccaatgctttcctgtctctgtctttctcctggaactctttaagctcgcccttttcctcttcgagctcttctaacctagcatctactgcttccaaagtttttaccatctttgctctcttcgactctgtatttcgaaacgagttcaagagaatctatcagatgaacaatcttaggtgttgaaggcaaattcgtaagaggtgagacgaaccggcattttcgagggtccttatactctctgctttcttctcgtcataaagcgttgttccagcgacttccttcaacaggtccagacgttctttgtcctttgcattggttaaaaatgtgatctagaaaggtagaagagaaaagattcatagaggcagttcccgggcggaagggtagacctgtcagtcaatgtgatcgcattctctgaaccattaccaacgtgagttgcgagagaagagaaggacaggaattggacgcaccctcccttgagggacaatatagtaggggttgcttttgctaaaaccagcgctctccaacaggttcatcacctccgccttactcgaactcttcctgtcaactgaatattcgtccttcttcaacccaatcgttcttcttaacgtgacttcgtccttacccgttggaaatctagcatcctcattcgaaaagacaatttctacgaatgcgctcaacgtggtagccgtacttagcccttcgtgaagtaaagactgtcgatcttctctagacatcgaggtgtaggcatcggaaaggacaaaacgaatagcggagaaaaagttggatttcccggatccgtttcggccaacgacgacattgtgggaggacgaaaagggttcgattggagtttggtctctgtaggacttgaaaccctggattgtcaatgtcttgatgtgcatctttgggtatacaagggggagaaagtaggtactccttcaactgggagatagtggtaagggtcgtgacaaaggaagacagaagtgagacaaaagagatggtaatatctgtcagaacgaaacgcgttgtgacgcgtcccgattcggaagtgtgctcatttattgacgcgtttgtaacgtgtttaacacgcgtgcataaatcaatcaactttctattcatcctcaatctctgaacggagaagatctataagtcgtaagaatagatcagtttcaaacaaatcaacattgaaagaaacatatatcacgaggatcatctaacgaatcaagatctcccaatcctccgcaatcagcacctctggattcttgatcaccaactcactcgctcttcccttctttgttgaatccgctcccacaccagccgtccactcgaacattgccgatgaaccagcgccactgaggattctcacttccttcggctgagatttcaaaccgagtacaacgattcgttccactcgaacatggccaatcttctttgcccatttgttcggtcctccagacagatatcgatccaatgtcgtctggtcaacaccagtctccgctggtctcgctcgtacaagatcttgactcttcagaacaccatcctggaagtcaaaacctcgccagatgaactctccttgctcgaaagcgtacgaatctccatcatcagagtataactctcctgaggcggtcgagtccttaccaagagacacgagaagggtgtacgggtcctgccacatcaaaggggacgatcgcctaatccgggttcgcaggggaataatgttggatccttgatgtaacaagggcgcagcagaaagtggggcatggtagctgacgtttcttccaacttttgaggcggggtagagttcgtggctgaagtaatcgtaatagggctgcgaccgagggaaagtgatgtgaatacaaaagaaaggaaaatcacgcttcaaaggcaaaaaagacagacaaacctggttatcgctaaggtagatgtcggtgcggtcagattcttcctcgacaatcggcttggccaacaagccggtcctgccgatatagaactgatcatccatcgcatatccagccggatccttagggaagtttacatattgaggtctgtccaacaaacaaatcgaccatgttagccagtgtgactgcacgccgccgaaaaagcctttgcgatgcgcgatagctaagccaatgaggtgcgactttaccgaaggacaggaattccatccacagaggcctctctaaaagcagtataccagataggaagcatggcgtatcgaagccggatcatatctctcacaattgacttatacggttcgtctaacaggtacggttctcgtcgtttggtgtcaatatgagcgtgagcacggaaaaagggcatgaaaattccggcttgataccatcggacgaggaaatccggagagggattctgagtttgatatcaaaaagagttgtatgtcggtgccgatgttcatgatttgaagagtgatgataaatgagcttacaccaaagaatcccccaacatcggctggaaagagagataagaagaagaaacgatcagagcttttcatcacctagtcctatgcataatttgaagaatctaagatacatacctcctgcaaagatcatcccggctatgccgttcgacaacaacatcgggaaacttcctgccaaatgagtccacgtgcccatgttgtcacctgtccagattgctccgtacttttgtgatccggcaaagaaagatcttgagagtacaaacggcctcttaggaatctcttcccgagcaattagagccagagcagtttgtttgtgctataaacagacggaagtcaagagatgcgtgtcagttcagttgaatcgatgcggtttcaggaaaactgcgaaaaaaaggactaacaaacatgaggccgttgacgttgtgactgaggtcgaccatagtttcttgtcaaacccgcaattcaagttttgtaatagaataatcaacgctcttacatatctctgttttcccactttccatcttcgtaaagagtgtccttcggcagggtgatctctggaccattaaacacagatggttctggatgcgcaagggaaaccatgaataagagtcagctctaaacacccagacaattcaaggatatacttgggacggaccgttcatatcgttccagataaacaagttctttgccgagttctatgatggtgataagacaggatagaagaatagatacgttaaacatgtcgataccattgatcagggagacggacgaaaaatagagacgaactgtccacttttcgaacttgaacatgccggtccaataatcccagcttcgttcattgaagaaatcgacccaggccgagcttccggtccagcaccaaccttcatagtttgtctttccatcggcgtttttgatcaaaacatcggcttccagagcctccttgtagacatagaactcttcggtccgtttgatgtgcgggtcaacgatagccactacttttcgtcctttatcttcaatttgtttaagcatgcccttgacgtctgggaacttttgcgcatcccaatcgaaataccggtgctcgtctgcatactcgatatccagccaggtcacatcaagtgggaagccctcgccgtctgcatcaaaccttctatcgacctcgagcatatcctgctgatcaagatagttccatcggcactggtgataaccaagggcccagtgagctggcaaggcagacggtccggtgagcgaggcgtattgtttgaatagcgcatctggagaggccgttgatccaggaagcaaaaacaggtcaagaataccagattcagacatccagtgggtgtcgattccaccagcggtaggtcgggtgacatccacccaagtctcagaggacgataggtagaacacaccgacggacgaggaaggagaatgagcgtgcattaaaggtatcgctccgtagagtgccataggcgaggaagcctcatactcaaagatgtcgacattgaacagtcgataggggtccgaaaagtagtcaccatcagtagttggaagagacaacggagcagcatgctcaggaataccgtagacatgtgtggccgccgggaacgagatgtcgatggaaagtgcctccggacctaaaatatggtaagtgagtcgcctttctcaaaagattctgtcatgtagagcaaacatattcaccttttggtttggtgtccttccaagacttccagttttcttcgaacaagcccttgtcgtactgatccctcgatccctcgaaccaggtaggatccggctttggatcgagaacggtctgaccttcagtggattcctgggcaagcgcctccagatcatctggtggcgatgttttgagctcttctggcttgagtctgaaatgttccatgtgaagtagaccctctccgttgaggacgatctgaggaatatccggaacggacgatctgtagagctcgattcgaagagggtaatgaaggatgtcgagtcgaagcttgtccgagtctgacccgtatgtgatgttggatccccaagaatcagtttctaaattgaaagatccttgtttaagagcgtccggaactagagtccacttttcggactcgttgtagcgttgacgaagtccgtgatgctcgtccatccggattctagcaatcccatctgacccgagaatattgatggaaagatcgtatctgatctctgggtggagatcattcaaaacctgaaatttgactgtatatggggcgcctccatcggtatcacgaattagaccagtaccattgatgtgataaggagactgccaatctggagtatctcttgccctggaagaaagaggacggagtctattacagaaagaggattgtgcgcaagtcttgaagtcttccttcttcaccgccttagctggattggacgagaggagaactaaagtgagaagaggaagaagccaagagtgaagcatggttaaccgattcgatgttcaacaccgggtctcgatgcagatagtggtgaaagacgaagcagaagaaggaaacaaggaaagacaaggaaagagatggtgaaaagggatgtaatgggagacgagcctgtccatgcacagctcttgagaactaaacgagacactacaaatatttgtaatatgtattagaaatctgttaatgatctaaggtaacaaaccacgaggtattagaaaaagatcgtagtaactactagagaatatgtagaacattcaggagtatacgactgaggcacaagccggagacatccataatttgaacatttacagcactcactactctcttgagttgactcgttccaagcatacatctgatggcccttcagatcctcctttctacaggatccgtcctcaagttctggtcggttgtcccatacttggcgctcgggatctttctttggtggcttcgagtgtttatcgatggttcgtctgttgttcctacagactcatttggttgttgattgaagatcacctcgcttaccgctacattagcgactgtcatcgcctatttcatctgaatcccgaatttctttttcaacggacaggaacaaagaatacatgggaaagagattggaagagtagacgagttatcgttgttgtgagtcttttcccgtcaggtatccttctctgaacttagagagctctttgtatatcattaaaacatcgatctcccttgcttctttttcagggcccaccaacaccacttgtgatctctcttctcgatcatctcaccactcagaactgtcagacactctacttaccaccgtcacttccacccaagctgctcctccttctccaggctattcagcttcgctcgtctgaccatgttcaacctaaagcatacttcgcccctcagcctgaggtaggctctgatgacgacgcagagataacaactaaacccccaatcaccccagaggacacacttgagatcgatcaaattttaaatgccgaaccaatgaatccgaaggactacatggatatcatgagatttgtcaagctctgggctggtcggaaaggcggcttgggagatgacaaacgagtagacgctatcatttgggcatacggtgtgggcgaggtcattgacccgctcttggttactccatcatcctataccggtttgagttctcccttttcgcgtcccgaagcaaaccagactggcatgtttgcgtctgagaaggaagaggagaaagcgcggttctcgttcttcacactgtttctcccccagatacttcagtcgatctcggcctcgtctcgctcagtacggctcatcaacctcatccatccgctctacccggcgggatacaagacatctcctctgcttcatccgacgccctcaacttctccgaccgattccgcttctcgtgcagattcaaagtcattttcggaagcagcaacaagatcgcatcatgccatgcgatcgatcgtcttctctgctcacttccagcgaatccttgacgcgctcgcgctcaagggagatgctcagggtgaagttccagatccggaggccactggaggccatggaagttcctttgaaagaccagatgacaagccggatcaggcagaaaagaatccttcgttagaaaaggagcacaagttgtcaaaaaagatcgagagacactcgacgatccaagtcatcagcgttgcccctggctttcacttttcatctgtactcaagccatttttgatcagacagtctcaaggatcattgtttgtccaggtcatgtgagtgttcatcagttgagaatttatctctatatacaaggtgattgacaaatcgtttttgcatcaaattcaatatgcacacaggtggaatgtggttttgccattcaggttgatccttggaccgtcgtctcaccaggcaattcaatccgtattgtttgcgttgtgtgctcctcccaaactgagtggctggggaagcgtcatcaaggattgcaaacaggtttggtgaggctctttcatttctttcctccttccttctcaggaatctatcgttgttatccgtgatgcatccttacttctaggtcttctttttggcgatgtatatttgcgcaatgtaatagggttccgccagcacttcgaatggatgagaaactaggccgggaagtgtgggagcagatggaagctgaccttgcagctgaattaccgggtaagaaaataagctagatagtatgataccagacatatgatggtctatgtcatcgagaaaatgtagcaaaaggagaacagtgcaagtgcaggagataaacatatgggcaaaattgaaaaattctggcgtcgacaagattcggaccgagttccggattcgatacatctgtgtttgcgtgtaccactgcgtttgcggcgtgctgaacatacattcaagtccatctcaataggttaactcattctcctagcaaaccttcttcatttcactagctatcttccatcaagaagctgctagattgtaccggaacagcttaaaaacgaggcggaacaggagatatgccaccaaattcgagccaaagtttagggatgataggaaggtcgtcttgtgcagaatgtaaacggcggaaactgagatgcgatcgacagcgtgagtgtttcgtttgtttcaacctctgcttctccaccaacacctcacatgacatggccctcatctcggactgaaataggaactgattcgggtcttatttgcataaacgatgggggttgatgggaggatgaaaaagtaccatgcaatcaatgcgctcggaggggatgtggagggatctgtccaaatggagttttgcctcccaagaatgcgatgttcgtgacttcccttcatctttctgttaatacatatgctaatctagttacggatgatgcacttgctgtgaatcgtgttcgttctatacatatttctcttgtgtctgtcaatcaacaaatggatgaacgaacagcaaaggatcggtatacgaagctctagaagaaaaggtcaagttactcgaggccaccctgattgagcatggtatttccttaccgactggttcttcaggtcctttcgcaatcaagcaacaaagatcttcaggcctctccaataactcctcatcatctatctctggtggaatttttaatcctgatccttcggaatccaactcgacatcgacaactactcatattcagactttacccctgacgaaacctgtcggtaaagatgttgacatcgaaaggacgtggaagaaggagggaagtgatggtgatgagtctgacaatgattggatcccggcgttaggaactttggaattgggagcggggggtagcgcaagatttgttggagctacagcctcgagcgaatggtataacaaccaagtatgtaccatcgcttcatatcgtgtgattgcaatgtgtactaaaatgtcaaggccaatttggtagagccttcgaaaccaccccgcatcttcaactcattcggaaacaccccttctaatagatagactttcctcctcacaatcggaaacaaccttctctccttctgagtcatccaaccacctttcttatgttcaaatcaggaacttattgccttctagggaggaagcgcaagccctcgttcagttcttttaccggcattatgcctggaagttagtctggtcctttgtcttctccaacgtctacatgttctcaagagatcgagtgctcatgtttagtctcaaactttcaatccagtcataacgtcatcacagaatcgaacttctctgtctacttcgatgccttcttccctaaattctctccctcttcttccgactcttctcatgtccagcctcatccaacaaatgaactctatgactccgacacccatcctcataaactagccttactcttcgtggtcttcgccatggggtcccatttcaatttggaaatcagtccaggttcagataatgggtcgaggagatggtataagctatgcttgaaaagcatgggattgagaaattgtctggaagaacataccgtcgcaggtgtccaagctttggtaagtcactttgaccttcatcattcctgcagagacggcatggctgaatatttgtgttttaaatcttgcgatctcttatcaccagcatattatggcaaactaccaactgtgaggtttctttatattgaggtaatcagataacagatcttgatcaccaacctgtctatcctcacagcgcggtggacaggatcagtggtggggatagctcatggccgatgtggggaatgatcgctcggctcactcaagcagtatgtttcatcatttcaagctgtctgttttgctaatatttgatacagtaaaagcttatgctgcaccattttctttcgattgtgattttcactcagatgggtatgcatcgggatggccaaaaatggaacttaccaccggaaacaatcgaggaaagaaggttagtatactgaacttcttttttaccttgatttttgataccccaaactaatgacgacaatatatcatcaacatgaaagacgtctattttgggagacatatacagttgaggtcttccaggtgagcatctttaggacattgatatagattttgaattaaattttgatccgctctgatgtttgtgacggcggtactggtcgaacaggcaaattgtttcggacgaccgtgagtcaaatcgagtcttctgttggtcaaatcagagttcgtctcgctcacacctcggcgttcatccatatatcccttatgacgaaagaggcggcatgtcagccaaacattatgaagttgaatttccgcgcgagttagaaccgattcctctcaacccgccggagatgggcttcactgagccacccgtcggctacatgactagaaagtttcaactcgcgatcgtctctaatgagtatgtttcaacactctctgctttgttttctgcccttgagagatatttcgggtcgatctcatataaattccttgcgaagagtacttgatcagatcatgactatcaagccgcagtcgtattctgagatcaaggccctctggcaaaaaatgtcagtcaaaaagattcagattcccattgtgttatgtttaaagttggcgctgagctcataccaatcgatctctcacatttcagtatcaccttcgaaaggtccataccattttggcttcgctgtcgaccagctttattggctaccccatctgcttatcccgatttcaaagaagcgactcggtgttcacccgagctcaataagtctgaactgaagcttacatttcaggtgcgtattcttctttttatctccgtcgatcattgattgataggttaaccattcatcatcgttcggagttttttttctctttgtagcaacatacacatgtgctcaatatctgtgaagctatcatgttcttattaagaccatattttgcgagagcactgcaagagctgccgatagatcctagccagaaccgatacggcgaggcttatcttgcagtagtcgaaaggtgtggggtacgtgctttgatttgtcgtcacttagaactgcatggttatctgatatttaatcgatcgtatttacttcataggtgatcatcgcaatcgtcacaagtatatattctatttatcctcaaatcgcgcctcgacattggttcttttgggtcagtgagttttacgttgacattaggcgctgtgcatcatgtgagctgatatactcctttgcttggaaaccggatattaagtatcatgcatcctcagctgcagtttgcatgtcctccttaattattgctgctccccaatcaccattagttgcttacgcatggcagaatcttcagactgtatgcgatctattcgccgaaccacaacaatcaaggtcaacgaaagcctcgctagcactcttgctccgactgcgtcagaaagcgtacgacgttttgacatctcaacaacatccttctgctttctccggaatcgctaatcccaacggctcggataatagcgctagcggggcaaacgagcttgataaggaaacttcgcaagagtttgcgaatgttctagggttacatactcaattgatcgaaagagttcataaaggagcttcacgatcttgggtcatcagacagtcaggctcttctccaggaagggaacgacaaagaaaaacttttcaagagcctgcatacggaggacaatctcacactcaacgagtaagtgtcatccttcactttccgtctctatcgcattatcgttactgatttttgtttccactcttaggaacatgctcaacaccagcaggtggagacagaatcaaacctttcaccgcccatcacaaacctggcatggaacgctcaggacaccgtctcaccggttggcaacgcgcctgaatcacatctgcacacgactgccctcgcctccagtcatctattgccagtaagtcttattggtttaattttgtcttgtatgttatacggtcattgatcggattacgggacaatatatctgggtcacgctgtaaattattcgatgaacaagacaaacggtcccccagaagatcttcggatggatttgacgtcattcgattcgggcactgtcggcttgctcgtatgtcaccctacatcttgataactttactgtcatcctctcaaatgattgacagccagatctcactcattccgaagggcgcactctggtccacaagccaagacgaagtaaattatgactggccttccctatcccaacaagtcgactgggacgggatcagttcaactttaggtcttgggccactccgacctgttcaacctcaatctgctgagcctatcatcactggcgatctcgagtataaccaaatattacctcacggaggtgcgccgacaacaggaccagagaacgttcgagcaaacagtgctggatgaagatcaaaatcttgggaggaagcagatgaaagactatgagtccatcatctatctccaggtatttgaatcgatcagatgtcaccatcattataataagacaaattcgaccgaaattcagagaatgttgggcatgacaataggaccacataaacaattggatacaaatttacgaagacatggtaaaattggatcctgaagccaaaatacgtagtagggaatactcgttaaaggaatcgaggtcacactttctgacgtgaacgaggaaaaggtggacatgaaacgagtccaagaatatgatcatgaagagacttaaaagaaagataggaaatatcacgttacaagatgatggtcggcctcacgcacaacttgactccgatgcgattcaagaggattcacagatctcacaatctgatcagactgaccgttttgttcatctgaaatttccacttcgaccaagcggctaaatgaaaggacttacaatttaaattttgacctaaattatacaaggaggttttcgagatagggtggtgccttaccgcatgatgtatggagcatgacttggaaggcttcgacttgatacgtgctacagtctcgctatgcaaattcacataacggtgcatccggttctggggctcctatctcgttgtgaatcatcagacgaaccatcctgtccgctgatctctccaataggcgtgccaggagcagagcccgctcgccgtcttccactccaagccgtgccggtccccgcggctcgacctgtctgtccggtggaccatccagccaagaaggatcgtctccttccccaaccaccaccgacaccactgagcactgttccaccagtttcagtgagcgatcgtctggtcaaaccggcattctgttcaatccgacgctctagagtctcattctcccgaagaatatctcgtctggttcgatcgaccagggaccgaccccaaaatgaacggagaacaactcgtcggtcatccatttcggaccgaccgggctcagcaggagcgcaaggtcgaacgggtggtgcgtattggaagggaagcgcttcatctattattaagaaaggcaaacttgctagtcagttcttctgtgaaacggtaatgggtaagatagagacaggcgctatcatacgtacatccaaaccaacctcgtcgcggccgagcggctcgttgatattgtttcattatattgaactttgagacggcgcgactaagagtgaagcattcccaaaagtatcaagtcaaaaagctctcgtgaaggcgagagatctgaattgatgagcggatgccgctcgatattatgctagaagacaaaaagtggactgcataggaaaggaggacgtaccagtcggtgatggagatttcggctcctacttctcctcggcaaatacatgctcccaagaactctgtgacaacacgatcggttgccttcgtgttctatcaattggcaggtatttgatccaatatgatagatcttcttgagcatgtcgagagaacagggtgacaaaggacaaagaagaggacgaagggaaacctacatcaatgagaagaacgttcaacttgtcacacctttcaaccacatgcctgagtcctgcctctgagaaccgtttacagccagctagaccgacccaagtgagctcggtcttctctttaccttttgattctccacgacccaagctgtcaaggaagctatctgtcagctcggttgcgtcttccagatcgattcgcttcagctttttgagtccactagtgaaccgtatcaacccttcgtccctcaggcctctaccgacgccagacagatcaagcatctccaagttgggagcaagatctgtcaagaactcgattcctcgatcagtgactccctcacagccggctaaatctaaaagcttgagtgtagcgagcgatctcttttcccgacctatgatcccaagctccttccgggcgaggacgactttagtctgtccggaaagaggttcgttatacactgcttcccaacggacgaatcgatcgagtaggtcgtcagtgagtccctcagaatggctaaggtcaagaatacgaagggcgggcagaccgcgagcgagagcgtcgattgtgacgcggtcgacagtttggaaacccgcaagcctgatctcgcgaatgttggaaggaacgtaggcggaagtcggaggttcgtctggagcggggattctgaagagggataagatgccgagcgtggtcagttgggagcatcggcttacattcagcgagatcaacaaagggatttgggacccgatgagagccagcgtcgagttggagacacaaggcaccgctttgaggttcaaatgagtcaatgtagggctctgagtaagtcgaagtagaagggcgcacacaaaagtaagaccgagcagtcagtttgacaagtaaattgaaccccactatagtgaaagagagatctctttctaaaacaaaggtcagaaatatgcttactttggccaagagattgtgcaaagcgtgttctgaaaaccctctgcaaccttcaaggtcgagcttcttaagtcttgtcaacagctgctctacagacgatccatctatcaggcccgcctccaagggtacagttcgatctctttcatcggtatcgatgggttgtccagcagcagacatggctaacgcacagacttccgcgctcgtgatcttggatagacccttgaggtcgatcgtgcggagaaaagaagatgatcgggcggctataagaagtattgagcccacagaaacagactgcgaggtcgtctttgtttctggcggagatgagggaatgcagaagaaatctcgaatggataagcttggccaaagctctccgtcgtgaatgagattgaaccactctttagatacctatgcgaggaggatgtatatatgttcccagagtcagccctaggagcacagttgtaggcgagagtatgacagtctttaggtgaaaaattgccttaccctactgagccggaccagctctcgccgtcctgcagcctctccaacccatctgttagctttgacacgatctttgtactcgtctgccttccataggtcaagcaacgatctgaacacgtgtaacttgatctctcttggaagaacagacccaaaatagtcgatcggagtccgttcaactggattagtgataggcactggggttataggccgagtaagcgagagcaaagatggattagtcgacacgactgggccgagtgtgatggagctgtttcgggtttgagatttgtttgaaggatcgatcacgcctacagaccgtctaccctcaaactccatggaatccttttctgttttggttatagacaggcgactctcgactacgagccgtgcggatgattctgcggaggaagcatgcttgtctgcaggtcctctggggaagggtattgctgaagaactgatgatgtacggtgacgaggttgtactccaagagcctcgaggtgtttgaggaatagaactggcaagcgatgaaggtgagtatgagaccgaggtcgaaagatgaggtggaagcggagactgatggggtgatgacacaaaggctaccggccgtgagtctgatgaaggaaacgaagaggaagatgaatcagaagacatggcagatgcgtgatctaccatgatgtctgaccgattgagaaaggcaaatcgagataggctaggatggaaaggaaaggaacgagatgagatgatgagatggcgaggtcattaaacaaccagcatggctgtaacgtcttgctgaagaactagagtgaaagatttcgcccgggcagagacgggcagggcacgaatatcaggtgagatcctgaggaaacacaggatgatgcactgcttattgtttaggtaagacactacgaaacaaaccaagctatgtgttaggcatcgtgatagtatgatgtcgagcgagatgcatcgtgcgaccattcttcatagcaagtcgaaggaaaatacatgatcacaagcatgtatcacatagaaaaacctcaagcacacgtcggagaatcttcgacttcatctcctggcaacacggacactcctgatctccagcagagaagaaggtgataccaagcgagacaacatgaagttgatgatctactctgtctacctgcttgtctgattagagctagacaagaagtccgcaagcacagccacattgcttatccgcctattcgagccagaccgctaatcttctcagtgcgatccccagtattccatctcggtccttgccgacaattttgtcccttttccgtcgagtttgaatccggacttgtttcttctctcttctttcaacgactcatacccacgaccataactacatatacaactacatacacacatcatgcttgccacccttcgaccctttgctttccgagccattcccagcatccgagcggccgcctttcacaagcaggcctttgcttcctactcttaccgaaccatcggtatgttttttttttttccttttcatccttcttgtgatcatctcacaggaagcgagaggctttcattcattcgttcgctcactcacaatcactctcttctttttgttgcgcctctgaaaaaagtcactcggtacaccaatgatcacgagtgggcctcattggacaaggcaaccaacttggctaccgttggtatcaccgattacgcccagaaggcacttggcgacgtcgtatttgtcgagctacccaatatcggcgagaccgttgcccagggaggtaagtatttacatgcttggatgcttctttctcttcaccgtatgcatctaccaccgagcgtgttctcatacttcttcctggtcgttcttttcctcagatgagtgtggttcaatagaatcagtcaaagctgcctctgaggtgtacgccccattgtccggaactgtccacgaggtcaactctcaactcgacgattctcccagtttgatcaacaagagcagtcaagagaagggttcgtatctttccctcgtctctttagcattctctctcactctgaatacacccttgatacaacggacgctcatatctcatctttcaacagggtggctcttcaagcttaggctgactaacccggaggaattcgaagagcttttggatgaagctggctacaaggccttgaccgattaaacagcaattgacctcatctttcaacagatttttccagcatacttcgcgttcatatttcttgactcctttctatatcatctttttttttggggagggggcaaaagaggcagaagagagggagagtagtatatctttcatcatttctaattcagttgtaaacaagaaaattcccatgtgtttcggtgtccttttctatcttttctttctttttgagagtttgcaaccttcttggttttgtcgagagctcacgtaggtttgaacctggcggacataaagtacgcgtttaccgtcttcagtgtggaccgagtagggtttgccccaggttgactgccgaagtagatgtcgaaaaaatagtccgtcagcgtattttcgccagcaatctataatgatagtcgggaggatgacaaacgcgttgatgatccactgcagtctcttttggatcgttgctttcgataccgtctctgttatgcgcgagtatatacatcgacaagatggccaggaatcgtcaaagtttttagcactttattatctctaccactcttcgggaaaaaaaggttgacagcaagaacaggatgagtgtgccttacctgatgattgaccatccgccaatagttctccagaatcattaaaaaaggtttgaaggagtactattcctgctccgacagatatatcctttccattctcacatcccaaccagatctctcccccgtctgcccaaatgggcttagcaaacgaaacagcttggttgaatagagtctgaaggtcgtctttgcctggtctgtggtttatgacaagcgacggcaccgaatgtgacgagccggaaggagacaaatcggagataggaggggaggaagaagtatagatggagatagtcggaaggcgagaagctggttcagataaagttccgataaacagatttcgagtaggcttcactatcacccctcctttcatccctctctctgactcggtcaccgtccttggagtaacggccgctcttcgtgcttgaactcttctccttacttcaagctccaattcgtccctttctaaagccaaaagctctcctctccagacccaccaatcacttggtgacatacccatcccccaactctcatggtcgtcccctgcgccttgatggtactcccatccacccggtctccgtctatctgtgctatcttcgatatactccgatgccgagagacacatcacagggtggaatcctagctcggaaggagaaggtaatgacggaatatgatatagatccaaagtcgacggtttatgaacgaagatcggtcgaagcggatacttcaacgaaggtagctcaagggatgaagcctagcagacgataccttctatcaaagttagtcaatcggatgttatcatgtttgaaaggagttataaggtaatacgcaccaaaagttttgaagcccagccttctagaagagcttccattcgactcttttcggaatcactgacagacctcggagacacgtagatccttcgagcccaatcctcagcttcggtctcgttttccgaagtcccagcttggaacggtccatctcgaacaataagtgcccggtttatagttgcgcaccattgaggtatcgtcttagaaagtgcatcagggagacgctatcgaatccaagtcgcaaaaaaaatgttcatggtcagattgaactgagaaaagtcgagatcgagattagtatcaaaagttcgatgacctactttgcctcgacgcgtcgaatcaacgagaattatcctttatttgcgaattttcagaaccaaacatgagttagtgccaggtgtgccagtaaacgcaacgcggagttctcatcaatgtgaaaggactgacccgcctcgttcagaaatcaaaggtaataagtgcaagtttgacctgcgcaggctaaaatcccattggcctccataagaagttgaattcaagaaagaactggtcagtcaggattttttcgtgatgatctcgttcgaacgttagccaaccttcgtggccatcttgtgatttaaagtaagctggcgtcgagggatgagcctgggtaaggagaagtgaggaaagaagttgatcagctgtacgttcacaggataggtggcttaggccaagctctagagacaaacgtacgatttcaggcggacagtaccaagctccgcatcgcaaattagctattcgtccaacatcctcacatatacatcaagctatgtcagttcacaaatactggctatatattgtcctcgagccaaacgaccttatctcaaaaagacaaagattcatcattgacccacctactaacggaagcgaagggtttgccagagagacttcttcgacaaatttggcatcgtcttgaatgcttcgtagtctggaatagatatcattcgattgtttccgaattgctttcgattgggtaaggaaagagtcttccattgtaagggtgtgacttatcaaaatgaacaatggttaggtctacagttgatggacctcaaatatatgttagggttgtaaatctgcacgtgaccacggctctgttcttagcctcaacactaccaactgtgagaggcatccgttggcttttttagggtataacttgatgtcactgtgtgcgtatccaaattagagctgagctaactacgtacgatggttcagaggcaatctcatcatttgttctccttgcaaatgatcactcagcttgctcttggagcaatcactgactagacttatgcacgcccaatccagtttatatctcgattcttactttactctccgagctgatcacctcgtgcaactatagatatagcatgtctaacttgatctgaccatctgatcaaccttctaacttattatcaatctatcactagtcttagtgcagaagtataggcacagatgataggatctgttgtgcctagggtcgaaacgacggcccacctcaggtaccggaaggacacgacgagtgagagtgaccgcgtcccaacgttcctcgtgacacaaacggtttctatcttttctgtgtactcaacagaagttgtctactctcttccatcctctttgtctctgtcgtcgtggataggctatccttcttttctcgagagaccatctccaagggttctccccgattttgggatcaaacagggagtcgtctggccggtcttcactctttgaaaacgcaagacctttcccgtgttttgattttctcaaacttgtcatctgattttctgtccatcaaacccgtcttctgaattccaagaccaaccgcttgcagataaattcgttgccaccccgcatgttgatcgagactctacccgcaatctattcatccagaggaataccaacgaacgcttttatctattcaaggcctcccttggtataagaaactttactcttctctacaacacaagctttcgatcatcaatcgttcttgttccaactcatttccccctcctcaggaacctgtactccgtccacttaacctacacctataaaattcctttctttctatccccgcacactcatcatgactcacaccattgaatctgctcaccttcgaccatcctctctggattcgactcccgttcagattctttcctccgccaagatggtgcggcctaaacgcgcttctcttcccgattctccaaggctagtcaaatctgggatgagatcgttttccctcgatgcgccggctgcctttaatatcgagccatacgtcatagaaacacccactcgaagtctagtcaagatctcaaaaataaatccaatgagttccctaaaccagaagcatcaagattgtgccgaagtcacactcgacgtgcactccagcttgattatatctagcatgccacatctggcggaggagcgtaacagacagagagcccttgcgaaccccctcaaacggcttcgatcgagtatcggacggccctcagtctctagcttcagtataagatccaccggtggttctccgatcaggcctcaggacccgttctctccaaaacgacttgctatcgacaaagaaactaatctttctgtctccttccctcaaattccaactctttcaaggcgggagatagtgatcaaggaaaacaaaaaacctgatgtcaaatatgttagtgtcagttccaagcttaaatcataattcggacctaattttctattttccatacaggttttaggaaatcgcattggaaaggggcagtttggaacggtctaccgagcgctcaacttcgcgaccggtgagacggttgctatcaaacaaatctcattggacgggctaaaggagaaagaggtagatcacctcatggaggaggtcaacatctttaaaaggttggatcatcctgcaattgttaaggttagcggacacttatctatctttgtcaatttgctattgagagacgccctgctcaccattgatccttggttctgattctgagcagtacctggggatggttcgagaccgaacaaccctcaatattgttctcgagtaagcctctttcggcactctttctgtttcctgaaacacagactgacgtatcggtctgttggtcaaaagatatgttgagaatggttccctaggttcgactatccagtcattcggaaaattagatgagaaactcgttgcaggctacgttatcaagattctcgaggggttgagttacctacacgatcaaaaagtacttgcgttctttcttcaggtattatatcaggcgactgactctgctcttattctgtgctttaaccaggtcgttcattgcgatctcaaggctgctaatatcttgacaaccaagacaggcaatgtcaagctaactgattttggggtctctctctgcttggcgtctgttgagaaaacgaggagaaacgatgtggccggaacacctaattggagtgaggccggacatttttcttttgcaatccggtttgacacatgtcttaaccacttgttgtgttttatctcctcacgttgtgtatcaaagtggctcccgaggtaatcgaaatgcagggtacttccacggcttctgatatctggtctcttgggtgcacgatcatcgaacttcttaccggaaaacctccgttcgctgagatcaagaatggcttagctggcatgttctatcttttttatattgttttcccatagaaatccttcggactattacctaacagcagtttgcctttctttctcatccatcgtaaatatagttttgtaccatatagtggagggaggcccgccagagatccctgaaggatgctcgaccgctttggccgcttttctatctcagtgttttgagaaagacccaaccaagagacctacagctaaatttctcttcaatcatgcatggcttcaggagcaggttgaaattttcgaggtgcgcctacttcttctgtcacctcagtcttatcttcatctatgaaagtaatcaagcttgtttttggatctatgaaacaatagtcatccaataaggacagcatcccgtttttccgtcgactaagtcttgatgtcgcttcaccgactaagacgactcgatggagatcgccttctttaccagatctcaaccccttgaatgatacagatcaacacatccgagagcctctgcacaccctaattccgaaagatcctcttctcgcccctttgtcatcgttcttgaatcgtccgccccgttacaaatttatcaagtggattcagagacgttctcgacgtctttctattctttcaaccaagcgcccgatattgccttcccgaaactccaacatctcatccagcgatgctttggacgaaacttgagttctggagacgtcatcgaagacaaagaacacgagctagttgtctttatatcaaattattttggcatttttgactttctgggttccgaagccactacgtggtgtgaagtttggaagtaaagtgcaataagacaagagaaaattgaccggaagcaagggatcagatgagaacctggtctaactcaaattccattatttaagacaactgcctctctgttcttacttccttttcactatgattccttgaactctttctattcaacttaagattatattttttgctcctcgaagacgcagtatcggctttagtcgtctgaaccactgttgtttttgtcttcatcactgcgatgtgtcagtttgagggcgactctacttttcaattctctggtttagctgcagttgtatatagagccaggcaacatattggacagttaactgaacagacaggtcaccgagacagaaagttaagaatgcataggagatagatccaaatttcttccgagagaaatgagacaaaaaagggcaagttaagccaacgagacagctgataacgatggctgctccgttgtgatgtatcggctgaggcagataatgaaagaaccaatgtgcaacgtcgaattggaaacgttgagctgctgactagggcggagttaatgcgctatttcttcgaccaatcagaagcgttcaatttgcatatcggtcatgccagtcatacatcagtcttgggtttaacacgcaacgactgtgcctgaatttcacgtcaggctcgaaaccggtccgaggattccggtagaagaatcgtatatattaccgggcgtccccacttcttgtcttccattttgtttctcagactcttcatcttccacacaatcaccaacactcaaccaactttctctgatacattctcgcttatattaataatgtctgccgtttccctcgcctcccgaaagctctcttacgttcgttcataacttttctaattgaatgatacttccgtatcctgtatagctaacgtcacctcgcttatctcttatctattgccctcaatagaaagcccctgcttgtgctctccttgaggaggcctgtgaagattgcacttgtggaaaggccggctcaaagtccggatcgatctggaagcttcactttgtaagtcacatctgtttcattcaattcgtttgatagcacgccgattgtgtgcttattccttcatggatggtctttttcgattgatctgcagcaagaggaagattgcgccagccgagtgactccttgcaatgagaagtgcacttgcgagaggttcaagccttacgccgctcctgcttttgtgagttttacatctttaacatgatcagtattttcacattctcatcctggccttttgctgtcacgattagaaatccgagccttgcgtctctggagaggttaaggtctgcgagggatgcacttggtaaataccatatcttgctctcgattgaatcaaattcagagactattgctaacatgctctttctcattctgcaagtggtcgagcccctcttgcctaaaagatgtatctcgattggttctctttgcctatgattgtctcttcacctcacatactgtacacccaatacgtttaacaccttctctgcatattagtgaatcagatctgctggttgtttcctactcaactcttaatttattgatatgacatgtcacccttaagtacatttacgaataccacctgatggtagtacgtttcaaaaagatgatgacgtcacccgtctcaattcgctttggttacgaaacgtggtcaatgcttgtgattttcaatttcttctttcaatctctggcgatcaacatctcttgacaacctaaatatgactgaagctctttctctccaatcaaccattaaggtagaactttctgcattgatatcgacttgagtcgtctctttcgattttactttctgactcttttattcgttccagctcaatgatggggtggaagtccctgtcctcggactcggagtatatgagatgactgatgaccaaacgatccaggccgttacttgggctcttgaggtctgtcccatctcgtatggacgtgaatttgcaaaaacaaagattgagcagacttgtttcgcactgttataaaaactaaaggccggtgtgaggcatgtcgacactgctacttgtacgttcttcctctgatcagattgtggagaaatccatccgcatcgatattcatgatgagtcttacatctcctgggcttttgcatttagggtatgaaaacgaaactgcttgcaagaaagcaattgaaggtttccttaagaagagtggcttgccccgatccgacgtgttctatactactaagcttagagagcccatgccatatgaccgagcgctcaaagcaatcgaatactccgtcaaacatgccccgggagggatcattgatctttacttgatgcacagcgctattggaggaccaaagttgagggaggaaagctggaaggcaatggaaaaagctaagaaggacggttacgtgaggagtattggtgtaagtacatgttgttcttcgccaatttataattcgcagttgagcatcacagcttgactgactttattccactctttctcttcctattctatcctaggtctccaactggggagtcgcacatattcaggaacatatcgaacgtgtcaaagacgactccaagccggactgcatcagtctgccttcgttgaatcaaattgatcttcacccgttcatgacccggttcgtgtctttcgttgtttcatcacgttaatcattctgatcatctgtatttgtgtatccggacaactaaagagagccgattgtcaagatttgcaaggagaatggaatttatcttgaggtttgttgaaaccttctcttcaccggacaacgccatgaacgtgattgtgactcaacatcgaggacgttgtttaatcaatatacatctctatatttcatacaggcgtgggctcctcttgtcagaggacttcggttcaatcaccctgtgatacaaaagattgccaaaaagcatgatgtaacccctgctcaagcaatgattcgttggtctttacaaaaagttcgtgcgggctcttcctcctggtggaaatagccttggatatttcctgctgaactttcattggcctgcatcttctccttggcgtttgcgttgtctgatgtcgaaatctctagggctttgtttgcatccccaaatctgtctcaaaaggacggatagagtcgaataccgacgtctttggctttgagctgaccgaggccgagatcaatgagatgagtgggctggatgaatatctcatcacagactgggatgtaactgatactccatagatacctcttcgttaaggtacggatatgtacaccgtaaaggattgagatgggtttcatcattattgaatcattctaggcaagcgcaccagatcgaaacagtgtgaaaaacactggccagacgaaaatatctatttgcgagatcatgaattacttcagtcatatgcttgaaacgaaatgtacttgggccggccgctggtcggccatcgggagcccgacaacccgagattatgacgatcacagtaggaatgaacttcgtcacctgtattcatttttatcatctctctttcatttgtcgaccggcatgatacaagtatttacatttgagcacaggttttcccaagaaccgtccttctcgcaacagcaggataaatctgtcagagaaggcagtgcagtgtggctgaaggtagaacacgttttatcatatcttatgccctcggtggtcatcttctacaagcccgaagagccgaagatgtaagtcgaagctccaatggttatttttaaacactgaactaccctaaccatcttcttctcatatgattatggctgttcaaagccatgccgataccatctcaggcagtataccgactgtagaagcatgcgaaagcaaagcgaaggacgtgttcaagctcatcaaacctatgggtgacagaaacaagcttctgttcgaaacctctatataaactgtggaaggtcaaaggagggggtgcctgttttttccttgaacaaagcacccgttcagcaagtatctcatcatttgccaaccgacgagttccccagtcaacagcatcacagccatgtcatccatttctgctcaggaagaaatgttgagcaagatcaactttctcgggggatatccaacatcttccgatttgtcaccatctatcgttttcctagtttgtgtaattgctctcgaaaacatcgcttgattattcgacatggcacatgcaaggtgttgacctgttcatacctctacttctgcagtatgctctcctcgctccggtcttggtctttcgtatgaccagaaggtccgatcggacgtggatactccttcggcctgtcatatttcttctctgtcgatttggcatgctggcactccgggtgtacatgtccaagaacacttatggatccggactgttgagtgagagatatgttttgttgatgctagtataaaattctttggagcgtatcatttgtttgtgctaacatgccgtatcccatcccagtcgccgagcttatcctcgtctctatcggcttcctcttcctgattgacccaattatcaccatctggaaacgtcacgtggaatctgtcaccccccagagtcaacatccgagatgggtcctacaactctctcggtgagtctgatgaaagatagatcgatctgacgcaagcccattctgttgctgaaaatcactctacttttcttcatcgcctagcatactccgtatcctactcatcgtatccatcgctactactgtcgttgcatcttccctcatcagttccgctctcagcaaacctagtgtgatcgacaacgtcagaacgctacgcaaagtcagcgccatcgtcactctcagtaagtgcaacatcatgtcatactctcttgctcaaggccgcccccagacacattctgatcttttgcaatccaaaaagtcacgatcgtcatccttctgtttgctgcgattcgtgtgaacatggcgtttcccgtcagccggaagggaacagtatacatagtggctgtaacgatgtgtcttatggtcatcgccgtgtatcgtaccgagcaaacgttctccacaggcaataccaactctactgctgcacgcgcagcattttggatctgtcagatgctcttcgagctgtgagtccaaatcggttttatccatggatgatctagttggctgatactgtttttttttttgttttttttttgcatttctgcagtgctgcattcacttcactcctcgtcatctcgatcccgacgtggtttcctggtgatgccataccgtcctcgtcagatactgagatggtcttgtctcagagccaaaatttcaaaacgcagtccatgtgaggagcaaagagttgatagttatactagaatgatagaagctcaagtaatcgcccatctacaaatattgtgacaatgcaaatgctctctgagtcccaagcaactaatagtcttgacgatacagctggtacaaagaaaacatctgcaacgagaagaaaaaggatggaaacatatatagaacgagagaacgggatcaaaccatcaccacaaccaaacaaccttcttacattgtcatgagcttcaagtccagtacttgaccttgattccagccacatcagttgagaagttcacctcgcccttggcggtgtttccgccggcagtcgtttgaagatatttattctgactgttgcgcgaaaagatgtgcttctgtcgttcggctataaagagatcacatacggacattgttagtctataatgaccagttactagactatcggtcacgaaacaacgtcaaattttctctcccacccaggctgtagaaaaatagatgcaagtatggtagaaatactcagcaacacggatcatttgatagacgatcaaacgctcaatcatcaaacggtaaagagaggaagaacctacttttgacagtgataggggttttcatttagggttagggtct

SEQ ID NO: 1874 - DNA, 331 bp, Xanthophyllomyces dendrorhous
cagtgaaagtcatagactttcccatgcctacatgaattcaccagagatgtcagagacttctctgtctataactctccttgtccctccgaggcgacgggaagcctgtgggcagacagaagacctttccccaggcttatctagcctcatgtcttcatgtctctatacctaaaagaggctcccttagcctctcatgattctataggagttccagactcctctaacgacttcttttctaaagatccttttgttgccgcaaggtatcgcccttgcccacacgactcctctctagaagagtcctcgacgtcacatgatctttccgagactcttctag

SEQ ID NO: 1875 - DNA, 628 bp, Xanthophyllomyces dendrorhous
aacgctgtacttgatggaagttagtaagttcgattgatattgacgttcatttgactgtacatattcaaatccaagtccaaactaatttccatcgcttagatttattatcatggtctcacgacatcagcttatactgaataatcgtatgtccaaaacattggaacgattgctacttccagctttcatctacatgttgaaacctagcaagtgtctttcgtcagtatgtccaattactaaatagttatctgagctgtgaatcatgtgcaagatacatattcatgtacatatgtttagcaccattcggtcaagcatcatgttggaattaggtttgaacattgcacgaaagaagtccttgtcaaagatctcaagaagtaatctttgtgtatatctaacactctcttgtatttcatagtctattttcaccgcttactgcattgacacgtcaatagggctttcaactttaacaaaacaacgaaaacgtactgctaaatagattgtagacctctgtaacaagttttcaactggtgatcaacatcttgccgtatgaatgaccgttctttgtccacgattcggggatcaaaaatcacaagtaacgatgagagatggcaaacataggtgagaaaacaat

SEQ ID NO: 1876 - DNA, 1483 bp, Xanthophyllomyces dendrorhous
aacataggtgagaaaacaataatgacgctcgtagacaatcaacttgtttacagattcaacacaggatagcatttaaactaacacgaaaaaggggatcaacgcaaatttgtttaacagaaatgaatatgcaatacaaatcatcatgcagtcattgacattgatgccacccgatcgagatcaagtgccatcagatgtgaacgatcaatattgtcagcatcatcccgtcaacgctttgagtccaatgacgccccggcgaagctcgatgtctgtaacataatttatacctctgatataagagcggctgtcacatcacggaagatgaatcatcgtcagcgatagtggtgatatgttgcggtcaacccaacaaagtctggacattcaacggtgaacactatcttttgttatgccgtgttctagcgaggtatctggtcagcagggcaactatggtatgcaaacaatgtagaccctacttcagtgtatgccgaagagactaatgaatattcgacatcaataatgaaactcagtgatggccttgccgatatctcaatcaattataggttcagaggtataaacatttgtcaacatttgtgctttcaaatggtgatgaggaagatgttttgcctagtaaaacagaaagcttttgcaattacaggtattcgacaagctcatatgcgtgtttatgcttgagacaacatgaaacgttcggcacgctgataatcatcttcagcatcctctaggttttcacaggctggtgtctcaattgttgattgctgaatttgtgctctctgacgcccggttctccagcctatctataacgaacttgtccaatgttggcttgctcaatcattgctgtcatcggggcacaagtacttgtctgattagatgtgattgttgtctcttaatacaaaccgttggtatatcacctggaaccgaacaccggacgtcaaagcaaatacatggatggagataattaaactcatataaaaatgtggaccacgcctgtcaatctcatgaggcatgacaaaaatttgctgaagcaaaccatatgactttgagccgcagtgatgctcgacagatcaattgtatctagctgtgagacaagtcaaattcaacaattccaagcccttgttttatgaggaaatctgacggactgtttttatcaactatgatatcagtttcccataacaaggatgtatgaactttgaccgttacatatgtaccttttccacgcctacttttccacgtacgtaaaatgataaagcacaacaaaaaaaatcattgtggaacttcatgctattcgtaggtgcgtgtccagcctgctacaagactgtctaaatgtgagtagttgctttgtctttataacgaacacatcatgctactgctttggttcgtcgactcagtttttcagagcatcagagtagacaaaaaacgtagataactctatattgtgaaactgcctcaacctcagaagtgtagtttcata

SEQ ID NO: 1877 - DNA, 597 bp, Xanthophyllomyces dendrorhous
aacatacaatcgactggtgtttgtttaaatgataaaagagcttgcgtctcccgagagagacacaggtgtgggttaaaggaataggaaagagtagggccccgtcgaaagacagaaccccgaataaatttcactaatgatccttccgcaggttcacctacggaaaccttgttacgacttttacttcctctaaatgaccaagtttgagcagcttctcgacgatagggtgccgttgccggctccccaaagccaatccggagatctcactaagccattcaatcggtagtagcgacgggcggtgtgtacaaagggcagggacgtaatcaacgcaagctgatgacttgcgcttactaggaattcctcgttgaagagcaagaattgcaatgctctatccccagcacgacagagtttcacaagattacccagacctttcggccaaggaaagaaactcgctggctctgtcagtgtagcgcgcgtgcggcccagaacatctaagggcatcacagacctgttaattgcctcaaacttccatcagctagatgctgatagtccctctaagaagccggcgaccagcaagagccggccgggctatttagcagg

SEQ ID NO: 1878 - DNA, 7720 bp, Xanthophyllomyces dendrorhous
gaacaccgtgtcctccggtacgactatgtagtccatcagtggctgatgttcctcattatcgcccatcagttccattgccctggaaagccccagttgagttctcacctcacgtccgcccacatacagcttcatgtcggatacacggtagaccaggtcgtcagcgtcgacgtcgtaagcgcccaccgcttcccagaactcactcggctgtagctctctgagctcagctcttccacttgactgggcaacgagttcgctcagcgtgacgccccaccccccataacccccacttgcgtatatcaaacagcattcgcagttttcgtcacatgcgccttcgtcattcggcctcacatatatctcatcgtcgtattctggtttgtatttcctgttgggatactcgagcttaggcatggtactggatagctgatcggaggtctgccataaagacaaacaagacagatctcgatcagcgaagatgctttgcgcgcacgtaccggccccagagggagaagacgtactcaagggcaagggtgtgatcgatagatcagaatgaaagctcgagaagaacttgagatgatgtgagcgaggcaagatagagcaatgacagtagatgatggaaggaacagagatggtgtgagtcagaagaaaagcagtctgatgaagggtggcggcttcatgaaaagacatgccgaaggtaaagcaaacgaaatgagtcactacgttgactttgtttcgtcgtcctaacattcttcttcccacgttctctttctcttgatctgtgcatctttttgtctgtcacgctctcttctcttccgttgtttctctctcttctctttgattgatctctctttcttcttgatgccattctcattctcattcctttcctcctcaagctaggtgagatgcgcaagctgacagtagcgcatgcgatccggatgcacaattcacctctctctctctgtcacacacacacacacacacaaattctttcgcttcccatccttctcactcttcgtgtcaatgatctgaccgaatgatatatattgcctgctcgtgcataccatctcatcaatatgtgtttctcaccttgcacacgtttgtgcttgtatgtatccttactgcctgacactttgccgtgttacaccctttcctccttgcatccttttccttttatatccatgcccaggcgacaaatagatacagatacctcgttgttttcctttacaatatagtccctctctcttttctctcttgtcctcaagtttggattctgtcatccttgttcggaacatccgagcctgaggcttccaacccatcgtgacagcttcacaatcaaacctgaccaaaccaaagacagaaacattcatcgtccatcttagtcgcaacgcatcgggcgccgggctcttccaccatgacattgattacatatgatgctcatattccaagtatggagtgatatcttcgaagagaaggagggagaaaagtgaaaagcaagcatagcgttttgtgtgaatgaaggaaggcacaaaggtgagagaaagaagatagcttgatatgtgatgtcgctggaataacatggatgtaagaagtttgatatatgtatatgtaaacaaaagaaagcttaagaaaagggaaagaagaagaaatcgaacaaacgaagatctgcagcacaacaagaagaacacagccaggatgagaaagggaaggtgatgcgacgagggaagagggaggtgaggaagtcaaaacatgaaagtgtgaagagatgggcaggcagaaaggcatgcagaaagataccttttacatccaaagaaagggtagctgagaagaaaaaggaattagccggctctcagcccggttttgggaagccagtttgtatcaaaccatgacaaaaggatatattgcctcgaacgtcgatatcttgggttgagccaacatcggccagtgtcgatgagatagtccggctgagtgggtacttgttcgtttattgagatgtggccgatacactctgagcagcaggaactgttgagcattcgttttacgttcacgcatattcacacatcgtctctattgacggagcaactcaaaaaatcgggtctactaaaagaaaactcaaactcgccacgttggttatcttgcacagtaagtcacataggccaaatctatacatacattcatatcccagcccatccctcaaagcttgtatcaaccttccgaacttctgccaaagtctccgtccagagcttgctagagaaatcactgcccgctgacgtctgaagccagggcgtacccctattgtatcgcatgtcgatgaaggtcgtgagctatgctgaaacatatactctctttagggaaacgaatgtgacatccggatcgacttgattattggcgatatatctcccatgagtctctgcatcggcaacctccgcagcatatatataagtcctcgcaccctcctcggctgttctggccatgatcctacgagcaagccataggatctgtttcaagccgaaaggaagatttttgtcaaagtctgtcaggcacattccgggggtgacgttgttgatgatgacttcggaagctgggacatgcgtagccaattgctcgacaaaggcgacgacggctagtttactgtctgggtatctatacattttcgagtacttggtcttatcgtcgaagtgaccatatacggtctggccagcgtcaattccaactttggtaagagaatgactggcatgcatctcaaagctgctgatgaccaggcgagaggccttcccacggacggcgctagtcgcgcggaggagaggaagaagttcgatagcaaggataaagttggtccagcagttgacttcaagagcagacatcgaacgatgaatacatgtccctagtgttctgaaagctcgcgtgatatgatgagcttactttgcataaccctctcgtggccgcttttgcttgtttcgtatctcatcaagttgacgcccacattcaagaggagcaaatcaagcaccttgagctcagtagtcaccttgttcgcgaacgctatggcgctggagtaatcgtccagatcgagcgcccaagcctcaaccttggcctcaggattcttctccttgacctcgggatcgttcttgagccgagagacggcgtctacgcctcggataagtgaacgtacagcgataatgacggagccggcacccagaactaagagttgtcgggatgcttcgaaaccgagtcctgcatttccgccggtcacgataacagttcggccagcgatggatgtattggggggtgtaggtgggatatatgtttgaaacaaggtcataattgtgaatgtgaacgtagacggactgatgtagcacaagagatgaagacaggtcggggaagatgatttcctgatgagagagatcataatatatctgttcatatcccatctccggtgaaactactcgaattggattacacatcatacgtctgagcaggaagtttcgatacatctttcggtcatcggcgtgctcgacgtccgggaatctaatgcccggacgaaagtcttccaagctctgtcgttcttccctgtttctcatctgctttgtcttttaactggacatcgttcgtatcatcaatcagcctaaaatgtctagaatgaggttcaatcagcgtcaagtagattgcttcggtcgatatcatgagaatctcgaccatggtcaacgttttttcttccccttttcagcctgttctctcctgcttcctctccttccatatttgttcgggtgttacccgtcatggatgtacactggctttgactctttctgtccttccttgtgttcccttgttctctcctaacttggtgtctcgatcaaaggatagttgtcaaggaggacaaagggatggcgtatgtgctgagaagttgactagctgtctgtcctcttctctctcaagcttgaaacctttttaaattctcatggtcccctatcagcgttatcattctcctgactctgcaatatcgcatgacctcttccttattcaaagctcaaattcactgagtacttttctgtacttggtccccgcctgagtcctctacatattcatcgatagcttacttctcttccgtaaccagaagaatgtgggtcttgtttatagcaacgagtcgcgaatctcttgagactttctgccagtgatctgtatgacggggaccagcttgtggaaactgtctgccatatccgcgtcgaaccgtgtatttgcagatcttgcaagcctgtgaagtagattcaccagtgctgttgtgatgaaggcaaacacaccaatcctcacctagcatgcttctcgttgagcttaggaggtatgaccacgactatctgacgagccgtatcgttcatcgccatcgcgctcatgctttccgtttatcgtgagaacactagctgtacgagcgtgtgtcgtacaggttgcaacaccagcccaatgcttgaaccctatcgatgatgattgatcttcattttgcaatccacgtagcttgggttcaagagaagatccataaacccctagatccatctttgactggctccacgatcgggggcgcagccatatcatgtgatatatggtataatatatcatcgatacttcatagttgtacaaaagtctttgctcatcatgtagcttttagaaatcacaactctatcataacccctcactttaggtatccaatagggagggtattgactgagaagaaatcgagaatactggggttcgtcagattgtaacttgccgtgttgtttggtgctccagatgaatcgagccccaacgtcgtgggccaactgtggccaaggtctgaagtagtaaaagcctcgagtacggcattacattgccatacttcctcagttgcattgggataaggatggatcgtgtaggttggatcgggaagagatccgttggaataacaaccatttcgtatggcccattgacgtctccagagagaaacattgattgttgcggtgccgactccataatctcccgttgctgagacatttcgaccctcaaaaggaatcgtttgatcgactacaccgtgcgagttgatgataggtaccgggcgagaaggatcacatcccgagaaagcgagcgtgccgttatacaaagcaggagagaccggagagaccggagcgaaagcggcaaagagagtcgacgtatctgggcgacatgctagatacgctgtgaagcctccgccgtttgatttgccagaagcataaacccgaacggggttgatacagtagtgtgaagagatgtcggcaacaacgtcttttgcaaattgtacctggatgatagcaaggacagaggaaagcaaaagcaaatcaacacacatacattccaaagaggaaatacaaaaaatcttacgtcatcgacagtagtatttgcgtatggcgcactgtaccacactcctgtcctcttctcagcagtattgtctgccccttggggatatgccgcaatgacaggaagtcctccaattgctatgccgggcacggagaactgcgatagtttttcctggttggccgaggtgcctccagctgaaaagaaacttcagtcagacgccgcccgttcatataggaatgacaaaacgctctcaccaccatgaaagctgagtaccaatggatgtgatgcattggaatcgtagtttgaggggacgtgaagtaggtatgtccgtccgctgggaagagtacgatttagatgtcccgtagagtcgagtttcaagccctgggcattacagcccgaagaagaatagtagaatgccgaatttgaagcttgcgctacttgagtcaaaaaaatggctgcgatcactgctgagaacattgtagaagacatggtgagtttcctggccccatcgtcacaccagtcgtccaggatctatatacggatcagtatcggcgatgcccggctccgagatcggatcctcggagtaaattcgacaatgagatatgcttaaacaagatgatggaagcaatcaactcagagacatgtatggagattctaaaagggacatgtgaggtgtacggcaaatcggacatacttgtatatgatcggttcttgaagccgggcaaaagacaattcagaacggaggtatcggcttaaagatgatccaaacgcgggttgacatgagatcagctgatctaagtctgcaagaaataccttcttttttgatcttggattgacgggatgattgacttacaacggatgaccctccgctcccaagctatacatagagcggacttgcatacttctggacaacagacccatgtcgaacatcaatgggtaccatgtgaagacagatgagtttgatgaattctaataatgatcgattagccagatatcaggttcacatctgttgtgattccaatgagaaactcgattgtatgacggtttaagaactcttctttcataagattgaggggacaaaggaagattttcccataggaaaaaagaagaacgcaggactgtgggagcattgagaaccatgtccttgtgtcaaggtttacaaacaggtagaatttcagtcacatctctgactatatgggcatgagcagcacgtggctcgatcgagcaaatgatcccaactttaccttcttgtttttttgtctttgttagcttatctatgtaaccgtcctatcttcgtctgtaaactgcaatgccatcgctgatggccatcatgtcaatcttcatcgtgaccgatgactggccgaagtgatcaatcgggatcgttgcaaagagccaggaatgatttgatagtttgtaagtcataaagaagtcggggtgatgaggacacattttgacatgtagacaatcatcgggtgcctttaccttaatgacttctgctagctcggaacgtcgtaagctttgcttatcgactgcataagggctagtcatgttttcgaacagcggcagtctggctcaatggggctcgcagtggtcactctctctagagtcttgaaggtgccttgagagaatggaacaaaagctccgaaaacaacggtcgtggacgaagaatgatacggaagtgtcgacagctctctgtggtgagtgtttctcatactcacgctaattgtgcagacggcattgctcacctcgatttctttctttggatccttctccgttcaaaactgccagtcttgatgatctccgcactgctgtcaatttgtattctcggtcttacttatggctctccacgtccttcactgcccgacgccggagatgtcaacgctggggtgcgcacatcagccgtgaaaaagcgtttcacaagctggcacttcgtctgccacaatgacatccacgtatatttgtggacttcggagatggcgccttctcgtagtcttctcgtaaccatgctcatggtcctgtaaacacgcagattaccacgctgagagtctcctcgccgctcaaggttcgtcaagaccggaagttccagacatcaaggatgtgctccgagtgccatggtgggttcttggggaggagcaaaacgtgggcgtcggaaaagtgttcgaagcatctgtctagtaagtctgatgtgttgaaaatttgttggatttctcaagatagtgcctcgagtactgatcaatttccctgtattttctgtgctttatgctttctctcagacgtggtggaactaggttgtcaatgcgtcccgcaacatgctccacctggctctgcgccaggtggagcacaacatgagatcttggggaaaccccctccc

SEQ ID NO: 1879 - DNA, 15851 bp, Xanthophyllomyces dendrorhous
gaacaccgtgtcctccggtacgactatgtagtccatcagtggctgatgttcctcattatcgcccatcagttccattgccctggaaagccccagttgagttctcacctcacgtccgcccacatacagcttcatgtcggatacacggtagaccaggtcgtcagcgtcgacgtcgtaagcgcccaccgcttcccagaactcactcggctgtagctctctcagctcagctcttccactcgatagagaaacaaagttgcttagcgagaactccctccccatgcctccccatgcctcacaacccttccacccatgcaacagactgcaatcgcagttgtcgtcacatgcgaactcctttccgggtctgacgtagatccagtcgttgtaacctggtttgtatcttctgttgggaaactcgaccttccgcacagaggctgacatctgaacgaaaggtctgccacaggatgagaacaaaggtctcggtcagcgaagggactttgcacgcacgcaccaggttcagcgaaagaacacctactcgaggggagaagtgcgaccgaaagaccaagacgaaggcctgaagctgagagccgagctgagatctgcgaagagaaaggagaagagggcgagccaaagaccaatgagaacagaagcgcgagaagaacgggggatagtgcaggccaagcgagatggcatagatacggtaggtgatgctgggtgatggtggaagatgagaggtaagagatgatggaaaaggaagaaaggcgatctgatgagaaggacatcggatgaaccggaacaacggattgccacatcgagtttgtctcttcatcatttcgttctcattctcgctttctcttctaacccttctactgtctgtcttcggttcttcccctttctctcttcttcattccttccccttttcttttctctacttatcttgttatcgcatctcattctgttttgttttgaacagattgctttaccgaaagagaccgtgaatcagactgtatgctcctcgatacctgatgaagcctcatccctaatctgagcattatgtgagagtaacacatgcgaaccggatgcacggtcttcctctttctctaattccttccctcctcgtccctcatattccttcgcttcccattctcctctatcttcttctcacctttttggactcacaatgctgatgaccgccggccaccggccaacggtcgctcggttgtgctgtaccggccggatggatgagtgtttggccagggcatcggatgaatggaaagaaagttcgagcgccaagaaaagagcccgagctctgatcacagatcccgatgttcggtccgaaagataaacaaggagtaactgctggcaactagccaatgacaaacggcagatggcggatttggccgagagagttggtaaaaacgtgccgacactgttcggaataaaaaccttacatcagccacaaccaactcgacctacaccacggacaaaactgccctcatccatctttgcctctccacttcacccattgttgactgcccatcttgctcactgttgaccatccatgttgaccactgttgactttgtaacagagttcatcgctgatctgccgtcttggctcatcgtttgtcatcctttacgtataagctgacttcggcggccaggactgtttacggtcatcgtccatcgttcctccttgctcgcttcccttctatcttttatcttaaaaacttttctcgtcgggctcatcgaatgcttacccagggctgtctcgtagacgttataagctcggtcactcttgcctcttccccttcttcgtcttcttctttcctttcctttctctctgtagtcaactgcttcgggactaactcgtccacctcgtactcatattcactacacatcctcagccatcacgtatccctgttgaccacacactccttgtcacctccattgatttaaccaagcatgctgtctttccgatccatcctcctctccgccaccgtgctctctttcctttcttcctccgcctcggccgcggcgactggggtggtcgaacaacgtgcttcgggatctcagccttcgccctgggcctgtgactgtacgttcttccgtctgcctacgtttgccgcaagacatgcgacaccgagaacaagccatgagtcatgacgtgtgatgcacaagactgacgtccgtcgccattctgcgtccatccacacagatgcgtgcccgaccattcctgattctagtctgttctatggagaatcggtcaccgggaacgacatcaactgctactacaacaacctgttgaagtgagtaccctcctgtggatgtcttctgttgtctctttttctctcatattcgctccttcgggctgtcatgggctgacgtctgtccatctttgcacttgcctccacgctctgctccgccagtccgccgatcgatatgtttatgtgctcctacggcccggtagcaggtgctgacacgtctgtcacttaccttgtcggctctcgcaacaggcctgtctgcgcgccgacatctggtccgaggacctgcaagacacggaagagaaagaacaactctgtcgagaccgtcgctcagcgtcggatcagggagaggcagtggaagccgacgaaggctgatgtcgctgatgtggttgatgtcactaatgtggtcgatgtggacgatgctgccgaagttgccgatactgccgatgttgttgatgctatctagggaaggtgaaaagggaaagagcgaacgtctcccatcttttccgtcctgattggtcagtcaaagcgaacgggacgatcattcttccgatcggtctgttcgtgagaccgagtctgaccgcctctgatcgatgcctccggacgctcttctttcctttcgagcatgggaccttgtttttgttttgttcgtcgggggaagtttcgctcttttgctctgtcgtcttccttgctcgttgttcccgcctgtttttcttctgtttgccttctctttgcttttccttggctctcccttcgcttttcctttgcctttgttttgcttcttctcttgtttcttcgtctctcggttcatacgttaccctgtcgatccacaggcctctttctccgtcgaccgctcgatgagactgccttttctctccttccagccttctgcccatgcggtcctacctggtcagggtctcaaagctttacttacttacttacttacttacttacttacttgtttaattgtttgattgtttcttatctgggtatttttcgtctggtcattcttcacttggtcttttcgtatctgacgattcagttatctggccatgtgatgatcgggctgtctgaccgtctgatgatctggtcgtttatccattcatctggaaagactctgtcgcagttcagatcaacggaaataaggagacaaagccgattgaccagcacactgaagggattagagacaaagatcgagacacccagggcgagacaacatacaaggatcgagagaccggcgcgagatgcggcacacagaacgcttgtttgccgaccatgccatatctccacctctgagcttgtccttctctccctcgattcttttccttgtcccgtcggtctgtttgctcttccgatcatatgtgtaatgtgttaatcgagtcagagtctgtctatgagtacaggtatgtatccaaacgcaagatcaaaggaaaagtactgttggtctatgcacatcatgatagaggaagacagcgagagagaaggagagggagatccgttcctctctgacctttgtgtccgctcatctggtgccatatcatttcatagcatctcaaaccaagtcagtctgtctacagtcatatgcacctacaccttcgaagcaaaaaaccaggtgtccactgaaagccaaagaaagcaagagtcagctcaacatcaattggaacatcgacctgaacgtcaacctgaacattaactctggcaccgaactcgaacttcgacctcaatcctgacctcatccttcttctcgcttctcatcacagctcaccacagctcactcgcccctatacaatgcaaagaacagcactcacagtccgaaacatattctcccgtcccaatgctcatgtccacacttcccacaagctcataccccacactctccatcgcagacaagatcgtacaccccagtatcctcgcttccactacctggacaccgtccgacgaccaccatgggttcttgcacagcttcagctgccaagctcccgcctctttttcacccgagctttggatcccaaacggccaagtctgttcagccgatcaccagtcggccagtcggtcagcccatgatcgagtgagtcagtcaatcaatcatcaggtatgtcagtcagtcattgttctcgatcagctacgcgttgttcctgaccagtcgttcatcgtgcttgtccatcgccccgccaaggctgtctcgacagaagaacactcacgtgaacagcctggatgaacgcgttcttcacatactcgtccggaggatcgatgatcctgaccttgtcactctcgttgaagctgattgcaaagtagtacttcttcctcggcggcacggagtgaaggatcagtgcatccttgtctcctatctttttcgacaggtcgcatgcttgatgcaggtcccagcctacggccgacagtgcatgaagtacatgacagagcagtcgacgagcggaaatcgcctcggacccttgtccgtaccctgtgttcgtctagattagctacgttctctcccacggcattgtccgtactcagagtcaccgcgatctatacgcagaggataaactcacatggccggcccgacagcttccactcataccctttgtggtatgggccctgggactgtatgccactactccatgctctcctcacagcatcatccacaaccgtcgtcacgttagctggcagacctatcagcctcagtctgtccgtccgaccgagatgaagacacccaaagaggtgtggaaaaggtggtggagggtcatacggcactttggcgggtgagcaggggcaggagcgaaaggagaagcacgtttgacatggtatgatcgttagctggtgtacactcgatgatagctaggatcgagatgatcggaagaagtggaagaactagaagaactagaagaactagaagaactagaagaaccaggaaaaagagcagaagagcagaagagattagacgaacagcccattctagtttgacagagtggttgattcagatgagagatgagttggtcgacggatgagttagcgatctgacgcaaagtgtcacgatgagaagaaagatggggatgagagatgagtgtgcgagatggaagatgggagatagagtttggaagaagacggtagagcaacaaacaggatgtcaacctcagagctcagatgacgtcggatctcatcttctttcctccttgccccttgccacagatttggcgccgactatcgtcttcgtacgagcctgtgtcatgcctttcatcccgggctgggtcctgagctagatgcatgaccaccatgcggagaaaagatgtaccgtcatagacatcctgggtcggatgatggagcagagacgtgcgtaagatacatgaaaaagcagccggatgcacgacgaccaggagtcacatcaacaagtccgtagagatgctcagtaagtatgaggatgggatcgagaccatccgagttcgagttcggtgggacacactgggtgttctcagcaggcgtctctctccgtcgtgactgtctcttctcggagtgtgcttgtgcttgcacaccctccatgccttgctttcttctctcatctgcgcatccatgctgtatcttgtatctctcgacgtatatagcatcgctcatgtctgcgttcttcttctcttcttttctctttcctcttgctcagctttggccgagactgtttagctgcagagactggaccacatccgtctatgttcttctctgacttgccttcttgccttcttcctactattcagccatagcttacttgttttctgcggtcaaaccatgctctctctatcttacaacaaactgtagaactctcaaaatacagatgattcttagcaccctatcttccggcgtctcaggaccgttctggctctggccgcaaacatcatcttcttcctcccttcctcccttcctcccttcctccctttctccctttctccctttctctcggtctccctctctccttctcaccccactcggcaccagaagcatattctgatataccaaggtatgttggtagcatcactttgttctttgctttggcagtatgttcctggtacagcttgtgcctttgcactacagcgcatgcctcatcatatacactacagcttgccacgatatacaaacagccccttcctcggcccatcaaccctctcaagtggcagagcagcactagggctcccccgcactatggttcccatgaaactgctggactcccaccgcgccactcaaccagctcggccggtgctttccgaactgctcaaactctggcttgagcacggtatcgtgcaagctaaagtcatcgaccgtcccgatcctggcaatcgtcattcccgggaacccacctccttttctccaaagcatcgttccgcacgtcttgcagaaggagttcatcatggtgaacccgcgctggatcgtgttgtactgtccgtaatgggtcaggttggactcgccccgggtgaaggtgacgtctggatcggcgatgacaaagttggaagcgaagatcgacgcggtgaacttgtggcagtcggcgcagttgcagacgaaggaggtgacgactttgtcaagaggctaagcgatgtgactcgaccttacatcagtcatgaggcagaacacagacacagacacagacacagacaccgagatgtagacagagatggagatagatatggagcggatggatgtagaatatacgatatgcgatatgcgacatgcaacaggcaatatggagcatggaacatgagatacaaaacatggaacttgcatctacaaacttgtactggacagctccgcaatagcaagtcgcggtggcctcccggtcggtcgaccagccatcattgttactcccaacaagagggaagaatcctttgcgttcagttctgtacgacatagtagagacctgtcaagatgatgaggaggaggagctttggtgtatgtacgagatgcaacgaagaagactggagatctgatcggttatgtgtctgctagatatacgcaatcttgagcacggcttgttcagcgaagggcaaaagcgatcccagagatagcggtacaagtacaggcggacaagcgaggtggaggttctcgctctcgttaaccagaacggatgacgtcagcatctgtcatcggtagcattgtcaaacgcacaaaggccctcatctcttgacttcttctagtcgtgaacggcagcctcgatcatccgtggcgacaccggatacatggtgcgcttctcttgtctgacgcgacgcatacaactggtctctatggtagctcacactgacactcatctgtccagtcaagctatatgcccatctacacaccctgctctgtttcatgacatgtccatacacaaggccatccatcgacggtcgtctcattgacgttattgttaaaagaagattatagtagagaaataaacggaagaaatagtagaagacgaaagacgaaggagttgaaccatgaagccactgtagactgtccctgagaaccatgtagaaaagacaaacccccaagagagaagaggagggagagagaaagagatggaaagagagggaaagagagggaaagagtgggaaagaggatgaactctcgaaaaaaaaagagaaaaggatgaacaaggcaacacacatcacatatcctccacgctctccatagtccagatctcctccggcctcttcttgggtataggatgacctctatacgcggcgatcctttctactgtagagtccaccagactgtcatgtgagaacgatccgccaaacgcaggatgcgcgcaaaacggaagaagaggtgatgagaacgtgctggtgaccactgtaaagactagaccagacaagactgaacgccacttacatgcctccccagcctctcgaggcacctcctccgatgtccgtacccaactcggaaaagggaatgatgaccgcgggtgtcgcagagaagctctggagggtgccactgttgtagtcctgtgctatgtacttgaacggaagctcgtggtcaaccggcgccgagaacagattgggcaagccgtgcacaaggccatccagtcggcggaggccacggcgagagagcgcgtacgcatgggtgcccatcggccggcgggacttgcgaaggccggggtggaaagtaggtttgtgtactcgttcctgtcccatgatccatccaaggtacctacagagacaaaagtgcgacagaggaaccggtaagcaaacgcaagcaaggacggatggacagtggacgcatctgcaacagtctccaatacgtacactatatcccagccctcagcctcgtcggccagagagcgagtcatctctttccaccgttcgacgagcgagaactcggcgtcgatatcgtcctccaggatcaggatatcatcgtcgtcattcttgagggcagtgtgccaggtcttgagatgggaaaggtagcaccccagtggggcctctatatccagcatgaacgtcgacaagaaaggtagccatcggtcagtccatagcagccagaagcctgacaccacaagctgacgcaagcctcaccaggtggccagagcggataatcaaactgcacgcccgggtttgttccctcgagaagaaactcggtactgttactgtcgaaagatgagagcacatactctctcctgttaggatgtgtgcgcattcagagataagctaggtgagtcagaacggtctgtccatctgaggtgacagagatgagaaatacacgaaacacaagagacacaacaaacacaacaaacacaagacacaaaggaacttaccatgtcttgccatcccacagtctgtccgctatgctcttcgccatcgtagagtccacgccatccctgatgcggtccttcaccacacgctcttctcgcatacgttccatgatccagtggacgacgggcgagtctttgacgacggcgtcgatgtaggtaaagttgagctctagagcatgagcgatcagttccatatgctctttccggtctgcaggaagcgtcaggcaacgatagcttatcaacgaccagttcggatgcaaagtgaatagagaagaatgcggacactgccaagaaaacagcgagacatacctggtcgggtggccaggttgatcacatagatactactccatgtcgttccctggtcatggccgcggatactctggatgagctcgtccctgtaagaaagaacgacagattgatccgcctcaaagaacagaccccagacatagaagaacaggcatatcgacccggtggccagggtgtacacagccgatacaggacgcatgtctatggagaaacagtcgtgtggaccttggtgcgtgcaagggacaaggaatgggtaaatcgatgagtacacgtaaaggaagagaagaacggggggtgaggacgaggcgaagaagggttgtagagcgattagattgatccgagactggacttataaggctttctcagggttccccacaaggaccaccccgagcgaacactcaacggatgatgtattcagtctgcacggacagagataactgagcgaataacgtcggacaacaccggacactcgggcgggaacgcatctgaagctgagtgatctgccagttccgaacagtgcccctcagtcagctctcttgatgccctcggagaaagggatgctggccgaaaagatgaccgagtcgatcgaaacaaacaggcaggacaaaaggaggtgagtgtcctgggaaggatatgcattcattcctctacccgttgcattccatctgtccgtaaatggatgcatcacatccgcctgtttgcagcgatgaggaagtatgcatttctatctcgaagaggcagtcggtcaggcagtctgtcaggcaatcgatgagtcagtcagtcagtcagtcagtcagtcagtcattcagtctgtctgtctctcagtttctcagtctctctcttggcatctccgtccgccagttgatcgatttgtcagtcgactgctctgtaaaggactccgcatctactactcgtctacacgacgcctgtcgctaggtaggcaacgtttttcggagccgtcgtcagtcaagaatacgtcgctatacttcccaagaggtacaggtgacggagtcggacggatctttcaattaaatgacaatgtgtgagtcgggaaaacgacatagaagtcttcccgctgctagggttatcggctcaattgtattctttcagttgtttcagagcgggaacttgagtcggagtttcctattcattccatctgcccttcatttatcaattgtattgaaaagtaaggatttgtatatatgcttgccctaagacatggtgagaacaatctcaaccaatcgtgatcgatacatggcccttttggacttccgtgtcctcagaccacaggccaccagattcacatagggcatcagtctggtctgccctatttgaccgagcggcttcagcggcagtggtaaacactagcactactaatgagcgtttacatcatcccgactttctttgtgtcttctcagctgttgagattggtgcctccttgtctgcaagaaaccttgcttgatcggttcaacttgccatcggtcatgatgatatgcttggtcgagccacgtgcagctagtctcgacggtgtccagctagacgcccggtgtctggtatacaagatgatcatcaaagcagtcgagccagccaatggtcttacgatcgttctcagtctctgatgtgtataggctaagctcgacacatatttagacgctcggctcgccagacttttctcctcttcgaacggactcaccacctcaaccctgccaagtgttgtagataggatggacataagtctgagagtagagattgatacaaaagaccaggtcctgtagacagtacgagacaatgagccgtcaagatagatcgatctccgtcaacagccatccgcctcacacgaagagagaacaagaccgtcgctgtagactttccaaagaccacgagagcatacatccagaaactctccctgttgtctgtcccagtacatcgatatctctccctcttcttgtttttcctctggtagatcgtctgttcagagatgcgccctctgttcctgccagacctcagagcactctgcacgcccataacttacttactcgctcgacagacatcatggcaagccgccgtagactctcaagtcttcttcatccttctcttcagtctctgccatgtttcccatgtttcccgtcttttctgtcacttttgatcaagatcagaccgatcgcccacagagggatagaagcttgggggcaatcgatcgacagggcccaaggtgaagccaagtcgatcgagtagccagacagcatagtctcggaggaagactgccttgaacatgtttgttagtgttctagatctgactattcggtgagtgtcgtgaacagggcgggaggatgagcatgggaacggtgtactggtttgtttggttctgtttggttcggttcggctcggctcggtttggctccgtggatttgtcaatcggaaacaaatcataagtcgaggcgaacagcggggcagtgcattctacatgaaatacgcatgttcgtgaggaaaacttatggagaccaaacatcaggatctcttcagtcgacttgtgccctggagaggaaaggactcattgaacggcgcatggaatgacgcatactgggagtcaagaaggacagcaagcgatgaatgaagtgccagcccgagaggagttgcaaataagcaagtgggcctgtagacgtgccgtttccctatctttatcccctcccgctcgagacaaagagcagggacagagcaagagaagcaagagacacgaaaagagaacataaccagcatcaagcaagagaacgggacatccagtcatgcctcagcgatgccagtcgtcttatgcgaacatgatgaacgagctagacctgagctaggatgtaacagaagatcaagcagttagccagatgcaaaggaagaagaacgaagctggttcgacagtagcacgagctccgcagacgcagatgttagtccagtttcatgagaatgatgtcagcacacatccgacgcagaccatgatccattctgaacacgacaagtagctctcctctgtgtctgtgtgtatctgagtgtatctgtgtgtttcgctggccgtgtgtcgactggcgtactgtgtgggaacggatgggcaccggatcccacgagatgagcgagacggctgcggtggctggcaaagaagaagctgacaaagtatcatgcgagatgatggttgatcatgatcatgctaatacgatctttgctagcccagctttggccgggcctgagtgttccagaagccacataaggctgatgggttgagcagtcagaataagagcatgtcctacatatctagcaagcaagcaaccgaagcacaaactcagcatccctctccaaccagaagcaactcacctcagtaccatgtcctcaagcacaactacagcacacaccatcgccgtggccggcgcggtcggaggctcggccgggaacgatgggttcaacgcatctgtcggctcattggtcgtcgaccagctcctcaagacggaggccaaggtcgtcgtcctcatccgatcgtcctcggtgagtgtgctttgggtgtgtggtccgtgtggagtctgtgtggtcgactggagccatagtgtgtagtaccgtgtggctgacgttctctcttgcgcgctttgtttgttattctctggaaacaggcggatctccctcaggtggccgagctcaagaggaagggtgttcagatcgctgttgtcgactactcgaacgcatcgtcgctcgagcgcgcactccagggagtcgatcttgttgtgtctgcccttgccgggggaggaactggtctccagttcacgttggatgatgcggccaaggctgctggtgccaaggctttcatcccaaggtaagttatcagtggcgcccgacggaggaaacagccgttctttgccttgtcttggcttgtctcctctcatactgtccttccttgggctgagctgatatgggccaggccgggctgggcccatgactgtgttagcagatgaaactgatcatgtcgctcttctttctgtcttcatcgacgcctcgcctgcactcgctgctcactctcttccagcgagtttggaaaggacgcgtccaaggctgatagcgactcgccgaactacgtcaagaggaagcttcagcttcacctcgatagcatcggcctgccctatgcctggtcttcagcggtctcttctcggactttattcctttcttcttgaagtacgtcgctcctgtctcttctgctttctctctccatctctgcgctcaagactggatgctaacgtgcgggctgtttctggtgaaccacaggggaggcgacggccagatcgagctcgtcggatcggatgacgtgccggtcgacttcatcaacaaggctgatgtggcgtcctatgtggctcatgttgcgatcagtatgtctcttgcttttgtgtctttttgcgcctgccttgctcgctcttgtgctatgggcatggtgagactgactgtgcttcctacatctgtgtgatctgtctttcgttggcaataggcattcctgtcgcgagccttagtgggcagacattccgactgagcggcttccgaacgacgttcttcaagcttgcctcttaccttaagagcaaacagccggcgacggaggcgaagcctgagatcgtgcgagtgtctgtcgaggatgcgctcaccagtttcaaggagcagagaagccccatcgcttacctcaaggccaagtgggcgcagggtgagggagtggtgagaactgaggagcaggtggtggagactcgcaaggcgtttgtcggatgggagcctcttcctgtggagaagtgtctctagagcatcttcctggttgcgacgaagggactggcagagcatatgtaaggtcctgagtctagagagaagacggaagagacggagtgagacatgatgatatgtacacatctacactgtctgtcttcccatcatcggcttgcaaatgccgagcaagatcggtgcaaagaaagtcgaaggaagacagcaggaaagtgtgacgattggacccagttggtccaggcaggatgcgtcaacgtatgatgtgtttacacaagtcgaccctgacaacgtcttctttcctcctttcctcctttcctcctttcctgcttcctgcttcctgctccctgcttcctgtcgttctcctctgcatctcgttatttaacactttaggcggagtttcgttcgtctctgacgacaactgcgtttctgtcgcactgagccagaacgggcatcggtgttcgctgagcctcggctgctatcgactttcggctttgtccgctcgtctttctttccgtctctattctttccatctcttttcttttcttttcggatggtcgtaagtcttttagataacccgattgatcaagtgagacattcgggcggtcaacgccgagattacagatcaatcccgacacggatcacgccaatcttctgtcggctgtgttctcacatcttgaccttatacaaaccgtggtgacatcagccttgagtcctacaaacacagcgctcggcccaacgccctccgtcccatacactgacatacacatacacacacacatactccggagcaacgaacactatcatgcgtgttctcgtcctcgaatacgacccgctctgggccgaagccttcgaacagatcagatcccagctgctcacaatcctgtcaaacgtcccgatagtcagtatcgagcatgtaggcagtacatccattcctggtctcgccgcgaaaccgatcatcgacatcgacatcgtcgttgcccccaaagacatctttcctgcgttctcagcgctctcgacaggaggatatacttacaaccctgaaccccgtaacatcgacagagcctccttcaggtacaacaagcacacccatgactcgggcggtggtgcgccgaccgaagacggcggtgtgagaagagcagtctacctgaacatcccaaccggggtctctctcaagaaccatctggcggtccaaagggtgttgctgactgaccgagaccttctcgaagagtacgctgccgtcaagaagacactagcgaacgacgagtttgaccacatcagcgactatgggtcggcaaaagctcccgtgctgagaaagatacttgccaagagtgatctggccgattccgaccatgaggagatcgcgaggttcaatggtgtgtcatcaatgaaatgagtcagtcccttcttcgagcacggtccatctccacccgtccaccgagtacctgtaggacactgactgactgcacaggctacttgtcgacgattatgctagtacagctcggtcaggtcttagaaggatggtgttcgcagcggggcaatggacagaccggatgcgagcgccgagagaatcagataggtatgagccttgtctaccaccacaacacttgcgttgataccgacaaagagactggctcgcacatgtacagtgtagaaaagggctgagtgaggggtgttgagttaaaatcgaagagagtgagcaaagaaaagaaaaatgaaatgaaatgaaatgaaatgaaatgaaatgaaat

SEQ ID NO: 1880 - DNA, 63579 bp, Xanthophyllomyces dendrorhous
ctcacacacacacacacacacatgtagacgccgtccacctcgactggcgacatggccgggcggacgacaaacgctcgctgtgatctggatgagagtgtccacagacagtcaagctgtctgactcaggccgtccgacgcaggctcatcaggctgatggatcgagataggcatcgaaagcctcccgagtgagcacgacaccccctatggagacggccagacacatcctgtcagccatggccggtatgcagaggagcttacacaagagtctcgaggcagcaggcactcacagtgttgcagcgtctgcctcaggatgggtgcgatctcgggatcatcccatgcatcgtcatgttgggagtgggatgcggctgtcgacaaggccaggtgttgtatgagtaccaagaacagacatgtcaagttgtggaacaaaccagacgaccagcagaccggtggatcagcgtgagaggagatggatatcagacaagtaggtcgtgttggtctacctaccttttctcaccagactcgtcttgaaccggcctctggggcctgcgcacccattccatcggcctatctgacgcacgtcatcggcggtccgacgtcctaggaagaaacggcagtaccactaagatgttcagcgaggcaaccattggggtcatcagcatgtactaaaggcaaaacgcgatgtactggaagaaagacgcgatgcacatcgggagcagttgggctcacctgaaaccagccacgagggtcttgaggtcggatccatctgttatagacgtgacatgacatggcatagcatgacaaggcaaaactcagctcaccttccgacaacgaacacaaagaaagcaggaggactgacccttgcttttcccagtcttctattgactgtgatgctttcacgccgtacttgtttacttctggacggtatgtttgcgaacaaagaagctggtcagctgtcacaacaagtgagccgtccggtcgaatcagttgaaatcaggacgaatcagatcgggtcacatcatcagatcgcaaatataaacacacgtcagatcacatactatacacactgccatatctatgatgcttgctttctcaccatcgaggccttcataccattcgtccggaagcgagtcgtagtccgccggtacggttcgccgaaggacggatgagtagaactctctttgtagaatagaggaaagcttgagacagacatcgaccaaagcacggtagtctgagtagtacagaacttacctccagtaagatccatcaaagcttccctctcgaagcatctcccacggagccatgtttggtgtgaagccttcgtagccagcctcgaaacggaatgtcccgtcgtcgtctctcgcaggttgaggcgcgacgatcgagtagtcgacatcgtcctcaacatacggagaaggcgctcgaggtagctgccggatcgcctttcttactgcaggaggtgagtctgagtaaacccggcgaatactgccctgcttgtcatccatcgatgcagcgatagaaaggtggtctgagtatataggcgcatcgagagcagatattcgggctgactgtcgaatagggactgctcgagctcgctcatacggcttggatcgagccggccttcggttctttggttttccatcaggctcagccttcggtgttggagctggcttcgtctgatgatcgagccgtatgcagcatgggaagcgagagatcagcaacatagacgattacgggaacgacacaaaatagcagcatctacctgaacgggatctatacctagcgacgctagcagaagctggttggctctgatgttttcctgtctagctagctcatattcggacatcgcttccggtgcaacagtgtacagatgttcgggcagaaactgagacagaatgtgttttctactagatagaaaaccaagtcgaaggagttgagtagaaaaacaggcgaacttcatccgtcgcgactggcatgaagcgtatctcggttgacgtcactattgcattcgccgcgaccggtcaacatcgccagaccgagatggcctctggcactcgctgttgttcacgcctgaacaatcatctcgcaagatgcacatcccaagcttcggccaacctaaatcctctccaaactcggtttctcatgagaccgtcaagacggccaacaaagacgagaacccggtcaaactacaagcagccctcgaggatcttgtccagccgggcagtgtgcagagcgttgagcaaggtgtgttctcgcgttgcccaagaccgcctatcttcgtaccgtcagatcgatctcgaccgagttctgaccggctggtggctggatctgtgacttgtgtcgatatcctggccaacatctggactagccggcaagacagactcctgcgagtccgatgctcattcgtatcagtctcaagaaggaggctcgaagcgaggctggcttgccaagttctttgaccaggacgatatgaacaaggtgagaaggaccccataaggcgtctgtcgcctgctatagcttctgtactggcggtcttttggtcccttgtgctggctgctgatgagactttgtgtttcccagctttttgcttctgaacatatgggaaagtaagcctgtcttgcaaggacatagcgaccgtgctcgaccggacgccggcgtagctgatctgccgctggttgtccacccttgtagctttgtgatcgtccggtcgacaggagagaggatctttgaagagatgccgatctatgtccggatgtgagtgatatgtctcgagtttctatatacatcctctcgctctactcggcccatttgccttgaaagcgttcgactgagccatgactctatggaacccaactgtggtccctccagtggcatgcatctactcttcgtgactggccatccgttgatgtctcaggccaagatcgaaaagctgctactcgctcagagtgtgaaacaaggccagacgttcgatgccatgggtccccaggtgagtcaagccggacagacacctgctcgtcttgtcagacgtgactagaagctgatgattctcgatcttccaggttcttcctcacatacaatcgtttgtcgatcagtttggactgccgctttctgatcttttggaacctgatctgagcaagtacaatgtatgtcatctgtctgactgattgagaggactgtcaagctcagcgttttgacacgtggtctgacataccttgttcccagacgttcaacgagttcttctaccggaagctcagagcggatgctcgacctatcgcttcgccttccgacccggcagtggtagtctcccaggcggactgccgactgactgtttggcagtgtgttgaggatgccacccggatatggtaagcatggatctcgcgatgggtgatgcatctcactagatgtcctctgtctcaagatgtttgcgactggacgtctgtctttggttgatgtcgatacctaggatcaaaggaaagcagtttactatccctgcgctactggggagcgaggcctttgcctccactctcggccccagtcctgctgttgcagtcttccggctggccccacaggactaccatcggttccatacgccagtgtctggaacgcttggaaagagcataaacatcccagggaagctgtacactgtaaacccggtgcgtcctgctgtggtcgactgcgtgtgtttcgccgttcagaccgtctaggaggtggctacgtgggctgatatgtgctgttgtgtggggccatcttctgaaacgcagcaagcgattaacgaggacctggatgtctttactgagaactcgagatcggtccttcctatccatcttccttcgggccaaactgtgtacgtcgttgccgtcggggccatgctggttggttcgattaactggacgcacacccaggaagggacgaaggtagagaaaggagacgagcttggttggttcgcgtacgtaccgagcttctgtgctgccttgatcgtttgccctgatcgctgctcaggtctagaagggtaaacgagatatgcttagccagcatagactgacatggatcgtctcgttttgagatctcgacgtcaacaggtacggtgggagcacggtgatccttgtgacgcccacaggaagtacgacctgggatgaagacatcagaagatcaagcgagcaagccatggaaaccatggtccgggtgggcgagaggataggagggctcaactgagagcgtgtagtacaggtctcggtagctggatatgtctttgccagctttgtgtatcgtatcatgaggtcagaatgatatgcattttgctagcttgattatgactggctcgacatactgtttatcatcagcagcgctcaaattagcctaattcaaagggtaaaatatcacgtcgtaggaaagcctaacgaacatcacagacagccgtcacggttgtatcttggttcatacctcacaccttctggtgatccatcagccaagccccaaacttttctttccgtgcggacatggatatagaaagatcaactaaaattcatatgttctttcaacccatacaccaaatcgagatacgacgtcaaaatgtgtcgtgataataacaataaaaagatgaaagctaaaaaacccaagttaaactctgtcccaagatctggagcttgcaacgaaaggaagctggtccagtatcatcgtcgaggagatcatgacagtattggcctcactgattgggagagtacagtctatgatagctagttcgcagggatcatgtttgtttatgaatcacaatatgcgaatttagcgcaaagtcctataagtggtaatggcaagaatgtttcgaagaaggagtatatgtcgagaagacaaagagaagataggaaaggactgaagacgaggaaggctctgatcttgatatccaagaatgacatgaaatgatagggtcgataagaagatagagggaacccgtccggtaggtacgatcagaagaactatctgggaggttctggaatgagaggatggtgatgcagtgtatctaatacaagcatcaaataacgacagtatctgataagtttacccatcccacaggcgtcgccccggttgacgcagatcagtcagagggagagacactgcatatcggagggaccacaggagacacgggacagagccgcgcgagatcatgaaatagagggacgatcagcgattgtctcggctgagggttactatcaccaagcctaaggcttatcatagatcggtgcacgcgacggtgaaattccgatggaaatcccattaatcggtcatccagatcgagtatgtattcccatcagatcactagtttcctctgagtaatcgtacagtgtcctggttctcttgctcttcatcatgacatcttccctgtcattacgagatgttatcgctcaagaatctcatccgtgggaatatttatggactaggagtataactccatgggatagaggagcggccaacccgtacttgctcgactttatcgagaaaccgcctaatggcatagatttgccccgaggaggaaaggccttgatcgctggctgtggacgggtcggtcagcctcgctctctaaaatttggcatgcgaatgactgaaacattttttccactttgagtaccttaggggtatgatgtagcattgtttcgagacgcaggatttcaagcatggggaattgatatctctgaaacggccgtccaagcggcacggaagtaggcattccattttgatatctacatttaaatcagcatattctcagtatgcatcattctgagactttgttctatccgaatgttttagatggatttcgagcgcaccatatgatgcaacgtcttctggaggcacagcagagtttcatgctgtagacttcttcgagtttcctatacccgacggagggtttgaggtgggtttctcccgttctttcttcttgatgctacaagccgttctctgttatggaatattttcctgtgttacttatgcttatccgacccaatctttcagatcgcttgggatctcaccttcttctgcgctcttcatccctcccagcgagaggcctgggcaaagagatatacaacgctcttatcatccaacccacgtgcgctgcttgtcactctttgcttcccaatcgatggaaacagactcggcggaccaccttggagcgtcagtgtggaggcatatgaggctgttctgagtggaaacttaggatggaaaaagatccacgaaggacccgggggtgagggaggacggttggttgtgtggggtcgatgaagcggcttaatgagtgattcgagtcatactctaacatgtatcaaacgtcgtctatattatatccatcgtatccatcatgccagcatctctgggctatcaccaccatctctatcaaagaacctcaactttgtctttcttttttttctttgtctctttttatgtccatatcttcgtctgttgactgtagagtttcaccgagtcgttcattgtggcgacggccagtcggaccggtcaaagagaaacccggtcaatggagattcctgcgaacaacgaggcaccaatcccgacagcttacaaaacaaaaagaactcgaggtgatgagaattcttagccatgttagatcactcctctgcatcagaccacttcttcacgttagaacactcatcaatcggctcgaagggtgtcgctccccttgtgtccgatgtaaagcgcaagagaacggattagaacccggttagggttaccttgcagctgatactactaccactgacagatgctcagcctatcattaggttggccattcaaggcgactggatcgcccatgtcttctctatcgctcatgatacagagtattgatccgtgctgtttcagcagtccttctggtgtcgtgaacggtgaaggtcggctttggctccttactcgcctctgaaccccctgcgggcccgatcgagtcggtcgtcgcctggctgggttgtacaacatctgacgcgcctcatcttctgaacggagatatctccgctggggtgcccacatcagctgtgagcaagcgtaacataagctgacgctttgtctgtcggcaggacgtccaagcgcctttctggccttcggcgacggtgcacactcgtcaacttctcgtgggcacgccgccggtcctttaaagacgctgtttaccaagcggaaagctcctgcgcgtctctgagtttgaaaagtctgggagtatcggacgtcgagagtgtttcaagtaccatggcaagtctttgcagaggagcaaagcgtgagagctcaaggaatgttgaatcgtctgtagagtaagtcccgtacttggtacatatcaagataatgttcccagtactctgtggtttttatgcttgctctcagacttgatagaacagatatattaatgcgttctacaacatactgcacttgaacctacaccaggatgaaaacgaaggggcaaggatgttggtgcttgatcctgccgctgctgctttggccgctgaggctgacgctaagactgatgctgatgccaaggccgacgctatgtcatcgacggggcaaactaaattcatgacccatggggatcatggtggtatgcgatctgaggacacctaagtctaaataggcgatgtatcgaccaccatcagttaagaatgctcccatcaagcttaagtcttattgaatatattcagtataatatagacctcgttctgttgccttcacagctttgactcgacctccttctcctccgttccggctgagatttgtttatcatttggcagaccataagcagtagggtgaatcacgttgaatacgacactggcgatgagcatcggcgccgcctcgaagacgtatatgattgcctggtaggtcatgtccaagcaggaaacaaaaggaagaaacgcatttatcagttttgattcagatacgttagtgttggactctctatctataaaagatactgacttccgatctgacaaatgcctgggcttcgcggtagcctaaactagtcttgccaaactcgatcgtcctgtagtttatccagtagctgatgtgagtagtcacgtacatgcggatgtagggatggtaatagacatgcgtacctgaagacacttcgtgcgagaatcatgaaggcgctacaacccaaagcgccgatcaaggccacccattttcctcgaggcacactatgacccttacatctcaaccagaagatgacgatggtcacagtgaagagcccaaaggtgcagacctgaaacaccaggcctgtaatcaagagtgccttggctttagccagatctgcagcggtctcaacggatcccaacaatccccctccagctgcctgcagagcaagcgcaatgatatcgcaggcttatgagttcgtgtccgagccatatgtacaggcagtcatcacgtaatgacatgtaagcatgatagttctcatcttgtccggttacttgtaagcagataaagagggccatgtctgacgtacagatgaagatccaaccaataaatcgcgctggtatgacacacaacgatggagcgacgtacagcatgactgtggcggttggacaagcgcttggtcagacggcctgctatgtttgttctagtatacaggaacggcctagcttacctctagccagaagtatgtaatccgtggcagcaagaaaatttggtgataaaataatcaatagaagttgcgcaagccatggatttctttcccttggactgctgatggatattgctctggcagtatagccacccatctcacctgtttaaagccatgataagactggtcagatacacctgatgagccaaagactagaacaaaacatcggcgggacgaaccaagtacccctactacaagaggccacatccaccaggatctcttcctcgatgcctggaagatatgagcgatggctgaagctccaaacagacacgcaaatgcaattgcgagaggacgagagggaacataatccgtccaataattttctcttgttttagacatgatcacccccgatagatggacggaactgaaaggatgaagcacggtatggaagatggatgaaccatgtaagaggagagcgtggaaattgtataaattgccacatcggttgatgatgacgcgtaacaaagttcagtcagactctgaacgcgccaagaaaagtgatcgggcgttgtgacatgaacattggcaaactcttttcccgatcgaaaccagttctatcactttcaacacatagaaacgattgacaagcattacattggactaaacccgcatcttagcgcctaccagctcctccccttccccgacctcttccacctccacctcgacctcggccccgacctcgaccgttgaaggtacttccggtcgagctgctcactcgctttcctcccatcccggttccggcctcaacatccgagtccggatcatcaaccggctgagcaacctgcatatcgtcatcttcgtcggcgccctcatcctccaaatctgaatctgtctgcccaggcttacgcttcttggtggtcgtcttgagagaagtgcctatcgagatgttgacctgagttgagcggatcaaataaagtaaaaagaatgttcgcaatatcagatgctaggcacagatagagaaaaatcataatcatttgcgcaccttgggaggaacaggaaacccgaaagcctttccaaccttgaccaggtcaagggcgttgacgtcaaagatcttcttgagactatatgatgcatatgcctgaaggtacgatcggaagccatcccgagccgactgatgcaggtagtagttcttggcgataagtttttccagctgtatggtatgattgccgaacaaatccaaaagagacacacaaaggaggttggtcagcttagtatttccaacagataccaagcgcgcgcgacacagacagagagtgtgtaaaacgaacctggccttgaacgttggctaccctatccactgggaaactgtactcattcagcggcaccttggctaccttcaagaatcgcaagaagccaagctcggtaggcaaaaggaatagcagactcttgccgactttgcctgctctggcggttcgaccgactcgatgaatataatcccttggatcatccggaggatcaaattgaatgatccaatcgactttggggatatctagtcctcgggcggcaacatcagtgcacaatagtgttccggtaggtgcattagaaaactcgaagaatgtggtcgttcgcttctgctgtttttgctttccctagagagtgaatacgagtgacagagcgattcgataatagcaagtggtcaacacaggacgttaataaagactgggttttgtcaagtccataataacagttgaaacagatgaaacgaagacatacatgaaggtgcagaacaggaacgtcgatatagttcaataactctccgtggtagtcaacacttttacagctggagaagaacacgatgatctttttgttcatgtttttcttaaggaaggtgaagagaaggaggaatcggcgatccgactcgcagacgacgtaaccttgttcgagcgtggagacagtcgaggcgttagcagactcgtcgacgttgatataaagtggaccaggtcggagtgagattcgcgcaagatccgtgactttagtggtctgcgtggcagagaagagcatggactgtcggttgtctattcaaagagaagatggtaagattagatatcaagatcgccgacagcttgactttagaatatatatgtatcagaagagcttgcagaaatcttacctttggggagaagagcgatgatctgtctcatctcctcttcgaaaccgatctccaagattcgatcggcttcatcgattacaagagccttcaaattcttgaaaacaaaccccttcgtgttctacaagactccaaagtgcacgttgaatttctgaccaaaagtgataaacaaaagagatcaggacgatgcactaacctgcaaatgatccaagaatcgaccgggcgtagctacgatcaagttgacacccttgatgagtttgtcggcctctgcttttcggttggctcctcccataacaattccaaacgtttgtgaatgcggctccataagttcttttgcgactccaaaaatctgcagagctaattctcgagtaggggaaataatgacgactcccgttcctatttttcgtatcacgacaatatgaaatgacgaagagcgctcgatgagtattgcacttaggagctgcgactatataggaagggagagagaactagaacagaccatttcggggcttgaaacgcaagtttgccagcaattccacgctaggaatcaaaaacgacagagtctttccagaacctgttcgggcagctccgagaacatcccttccctcaagcaaaggcgggattgttctggtctgaacttgagtcatctttgtgaagcccatgtttttgatagcttcagttgtctgaggcgtgagggaaagagagtcgaatgaggtatcgaccggaggtgagtcggcggtaatggtgttggtggacggacccgaggaagcggaaggaagattagggagaggcgtagtagtttcttcttcctcggaagactcctcatcatcaccaggagtggacgctgtcttcttagacgatgaagcaacctttgacgcgaggggggcaagtgcggctgaggtcgagggtttgcctgaggacgtagctgcagcagtagctcccttggaggaacgctttcttttacgcttggccttctcggccgagttcacctgaggattggctaccggagtctcgcctgcttgtgaggtggaaggagacattctgaatacacgagtcagtcgatggtggtgagaggaaacgactggaagagagcgagcagaaaggacaagtccagttgagcaacgagtgagttcccaaatttttgttatcttttatcttatgtaatttttcaaatatgaatcatatgttatggctatatatgatggttacatatctttccaaccctagcataccttggttgtaaccatccggttatgagcctggtttctgaattcgttccttgccctaatcatcctcaacagatcgttaacaacatcgttcagcgttcatttttcatttctcatcgtcagacgattaactacattcaatatgaacatctttcgtttgctaggtaagtgaagaacgtcatgtatgcttgctgtgagaagaaaaatcttgtttgggtatcatactgaccttgtcatcgattcatctgcttccgtcctttatggggtttacccttctctttccttttccaggcgatctgtcgcatctagcctctatctttgttctcttgcacaaaatccaaaccactagatcttgcagaggttcgtcgacttccttgtatgtgtcctggatgtagttctatggaaatatccgatgatttaagaacttttgcttcttttcgtgtctcgttcaacaccttttgctaacgctccatctcataaatctcaaaggtatatcattcaagactcaacttctctatgtcatcgtttttgtcactcgatacctcgatctactcagcttctcttctcatgtatcactctacaatacattgatgaagctcttcttcattggaagtagtgtatatacgctttgtcttatgaagctgaggttcaagtgagttgttttcctcattcactcctccttctagctgtcttttcaaagccttagcagaacaatctacttaatgacgctcgtatttacttattgcatcttatcacttctatcatccgatctttatatcctcaggcctacatctgatatgggattggacactttccggctcgaatatctcatcctcccgtgcttcgttctctctctactcatcacgtacgcctggtcgcctaccgaaatcctctgggcattttctatctaccttgagtcggttgccatcttgccgcaactgatgatgcttcagaggactggcgaggcagagacaattaccactcactatttggccgccctgggattatatcgaggattgtatattcctaattggatctacaggttcgttcttcttctcaagcaacctactcgtccccctcaaaaggctaacgtcacaccaatccatttctactttgtagatacttttctgaaggtacagtagatcccattgccgtggtagcaggcttggtgcaaaccgcgctttacatcgatttctgtaagcttctttctttttctttcttttttcaatctgtacgcgtcactttccgaaccagtactcaataatcggtccccgcatctctgcgtcactctagtctatatttacttcacaaaagtccttcgcggccagaaggtaagccgtttcaaacttttcttgcgtgtttcaaaacgtctgattaaatacaataatcatacaactacttctttcacagttcgagctccccgcatgatcgcgtcgcgccggcctcatcctgtatctcaagctcgtggttccctgtcaatctttgtttttacactcctcgctggacgttccgtttatgaacaacatgtcaagatctcacgatgatgttcgatgccgatggtctcctttatgaatgacacttgaaaatatctttttgttggatacactcgagcatatctgtgtatcttagattgtgttctgtgttgactataaatgttctatcaaaatagtgttggaatgcggcccaacaactcagtgctaggcgcgacgacgtgatgcttacataagctacatcaatcatcaggtggcttggagagctcacctcctccatctctctccctccttccatcactagccatctatcttgtatccattgtttcctatccgttccatcgtctctttaaatccagtccagataccttctacacctacacttctcagcaatccagtccatcattatggcttctgccccatgtgtgtatcgtatttgtctttttctcgtttcgtttgatcacgtcgaaattatactcccatctttcttcaaaccactaaacgcctttttttccaacttcttctcttctcttttcttttcgtgtcacccttgctctatccttgaactcaaactgtctgatatagtgtcctcggcagaacagacgttctatccttcactgttctccaagcttcaagagaacaacgtcatctcgggagcccaggctttctctttccttactctctcggatcttcctcatccagtattgggagagatctgggcgaccgctgatgtactagatcgaggatctttggatgtcgcaggatggacagtggccatgcgtcttatcgcttctgcccaacaaggtggaccggtgaatgccgaggtgggcaatacgggtaagtggtcgtccgcatagacacctacagtggaccgctgaatattatccacagccacgcgatgagtactgaagatgccttgcgctcttttggcatacctgtagctccgttcacacttcccaaatttaggggccatccacctcccccggcctctgtttcctcgcgaccttcggtcggtggcccttctctcaatcctccattgactcaggatgacatcgccaagtttagccgacacttccaaatggccggaccatcccctacggatggccgactcatggccgacaaagcaacagctatctttctgaagtccaagcttccatctcaacagctcggccaaatctgggatctagccgacacacatgatagaggaagtcttgaccagacagattttattgtaggaatgtactttattcaagccatcatgtcaggcaagatcagagaagttcccttggtcttgcctcctggcttgtatgagaccgcctctggtagtcaaccggtcggaggaccgtctgtaggcttgagacagatgaccgcttcgcctgctcctatttctagacaggtcaccggtcaacaaattcaggctcagcccgctactccggtccagcggcagctcaccgggcaacagcccctcaatgcccctacttcgtacatgtcccctcatctgaccggaggatcgttttcggctttctcctcttcgactcctcttcaacaatcgtcaccgtttgggtcatcatttacacctgcgccccaaactgtacaggttccgtgggacgtgacacctgcagaaaaacaagcaagtgacaagttctttgctcagttggataagtttggacgaggtgtcatcgagggagatgttgctgttccgttcatgttagaaagcaaactctcagaactcgtattagccacaatctggttagtgatttcattgcttttgtcctccttgccgctggcgttctgtgattgaaaatatatgttctgatgcttctcctttctcttgcagggatcttgcggatattcgaaaggagggaaatttaacagaggatgaatttgccgttgctatgcatttgatcaaagcgaagattgccggcaaagagcttccagccacgcttcctctgtctttggttccacccagtttaagggaggttcaacctgccccgcaacccgctgctgccaacccacagagagacttgttcgatgccttcaacgatacccctcctgcgtcaacgccttccacccagaactactttgctacagctcctacttctgctgcccagaatgccaatagtgacggtttcggcatgagccccttcggcgcatcctcgaccgtcgagaaggatctgctcggagacgacgacccatttacccctgctagctcaattttgcctgttgctccttcggtatcgtctcaacctaatgccgcgtctcctgctcctcctgtctctcaggccactattcgaagccctcccccccctgttacatccaggtctgctcctgctaatgcagagttaactcaacttcgagccgagcactcttcgctctccgagaaggtttccgaacttcaatcttctggatcaactctcgaatccaagactttggataccaaaaaagaaattatggatctccaggccaaactcatctcccttcgatctacgcatgactcggaaaagggcaacgtcgatagactggaagccagagcaaacgagcaggcggcggagatgaaagcccttcaatctgagctgatatctgcggagagtgagctctcatcccttcgcgctcagaagaatgagtttgacgggcaaatcatgggcgataaggaggagattcgaggaatgaagcgacgattggttgaaatcggcgaggagacagtctccttgaaagcgcagttggaaaagatcaagagggaagcgagacagcagcgtggattggtggcgatcactcagaagcagctgacaacctcggaggcagagaaggagaagactttgtctagtattgcggatgccgagaagggaattgggatggaggagccatctcctttcccctccttctccacaaccccagttaatctgcagacggtcgctcaaattccccttcccgacactcctcagcgagtactgagccctgctctatcaaccacgtcacaaaagagcaacaatccgtttgaccgatttgttccatctcccgccaccgcatttgcctctgtccttcccactgaatccccttcatctccatcggtacagacgccaaaggaacagagtgaagctgttcacactcctgctgagcctatcaaagaccttgcagcagagtctccgtcgtcttcgccgttgggtctggctgctgctggcatagctgccgctggaacagctttagtcggagtaggatctgccatcttcggagcccataaagacgttagcgacactgaggacaaagaggagaacgacaaaatacctcaggaacccaacgatggggtcacagaagagaaagctatctctactcctgtagagccatctactcactcttctgctttcgatgactctttcggcacaacgttccctagcagcacagttgttgatgacgggcttcccgcatctaggagttcgactggattcgacgatacgtttggagatgatgtcgtggcaccttctgccaacgccgatgaatttcccacctcggtttcaaccggtgttgcgaaattcgaccaaggatttgacagtagcttcgaggataatttccacaccccttctaattcagcaatgacactgcagacagggcctagtggcctagttggacaaggcaccatcaagtctccatctgatgttccattcgatgactttgaggcaagctttggcgacagcttcactcctgttgagccttgtgagttgaaaccatttccagtcatccagttttgaagaattgttccgcttacattcatctctgaagactttgatccagctcttccccagccatcggtgaccgaagtggcggtctctgctacagatccccttgaggaggctcaaagtgccgccaaaggtggccaagttggctctgaggatagcagcgacgacgaggatgatggccccgaggatttagatacacgcgccgtgtataacaacgggacgacacttgagtcgtctgacagggacaaggaaatcaactctggtcccccttcaaatcttacgtctacggcgagtgctttcagtacggatgactttgagtctatccctgctcacacagatcatccacttgaccaacctcgagctccgtctgaagctgatgagattccagtagccttcgctcatgcatctccttccatacctgcattgacagagcagactcaacgaagggtagcaccaccaccaccacctcgaccagctcctgttgagtctcaatccgaacacaatcctttcggaaccgaccccttcgaaaccgaacagacgtcaaatcttgattcttttgaccctcttcaaaagcagcctaaagtcggagagcaatcgttccaacaaccgctgcctgtttcggctgtcacaaccgttactgagtctctatctaacatagagctcgcaccacctctctctcccgggttcacaaagcttgaggagtatgacacgagtgaatttgttaaggtttctccgacaaaggatgcctctcatgctcaaaaccatccgaccagtgctcctgcttcacgttcttcggcgtttgacgacgactttgatacgtttgacaccgattttggaagtgatcctggtaacactagtgctttcgtagctactaccgctagcactgtcaatgctccaccatccttgacctccttcactcgaccggttattgctcccgctcaaaacaagaatgtcgatttcgacttcgacccatcattcgccgatttcgattccactttcgagacattcgggcctaccaccaccatcgtatctcagcctgctcaaacaggtgcttcctccgtagctgcgtctggattcagcttcgatgacgcttttggagaagagccatcgcacgccccttctcatgtttcccctgtcgccaactctgcaacaactgttcaagaaacgttctatgctcctcctcaggtccctcctagccaaactgctcaacgacccgagctgccctccaggaaaactgccgcagaacctgatgacattcgtatgtcaaatagtttcctctgttctttgaagatttattatcctatatctatcttcaactgatgcttctctatgactctcttgatccataacaacaatcatggtttctaaacagccgacgtgaaaaagattgtttccatgggtttctccaggtcacaggcgctcaatgctctcgaggtcagtgccatgtcttgcaaaagctgattccgaccatcattatttttggacgccattggtgttaactctcacttgctcacgtacagatcggaaactacaaccttcaagccgcgatcgatcatctcgtgacgggttcttaaattccatgaaatccgattctttcgggcttcctggtgtccatcctcactttgtcttgtttgccttcctatcgttctgtctattcgttcttaattagccttttttagtcttttttcttttcctttttctttttccaaaagtctcgattcacttggtgtctggttaatttctagataatacaatggtgaatatcgtgacttttatgtttgtattcttgtcgttgagaacaaggtacttgaccatgggtgatgctgataatgcatgcatccgcaatgctacaacaaataagaaaagtaatctgagacctaagtacgccctactctattcctccatctcctcttccctacaaacacgaacacagatgccgcgaaataatcagaacgagtttcagccttttggatatcacacgcgtgtttatgatagggaatgaaggtcacgaacagagcatttttggctgctacttcagcctgctccagtagatccgccggaacaaactgatggcgacctttagattctggacagatccacgtgatttctagctcaaactgcttgtccttctcatcagcgtgacatttatgaatactaaatccagaagacacagataggggcaggagcacacataaaccatcaggattgaagtgttagactttcagtgagatatagcataggcaaggtgtagcgcgatttaggaattaagaaaacatacatgcgtgcagcgtgcataaccgcatctcgggattctaaagtatcaaaatcaagcttctccaactatacatcaggtcgcgccatcagtataccatttgtgaacaagaaagttgacggaggatggagagaaaatatcggggtttatgagtcatgtgatttccaccaagatccaacctgattcataaacatacctctgtcttggccaagagctttcccttcccgactgccgttgctctgtgcccaaagcttaatccactgggctcaatcatatagagttgtggtccattcttgtcaacagatccaaaaattgaagaaactccgaaaggccgaacggatgaatagagggtgtagacttgaaggtacagcgaaactcgagagacaagatcctatagtaatgagcaaaattatgtgagacaagatattacagcactcgagccccagagttcaaaagtatgtgactttaccttgagggttgtaggggcacaatagatatctctgtagttctgagcctcatcccgcgctcgagaggctacatgcttggcatcggcaaagagaccagctgtggcctgtacacattcaacgattaacatgatgtcgatcaatcacctgttccgttcatgtgctttcctccaaatgacaaggaaacaactgggacctaccaagccgatgtgaggatcgattgtttgaattcttcgattggtccctggcacaagcaatttcgagtgaacaagcttctctacggctaagattactccgtcctttgtcctaataccgattgcggtcctattgaaggatacatcatttacgacggggcaattgttattacaccatttagttagtacagtagatcttgactattcagagatgaagatggttgccatgatcttcacgaggtgacaagaagaacattagaaactaaccctcctgcgtcaacggctttcccagcatactcgacctgataacatatggcgagaaaaccatgcaaacgatgccatgatcagaacgtgcctcaaatgatcatcctctgatctgaacagagatgaacaaagacaaagatctcatgagaaccaacctggaagattcttccgtccggagagtatgtggaagcactaagatcatagcccgttccaatagacgtcatgatttatgtgaaacgataagagtatgcgtattgatgtagaacaagagcagagagaaaagagatggggatgatcgttgtcgttgtcgctgtcgttgatgagattcaaacgattttctacgagcaacttgggacgtggaggagatcattcgagacttacctaatatttttgaaatctacataagtggtcaacccagtcgtcggcctgagctatctacaacgtacggcttgtccggatagattgttgttgttagtaaacccatcatcatggcgaacatcatattgtaagctggttcttctcttgatgttgttgttgttgttctcaccagattctagtatctggcaggaagaggaatcttattctttctctattctactctttttcgttgtttgttccgtcgtgtcagtaaaactctttgggctgccttactcttcatcaatgccatcgccattctgaatgaggaccgttttctctctcgtagtacgtgtgtctacaaatttgtatcgctctatagagcttagagaacttacagaaatattctcaatctgtctttgggaaatgcgttatgctcgggtgtactttatttttccgctctgatcgtcgttcatcgtgcaacttcaagttggctggtcatcagcagcacctcaggtggccgtgaattcatacggcgaggccggaacgggcccaagcgtgaaaacgaagctgatcaatctgataggagcaatcagaatgcttatgcctagtaagtctatatgatgcttgtgtcatttgatatcgagaaatgacagcataggatcattttaagtcagagatgacaccgcagaaagccatcactgacgcgtcaatctcgttactcttcctgttgaacatctgtctaccagtaccgctaatcatgtgcaatgtcatcgtgattctgtacgagctagccctgggagggtgaagcacaataaaataaacaaatagttctcttctatcaatatgtataagctggtttagaccttaatgtgttgtaacgccgtccttcttgctgtctttgcttcaccctcattgcgtctcttctccgacatcatttctcacgagaaagtttcagaaacaaatcaccgagaagtcatatttagctgttccacaataattacttcttgggctttactgccgctgtgccgctcctgcctagtccgccgcccatggtagttatcgtttcagccacaactccagatccagatccagatcccgaccctgaaccaaacccgctagacccgcccatcgagtttcttattcctggagatctagagttaagaattccaacccctcccgcagcataggcaccgcgagagttcatgccagctgatgaagcaggcgcggcctccattccagccgctcttggagaatttggatgcccaaagcccacctggcctgtgccgttggttccgcttactgagctcatactacctgttccaatctttcttcttgctccagcacccggtgttgtggaagaaacgacaggccctgaacttcttggtacaactgtacccgtgcctacaccgttggccaatgaggcgggggtgttgactccagcgggaagagatgcaacactcgcatgccttgaagaaacccctccatcgccgctgcccccgccccctatgctaggttcaagtggccgccaggaagagtacgcgttgacttcatcttcgagcccggaggacacacggcgagctttctcgtgccgagcctgaacagaacggaagtgatgaataagctcgcgccatttgatttcatccggagacgacagttttgccctaggtgggacagcagcggtggtggagtatgccctggaagcgatttatcaaacgacaagccgtcagatgactttgttcatctgaaaaagagaatggagagagatgacgtacggtttgggtatatgaagaaagcccatcgaactgactgagttcaatcgatttcgcagcgagacaaaggctgtgctctgcggcaataacatcaatagacctgaattgtgcggatggggcagagaaaatgagtgaagtgcctgttgggttgaaaaggcaaaggatgggcttaccgtataggcatttgaacaagtgaggatatttctctggctcaagaagctgcagacgtagagctgatcaaacgtcgtcccacagttcgtaaatcatagaaatcatcagttcacagtgaacatcctagtttacatatcaagtagaagcttcaagatgtttgttacgcacaggtgaatacaggggactcaattaactggacaagtttatcgatttgcacgagaagttggacagtgatgtccagatcagcactacctcgaagaatgggagctcatcattagtatctcatggtaattcatagaataaatcaaaatgaattgcagaccaactcacaaaagttgtagaaggttcgatgcgtgctcataagcttgagctagtaggcatagcgcgaagacagcgacaggggagtgacaccaggatcgatatatgaccgagaagagcctagattgaagcgcgacagttgatagcaaaaagtcaagaaaataggtcagcttcatgagaactgcggtattgcattggctgtcgggcttttgcttacatttgaccgtccttgggattcaaaacagagatatcaggagaaaattggtgataaatacgagcggctaccaagcaataaaagcttgtaatacagacaagcagatctgaaaagctcacctttgaatccaaatttttgagccgttttctaaactcgagcagttctgagctagtgatgagaatgatgttgagcttttgtaccatgctactggcaaactccaggtcctacaggtggtagagagcataatatgtcgtattcatcactgatcttgttatgaatagtattgatatgatgatgaggagagacgaacctcttctttttctagaatttcggcacatgtccggtagatccgttccgagttaaggttgacacacagctgccgaatgatcagactgcctcttgtttctaaaagtctccgatctgtgctgaagagatcaaggagattcaccatgaagagagtgaagtacgagtctcccgaggaagaagatatctgagccagtaattgaagatctcgcttgatgacttcttcagacgggtcagataaacattttagcagaaccgggaacgttccatcatccatggccaaaatctacgctcgcagacatacatatacgtagatatcaaagtcaatacaggctattgttagaccacagaacgacaacaatgatctgatttgacaaacctttttaggagctttttgatgcaacatgatcagccattctaaagcggctactctcgtttcttcatagtcacttaagaattgcatcgtgagtacattcactgttgcttgatagtcaaatgggtcttcctccgaactagatgatgaagcattctgggtcgtatgagattcgtgctgactagacgacggaatcggtgtgagtttaggtaactcgatagctccacgtgacgctggagattcagactgagaggtattattgttcagaacgggaaggcgaggtttgctggttgagcccgaggatgtaggttgcaaattagattctgtgttgggctcgagagggccactccctcgacgaacgggtggaggtgctgtgttctcttgagggggatcagagcttatgggcgcaggcaccgactgaatcactcggaataaattcaggttggtttgggctgcagcacttcggctttgtgatcgagaattcaaccgttcaattgaaggattatgagtcaagcagaaaacatatgctgaagagagctgatacatgttcttacatagccggagaaggatgagccaaattcggtaagattgcaggaacaagcttcgatgttgatggagtcatgacatcctgcgcgaatagaagaaattctgaaagccagtgcaaagcggtttcctgtatgatctcatctaaaatgatacagggaaatgttcagttcatctgcaaatgctcttgagtctacgatatattggcgatatcgcgatagcgaaagcaccaaacaacaacaacaaacaacaaacaacttactaggatatgatacctgtctgagcaagatatccatgatctcgacgtattgaaccatcacgccttgtccaggaatccatcctccgcttccttttccttcccactcttcttcgagatctttcaagtcagcttcattcagggctgattcctcgtcgtaggcctcatacggactctggctctctgattcatttgcctctgacttgagatcgccacgcttcgattttcgagtggcttgagaggctgcaagctgtcgagcagctcgctccaatgtttgttgtttcttcaccttagcgatttctctaatctctcgtagaaagtcggctaaaacgttctcggtcgcaactcgcacgtcgatgttctcgtctgctaaatattttctgtttatatatttccccgtagtttgggtcaggatgatgggaagattaacaaacaaattggcacaatccagaacagaggactaggctggagggactcttacagaagaccatccaggaacgatggcagatatgagacaagttcgagctccggaacagagtctagaacagtgatccagctaaccaaatgatttcttgtttggggagcgatcacatatattctttcttcaaggagcgggatgaatttctcaagagaaaagattggcgggtcatcatcacttccatgcagagatcttgtttcaccctccttccggtctgtgtaatgataacgattttttgagggcgttgtgtgcgaacgatgtgccacgtatcgcgaggcggactccgagacagtctacgaataggccgacatgaactatgagcttcagcccagaaaaggtgaccatgaaaaaccaagaggctcacatctttaagtaatctgtccaacaactctgctccattgcgcaccactgaattgctatctatcgcaagctatagggacattagcattctaagttcaactctgattgttgaaaactacttaccttacttagcgcatcaaagatctcgttgaagtatctcaatagctcatcttgggcgactttccctctgaaaaggaagagagttgtcataatcattatcagctggcctctgcgattttccttctctttcttcttgagacaaacatatgagagagactcacacattatactgtcaatgcgatttggatataggtagtttgtaagaggacatgtttctcttcaaaagacagccagacttgcaagaagaaatcacgaaccacacattccactgcaaagtatctgattcgattatcttgatctgggaaacaatcaagaaccgagggaatgatttgctgaaagtaagggacgatgtcttctccaagagcgattgctgcagctgcaaggccgatgaggcctccattcctagtcgtttgactgtttgacgggctgagcatcgcatgggcttgatcgatgatctgagggattcgagcctgatccttgagatcagctgtgggagaagagcattctcggaggagtttctccaggtctagagcagcattctttcgattgtcgtactaggttcacgaattgatgtgatatatgccagattagcgttcctaggacgatatgagaggcccatatgctctgcctgaagagacttactttgacatgattctacgaagttgattaccagaagtttcgattcagatttggtcgaatataaccaagaacgctgtggttgattaaggagaagatagcttacgagtcctttcaagataaccggatctggaatgtacatagaaataagatcgagaaggacaacatgatcagaagggccgttgaaaggtgggttcctctgagtgatgtgagatggttatgcagctcagacttacccatttctaccgacccaagccagaagaattaacaggacaggtatggaaagtggattcagcgatgtgtgcttaccaggcgcttattgcgtcgtctttaggaagggaggacaaggatggggtaagatgtaggagaactgtagagatggccggaagacgatcaacggtcaattcggctaggaccgcctatatgaaaaaagaagaaacccccgtggatttgcctatcgttccagaccgtaggagacatttgttttcaatcaattcttaccacctccactattcaacaactgattttctactacgatgatcttatagcattcacaaacaggtgctcatcaagagacagatgtacatgacaacaaagttcatgccagaaacagcttgcgctcgaaaataagtgcggcggagcagaagaaaccatcattctatataagaaacgcatactccataaggatgtagatattaaccaggttacagaatagacaactatcattgcctgaccacgagcacacgaaaacgaaatgtcaagggatagcttagttcaatcgaagtattccagtcgctcctcctgcagcagcgatattcaaatcagccgactttccaccagcgaccttagacgactgtatgttgacctgggctgctcgctcttgagagaacaagttcttagtcgtcttcttctggactcgacgagcctaaaaataaggaaataacgatccagacggtcagagccagatgaagaatcagaatgaaaataacattggcatgtactgacagatcgctcttcctttaccgcagcctttcgagccttcttctcttctttggattctactttcggacgagtgaccgtctctcgtcgaactgttcaatattgaagatatgttaggtagcgccggggaagcttttgatagcaaaaacgaacaaacatactggtagtctcatctcctccctcctcctcttcttcctcgatatcttgaaccggctccttctcaaatcgaccatttcgacccttccgacgccgggtggtttgttgttcaccattgaccaccgggaaaccagtcttggggtcaatagcgattctcagcttgctcttctcctgtatcaaacgcggatgattgtccagagtagtataggtacctgcgtgtcatcattcgtcatgatctgcgtcagcataagataatagatgagagaaatcaatacgaatgattgctcactaagaatggtttcacaatcccatcctcgctggtcctctccaatgatggaaggcatcggaagcttctcttcatcgctctccccccaaccgtgctcttcatcaatcctgttagcctccaagattctcttctttcccaacccttttcccgctccttctccatctccttccggaacgtcatccattgcacctccacgaagcgtcgccaatttgcccataggaccatccccctccataacaggcttcagcttgttacctacgatctcaaagttatcaaggaagtcatcaatgagagtatcaaagtcctcccgagtgacgagctcgggggcatcgatgggctcgccatcagagtcgtactcctgatctgaaggatcatcgtcgtctgaggaatcttcttcgtacattttttcgatctattcagtgatcgaaagagaacatagtttaaaatctggaagaaaagataaatccttggagcagatcaaaattcagatgagacgaacctggtcgaactgctcgtctaatacactaagtcctttgtttcggaacatactcgaactgctcatactaaatccagttgcatcactagccgctccctttcgccttctttttcctccgattacgctcaacggaggcaacccggagacggtatcccttccttccgagcctcgatcatcttcatcctcatcttcatccgaatcgatcgaacgaggagcgctctgctgagcctgcttgaacgccttgaacttcgattgccagtcggactcgtcctcctgagcaattgaagaggacgacggtaatgacgcggcagccctggctgacttttcatctaacccccactcctcaaactcatactcctctctttcttcaggatcaactgcttctcctgtgtgaagtagctcatctagccagtcgtctccgtctccggcctcgaccgcctcctcttcttcctcagttgcgataaaagcttcatcgtcgagagcctctaagacttgtcttaaatgagggtccatatccggttggagaccttgaagctcggccggtacgttcatggtcaatcgagaatgagcctgattgtatggaatttcgtcaatcgagggaagagcctcgtccggaagagcaaatgacttggagccggatggcgcagaagcggatgtgcgctccgtagttggcttcagaaaatcataagggtctcgcttggcattgcttttggaagtcgaggcatttttatatttggtggaaggggcctcgataaggaaaccctcggccgttgggtctccttcttcgcctccgacaggtcgaaggtgctgcatgtagttgtactcggtgtcgtcgaagaacactccataatcggcagcttccccaatattcttctctgcagcggccgaagtgatttccgcgtcgaatccggctcgacctttaccctagaatggatgatcatttcgacatgatcggagaagaggaaaaagcatcaacagctaagtgagctactgagaaccggagtggaagtgagataggaaacgatatctaccttagctcgattaggatgttccacgctcttcaagactctcgccgaagcgtctggatcattgatcaacggatctcgaagcgacctatggacgagctgataatgctgaactcctggccttctgaagattgatattggtgccattttgaggatgctttgtgggattatctgaacaggatgaggttcaatcggtccgtatagaaagtttcccaaaaatccaatttcgtgctgcttacgtaacctgtctatatagattatgtaatcattatcttggttttccccttcttcatcacctttaacctcttcttttctcttccatccatttccattcctgtccttctcaatcttcttcttatttcttccttgccctcatcatgacgcctaagcctggaacagaatcctagtatgttcagtgtgttgtttggaaagactcaacccttcccatggttcatcttggaatttcttcggttcttcacttgttgacacgtcttgcttctgtttagcctggtcatcggaggttgtggtttccttggtcgacatatcgtggagatgcttatcaaccgaggagagactcaggtcgctgtgtttgatattgttcagaggcactttgacacgtaagtccatgatgttcggttatctacaccacagcagacgtcaaaacagagatccatcgatgtatcgttcatcccgaatcttgctagatctccggtttgacacctcacgattggaatttccttctatcatcagactttgaagcttttgagctgatcaatcatgacatttgtaccctatagcaacgtttcgttctatgtcggagatattagcgatgaagatcagatttctggcgctcttcgtaaagtcagtttcttccaagatgtgttcgctgtcatcacaatatccatttcggctcgcttttcattcggacttaacctcattaaggatcatcttttgtttttaatacggtgcaactgtgtgcttgattacagttcaatacatccgttgtcatccacaccgcttcacccattcatggattgtcgaaggagatctatgagaaagtcaatgtgatcggcacccagactgtcatcgcggccagcatccagactggggtccgcaagcttgttttcacctcgtctgccggagttgtctatgatggagaggagaacttggtcgacgtggacgagcgccttgattacccaaaagtggccatggacgcctacaacgatacgaaagccagggcagagcaggcagtgctggaagctaatggtaaaggtggtttgttgacttgtgctttgaggcccgccggtatattcgggtcagtcggattttctcccttgtattatgggtctgaacaaacattacccagttcttgtgtctgatcgacgttgtccggattagtcctggagatcgacaggctttggtcgggtttgcccaggtaatcaaaaacaaccagaccaaattccagctcggcaataacacaaacttgttcgattggacatacgtcagcaacgttgcccatgctcatctcctggctgccgatcggttaggaagctctgtgagtatggagtcattcgacgagcctcttcaacccatcgaagccacctcgttaccttctatccgaattcctacatcggattctaagcctcttggaccgaatccgaatcctaccgaggatgacaagaaactgagtcagatctacgccgatgcctcgactgcgcttgacgttgctaagcctgtccttcgaaccaagtttgaccagtttgccaaccccgcccctgacccagaagaccctgaagccgagaagccagtagagagtgtttcagttgctggccaggcattctttatcacgaactgcgagccggtctacttctgggatttcgctagagcgatttgggcagagatgggccatgttgcgccttggacgatttctttgccaaaacctatcggaatcgtgctggcacgactggccgaagggtgggccaagatctctggcaaagaacctgggttcaccgcttacagagtcaagttctcgacccaggcaaggtattacaacaacgagcgggcacggagggtcctgggatacgagcctatcgtgagcgttcacgatggaatcaagatggctgttgctgtgagtaatcgcatcactcgaaaccacatataaagaacgttgtggagagcaaagagactgatcacgatccggacacgcttttaatagtggtacaaagagacagaagccgaaaaggccgctgctatcaaggcttgaggggttcgacgtctattcgatctcgcagtcgatttagtttgcaggcttttcgaaaacacttcaatatctactgtaaaaagaaaccctatcattttaccatcttccctcctcaatctgtgtctcacctccgctaattacgaggaaaagtttgcttaaagataccacatgtcttgttttgtaatttaaaaccctcgttcctgatctcctctccactttcctttgctacctataatatcaaatgactctatggccgttgttttctattcgtaaataacccaaacatcaaccaagccttgtatgcaatgcattccaaacgctcgtaggcttgtagattcgcagcacattcgatatataagcacagtctttcatttattcaatcttcctctttttactactcggtgcctgttcgctggtcgtgtcctgtgcgaccttgcttgacccgttcgcctcacccccagcggaggcagccgccgccgccgccaatcttgatcgctccttctttccaacccgtttcttccctttacccttctcccccttgacctcgatgtcgtttgcgcccgttcctgctgacttcctccacttgttcttccggtcttccaccggttcttcaccccaagttcgacccttgagagacttctttagttcccaaagacgcttatctcgaccaactcgaccggcaccggctccgccgtctgctcggaaagcagcatactgcttaatgctaaggaactggttaagctcggcgtctgttgccatcaaaatttcggctggggtcagaccgtaattctgcggggcggtcttggtgtaatggaatcgcgttgggaggtttccaatctgtagaataggaaggaagaaaagagagaggaagaagagtaagatttcaattagaaatgacatcggatcgatgaaacgacgaggcaaaagaaacgcggttgaacgacgtaccatatcttcatgatccaacgcatagtactcgtccatgatctcatctacctttcgcttcttctcttcctcagtaccctggaaaggaacaaccttcgaaggaccggcttccgcgttctcatcatcctcaaccccaccctccaaggtcgaagcagcggtggcgagaatatcgcccttagatttcttcttcttctccttcttcttcttcttcttctcttgacgagaagagagcacaggctcatcagctgcttcagcgtcctgtgagtgttttattattatttttgtaatcgggttcagcttcgacgattccgttgaaacaacatgaaggggaaaaagcttggagtaactaaccatgttgatcggaccgtcgtcgatctccatgtcctccatatcctccatgtctccgtccataacctcgacctcggattcttcgccatcttgtttctgctccataccgtacgcgtaaccttccgctccaccaaactcgtcgtcccaggtcggtttttcgccgtcctgtcgtagacaattccaaaatatcagtacatattcaagcaccaatgatgtaaagacttagcaaatgcttgggtagaataaaatagaacaaacatcttggccttcatcccactcgttaccattttcgaatagattaagcattttgttgtcatgagcgtccggatcaaagtcagcatccagatcgaggtcatctagtgtcaaagcttgaagggttacgattcaaattatgtaagtatcgatagtacgcatgaagaggtgggaaaacaaatgaaacaagcttacttcgaccatctttgcccaagcccaacaaggccaactttcgctcaatctccttcttcttctggttcttgagcttcttcttctcttcctctcgcttaagcttttcctcggcttttcggatctttcgggcttctcgagcgtccttccgggccgtatccggtcgtcgtgcgacagaggcaagctgtcggggatgtgtcggaatgacggctgcgtcgctgtataacaaagaaggcaggcattagaaacaatcctatcttgatatgacttgaacagcaaacaaagaaagggcgaagaggaatgaacgcacggctcttcgaaccggaaattgtagcgagtctcaaaatcgtctgccttgtcctcgaagtcactttcgttctcgtctagaggatccttttcatccgcactaagatcagagttttcttcctcaggcttcttgggtttcttcactttcttgggagccgtgatctcattataggatgggacgtgagtctctgaacggtcgatccaacctcggttgaggatgtacctatgatgaaagtagtgaatcgttagattcgtgttatacgctgcggaaaatatatatgctggtcaaggtggaacgtactctaataagaattcttcgtcagctttcttcttatcctcctctgaagtcttactcttcttcgacttctttgccttcttgacctctccttttccgttctcaagcacatccgtctcattttcctgcgcatccttctccttctgctttttgtcattctccacctcgtccagccctaaggcctctctgattcctttctcaccgcctcccgagcccagtaagaaagctctgtaagcttcatcttccatttcctcctccggaacgtcatccaccttctttttcacaaacagcccatcgtcctcctcttctccatttgcaccggatccaccaacagaaatattgaaagcatcaagagtctcttttcgaagtgcttcttgctcctgaacatgactggggagtgctgtctcattggttccgttgctaagattgggattggctgagtctaaaagagcctgacgttgaaagtcggaaaggtgaataggttttgctgatttgggcttggaagattgaacaagagggaggttggcgccggcagaggcgaggagagcggcttgttcctctgtatgagaagtaaggatgaaatccatgagtctaggctgaaacgacagcatacatgatggaagaataaagccgatggagaaacaaaccttcaaagacattccgtccgacttcaacgccctcaccacgacgaatcctggtcaacgttcgcaggatagcagcatccataacaggcgtcaactcctctccatcctcatcttccgtctcggactcagagtcggactcggagatatcggagtcatccgatgcggacggagcagcctcgttaggcttcttgtcgttgttgtctatcaagagccagaggcaggaagaaggttgttcagtcggattcattcaaatgaagctcaaagaatgtatttaggcatctgaatgaaagcagacaaacatttcttccaaggctggtgtttcgttggtcgtccagacatagtcacagcacgcttcaggcgatgtgtacgttgagacaagagaggaactcaggtaggtatgtggagggataccaaggggcttgatcaatcaaagtctgttgaggcagggatacgatcgtcgttttgagcaacaggtaatatgataatttggtagagcggtgcgcactacctaatatcagcctgatgcgtcacgccacacctaagcctggcacatcttatgtcagtcttggcaatccatctaccatctttgattgtctaaaagcccatgtctatagatagagccagtccgagtacacaatagcgctggacataagcatctgattgaaaaagttccgttacatgaagaaaaaaaaaagagagaacgagaaagaaaattgagagaatgccaaagagagacgaaggggtaagacatagcctcatgttctaccgacagaaaatccaaaatgaaatgagaagaaatgaacagccgagaagagaaaaacgttttctatgagcaagctcgatgggaatgaagataaaaataaggattgaaagggtccgttttgattgatgcacagcacaatctacttggactgcaagaagagctcgttgagcaacttgatggtgtcttcagggcaggtgacatcatgaccgatcgttcgctcgtcggtgtagatttcgtaatcgtttccaccctgtgttcagataaagaaaatcaaaaaaggttaagtatatctggagcgagtcgaaagcggacttgaatgtacaaaccttgtaggtctgaattcagggatattcgacaaagatagccagatgggaatagataggtcagccatcggcatactatacaggcagctttcagaataaataggagcgacacaaaccttatctccaaagaagtggacctcggtgaaaccctcgggaatgacgtactgggtgagagcgtaagtcttgtcccaacctggaaatgaaaaaaacagaacatttcaacggatgagagatcggtaccgcatgaaaatacgtggggaggaaagccacttaccaacagggaactgtccgacgtagccatgtaacgagaggtaagcaaatacacacaagttaactaaaatagcctatgcaaaggtgtgttcaagcaaaaaaacctaccacatcgaaagagatctgtccaccgattgagaaggtcaatccgtagtcagggaatttctccttaagcgcagcaacgaatttagctcggagaccgtgaatcttatcgtaggcctcgaactcgtgtcgctcttgaatgctgtggtagaatggcgagaaggacggtgcgtggccgtgaaacaattattgaaagtcagaatttgaatcaaacggatgcttctaccagttaagcaaaagtatgtcttacgaagcgtttcgaccgataggagatacgttgatcataccgtttcggaactcaacgaaggttcccctgaataaagtgaatcgagaaatggtttggtgagtgatattctgataagatttatgaatttggggaacgtgatgaacctcttgatgggaatgtccatatcggcgatgtagtggaggataaagttgactagaggcttgtacttgtcctctcccaagaacttgataaacgactgagaggccaaaggttggccaagcttgtaagcggtcaatccgttctcagcaaagcagtaatcgaacgagttgatgactgggaggggtcaaaaataacccaaagttcaattagtagggatctggaacagatgatttaaaacgagagcagacaacaagatgcgaagaacataccatcggagcctccggtgctgagctgctcgataattttggggagatcgcttccaccgacaaaagcgatagcgcagacctgtctgagcttctggagggtagcgaggatttcgggagaggcgtcctatgatagaaaaggagccataggtacagaagggtcaatagtttagcaagataggatatggaccttcgggaggttcagcaatgtcagtatatgaaaggaaaatcacctgtctagcaggggtaagggtaccatcgacatcgctaaaagtagggaggaagaaggcgtgcattgaattgtgagctgactgtacgttgctaatgcacagaaagacgcgattaagggaagaaaacaaaacaaacaagaaaactcgaaacttacaacatgcagatggtcttgggcttgggcctcgactcaaggggaacaataggagcgacggtaagaacgtgagacatctttaagagggctgaaaaggttagaagaatgagagagggagtgtcgttgtagtggtggtagtgggtactaaagaaagaaacgaggaaagatggacgaaaagggaaaaagttgtgttcgggacgagattggaaatcacagggaggtttaagcggaacagcagaaatgctgttttgggtcacgtgatagtatttaccccactgtcagtgttaggggcggaagctgggctggtaacggaagggttacgaagtagtaatcacacaaaactcttgggtctcagaggaaaagttcaggctcttggaactggaagacagagtcgataggaccactgggatgagaacaagtgaacgagtacaaggacaggggaacaagaaagtaagggaacaagggaacaagggaacaaggtgagaatgagaaatagcaaaggatccaagcttgggattcttatgtacaagcggtcgggaagcctgccttttatatagttcttagaccctttgggcatcatgcatggatgcgctggcagtgaaataagatggcagtgcgatgcgctggaagcctagtgcgctggaggtaggagagggaggaatagtggaagtggaaaggtctatgggtcacagcttccaatcatgtggaactttggtcatatccttagcactacagtaccttcacattacttccagcgtgtccgtctttcttcttatccttactccgtttttccagactacaactcaaggaaacccctgcaagatggatacaggtaagattcaacatgtgcatgtacatgcgcgcaacgaggtgacgaagtggtactatacaaagctcatcaaggatgatggcacgtggaggacaaccggcgaaaaaagcggtagtagccatcagccacaagcgcaccctggttacatgaaggttacgatgttgaaaagttctttgcccaatttttttttctcttccctcatcccttttctctctttctttcaccaccttcttttgaatcctacactcggtttgctgaattcagtagccttttcagtttaaaaacaccaaaacaaacttttcaaaatggcccccaagaacaccaaggctgctgccgctctcaagaccgtcttcaaggtcgactactccaagcccgtcgctgattctgtgagtggtccttgtcttcgtgagcaccttagtgtcaaaatgtctaacgtacctttcttctttgttctcagatcttcgacgctgctgagttcgagaagtacctccacgaccgaatcaaggttgagggaaagactggtcagctcgccgacaaggttaccctcaagagggatggttcgtatttttccatcttggttgtatgttgatcagagagttcttaaactaacctttgttctttttttctttcttccttccttcagcctccaagttgaccatcacctcaaccatccccttctccaagcgacagatcaagtacctcaccaagaagttcatccagaagtctgtcggatctggattcatgcgagtcgttgctacctccaaggacacctacaccttgacctaccccaacgtcgctgacgaggaggctgaggatgccgaggacctttaagcgccttccatcggtctttcttctcccaggggtctagtctcttatctttcctactttttaggtcagaataagagacaggcatgttttggccttagttctcaggttgaggagctcttgactgagtttgataccaatgggttctttgtttccaattttccatgttttgtgttttcaaagtgacattaaaaaaaacctgagcccaccttacagatttgaaagatagagtattgctgattattctgaatcaagtgaaaatagacgcacaatgcataatacataatgaaaacgtgcaaagagggaagggagtacagagtgtttttctacgatatctttttttttttttttgatgagcacgccaagtaaagaaatgcacatattgaaaactcttgaaaggccctgatgaaagaacagatgggtgatgacagaaaccaaaaaaacggaaaagtgatataaatgatatatagttaagcatattgggagattctcgacagtagaaagcaactatgagaaagatgggtctaggttcaggcatcgtcaggcattgggtctcttgtcctccttgctttcctgaaaatgacaaagaaattcaaatcacgggtcagaatttttgccaagatcgaagaaaagaagaaaagaacgtacattggtcgttctctaattttcgagtccgcaaacgttcggatctttcgcttatgagattctttcttctgctcattcttgtatcgtttacgaagagcagctccttcagggttcgtcgtcgtctgttttgagcaaaagatttcaaagcaagataagtaaaaatcacccgtagttttggcggttgaagtcagataaaacgacgtacgcgaacgatcttctcatttcgcctagcttgccgtttcatagcttttgtcctctggatggaattccaaacagaagagaacgcggagatcccgactttagcctggatgagagtttgaagctctacacccatgttcctaatttcctcatcacttgggtggttggcgtcgagaacacgttgtataggatggaggatttgcatcaggtactgcttcgtcaaagaaggatccaacactgaagcaagcgcggcgaagagccggaagatagagaggataggtagcgatcgtctaggctgtataaccaaatattcaagaacaccgcgatcagtttatttcaccaacacgatcaaagtgtatatacccagcactcaccgacacttctccgtggacagcaggtcgagtgatcaggattgtcctggccaactgagaaagcttggtgaacagccaagccgagggattgtccaaagctctcttgaacacatcctgctctgtggccgtctcctcttcatcctccggcactatttcttcttcttcctcttcgtcaccgtcatcatcgtcgttcaggtcctcttcttccgcttctgccttgtctacaggaggagcctctacgacttccgcgtcagcagaatcagcaggcaaacttgttcccaacgcgaagcatcgtcccaagtagacgatatttttgacgacctgtatggcaagcgcctcatcaatgctctctcccttgagctgaagcaaactctgccgggccaggctgaacaacccccgaggctgcagtggtccgtcctgatcgatagcagactgactggcgtcgaacgaaggggcagatgaaccaaacaatgtaccaactaaccgggctgatgccagtctcacccacgcatgtgggaacaaaatatgaccggtcacagcatgccattcaaccgtggcaatttcatcagggaatatcttgagaaccttggcgagagtggataacgactgataaggaagctgccaatccaagtcgtctgcaatctccatagcgaatggagagggatcctcttgagcgatttcatatgcctccaatgtagtcgcggagctagccaatatttcctgaacatcaatcaacaacgaagagacatacggcctggtttcgatgccgatagagtccaaaaagagtccgtaaatctgagcggctaaacgaggaagttgtgcttgggagggagtgttggcccagatgtgaatcttagaaacagtatcggctagctgttcagatgttaatcttggaagaagccccttgagaagctcggcagccatttctcgacacttgacagactcgtcattcgcaattactagagcgagacccatgaaaaatgagtccgagtaatcctgaatgtgcttttcgtcgaatttatcgaaaactgcgccgagaagctccatcaccgacagacgaccactctcgtacacgtatgtcaggttgttgaccaggaactgcatctgtttcttcaatcgaccagatccctgagggtaatcaagcaagaatcggagaacgttcgatcggcattgctcctgaacgtgagcagattgactggtcaccatcgtctcagctaccttgtccattacgtcgtagatatcggcgacaacaaacttgcgagagatgatcgagtgaagaagagcaaagatagctgcttgtcgagacggatcctcaaggtctggagtgatgagctcgagcagatagctcatctgcttctgagtgatgtccacttccttgcagtctcgaaggatgatagacaaagtccttaacgcttgctgagaaagatctgactcggtcgaaccggcgtgtttgattgtcttgaagatttgttgaacaaaggtaggaagagcagcagtgagggactcgacgggagctttgacgatagcggctgtggctttaagcccgaggatgacgatatctgacacgacactgaacagagactctccaatcaggttcacaagaggatccagtcgactgaggatatcagtatccgagaacacaaaccggcctcgacggaaagcagtgatgaaaagttccaatccaaagccaacaaatttgtaagcattgctagcatagtgatccaccgctcgttcctccgatcgtttgatagaaaccaagaagtttttaacggattgggagtccttcaaaacgacagacttcttctttccctgcaagaggtgggagttctgaccgattagtgtatggcagaggatcaatacgtcaggaggagatagtcgctcgttggagttgagacccgaagccactcgacgaagcacatcatcaacctgctgtagcaccttgaggacctgagtagttccgagaacctctttgataggtacaaggatctgaccgatcttctctggagaaatgagtcgggctaccagctgaaaagtgtcgagaccctttgaggtggacgttcgaacttctcgcatcttggtcttgaatccttctgcttggagatcttttccagattctccgaacacgacctcggcagcgatagcgaccacatcgtgcacacaatcgtcaaggtcactaaactcggaagatgcgagagacgtaacatggacaaggatagcatgaacagtgaaagcgaggacatgcaactgaggacctctctgtagcgcagccttcatctcatggatcaaaggagcaagccactcaggaccgagtgtgaccgctatcttgatgatagtctctttggcaagatctcgagtttcctgcgatttacttcggaagacctgactgagggtggtgaggagccgcgaaatctgggcatctcgagattgctcaggaaggttgagggcaaccttaacaataccgatagcgataggaattcgaatggaatcttcagtctcgtctttttgctgaagatacgacaatagggatggaaggagtcgagtttcgacggcgtccgcgatatacaaagcctgagatgatacaggcgccaccggaggttctgtcgtaaaataggaatatggaacatatcaaaatgtgctaaagtttctgtcaggataatcattacttaccagctgcaacttccgccgacttctcatcgatgacaatgatgtcgtgctcttctacagtaagttctgatcaaaatcaagaacatatcgcatcagtaactgtttcaagcgcgggacctgactgaattgggcccacaaaaagactcacctgcaccatcttcgatttcggtctcgattactggctcctccatcaagaagtggaaatgatccaggatagagaccactgtcctgatgaagaatttttcgttctccgttttctccttggccagtcgaatatactgccgaactagtccattatatgccgcccatttgagttgctttgagatctttccggtcgaggtgatggcttcattgataagatggtgatcagttttcccgcttgagttgttgatgaaatgagcaagtagtggaaggaatatatcggccagaaggttcgagtttgttatgatattatcatcgcaaagctccgagagtcgatggagagctctaattcgtcgatgagtctggatatggtggatgttggtaaagaaactagcctcatgatcaccgccagccaaaagaggctgcatctcttgaaggatagggatatgaacacacaaggatactgcagtagagagcacagataagatttctgttcgaaccagctccgttcgggtgcgaagtccatttcgaataccagggaagagtactcgagtgaacgtcgtgaggtaactctgatcatctaccatggcagctgtacgctcgacaaatcgacgaagaccaaaagcagcgttcgttcgaatagacatctcttccggatcttggatatagtagagcatgttgtaaatgatgggtaaccattgttggaccgtaagcgtgctccaaagttgctcattgagtgtgctgaaggcagctaatcgtcggtcgaagtcaggttcctcttttcgtcgttccgagaacgagtttatagaaacgataacatcgacaactgcctggagatctgagtcggtaggagggaactgaaggagaacttcgcagagcgcttgtcgagcctgcttcgatcgaagagactggaagagagtggaaagtagattgaaagagtgaacaaaaatagaggattcgcgatcggaaaactcggggatgagaggaagcaaactcttgaagatgagaagaatatccgacttgactctttcgggaacaaccttggcaggtttcctcaacataggagaaagcagagcgacgagtcgagcgctctgaggtccattagtcacgtaggatgccagacctgatagaattctgatctgtctcttagcgagttcttcctttacctgacctgatcccagaggtcgctcgacaagcacagacagattacccagaagctcgtccacgtagggcttgatgatttgattcaccaccgtcgcccgttcattctcgtcatcctctaaacttccgaatgccagtaatctctccacaatatcgtagatcttggagaccacagccggcttgacatttgtcgcagtgagacaagagtagaccttactgaggagctgtgtatcgtactgaacgaggaacggaacagttctggaagtagttgaccagatagcgaaaagctctaatagaccagacggtgcttgggtgttctcggtattgagcgaggcaagccgaggagagatgaacgatttgaaagccgcaggtaggtagagcttgaagttgaaatcgacagaagcgctcgatttgaagaaatcggcgaaacgtttgagtccaagctgtcggatagccctaaccggagtcgtatgtgactggacattctcctcttcgtcttcatcctccactacatcttctgcatccacttcagccttttcttccgacccgacagctttcatcttgccaatcttggtttgagcacgatggataagctccatcgttgttccaagcaaccttggccaagagggcatcagctgaggtcccaagtacttaaggacatctcccagcaaggataagaaaccgatttgctgttttccaggaatgaacacggcatccaggtcagagtcatctctagtaagagtgaattctccagacgacggcccagcttgagattcaatcaatccaccgaaaggagcgagcataagctctaccaagattgataattcctcggtcgcgcaacctgccaaagcagataagatagcctgtttcttggctcccggtccgttactcgcactagacctccctcgtcgagcaatcatttttccgtagagcattcggatcaccaaagggataagttcgtctcgatgagcagggttgacagaggctcctccgctgacaagcgagaatttagtaagctcatccctaaaccggacttcgtctaagagcattttgagactgtctttgtacggagtgattttgctattcttgaaagtgaagatacagtcgagcgccaatagttgaagctttgggtctcccttcgcgagaagcgagaggtagagggagtgcatctcgtccgaccgatagatggccttggggttgacaaacttagcaaacaaggagaggtaggcggtcaatttcaaatggacctgcttgagtgttagtcgagggagggaagtcgaatcggcgggaacaacagggaactcgtcggcgtcaagagaggacgagatgatgttggaccgagaggtgaaactcaaaaagagagaaatgaaatcccgggaatgcttttcggcaagcgaaggagcagcagctaaagcgtggaccagctcgatctcgtagttgagcacatcaagtcggtctcggttgaacggcatccgagactgaatatcaagtattgtagaaggaaactgattagtcaagcactcatcaccaggcctctgataagaggcagactgagggaacacttacatcagcaatagctctcaacctgtcttcgccatcaccctctacaagtgacctcatcagctcttcggccgcctttctgcttggatctctaaagcatctgaccgcctcatcgttctcttcttccttctcctcaataatcccatcagagttatccgcccatgcaggcataggttcttgcaagaccgaatgaggaccttgagaggccaaagtgagctggtgcagcaagagagcccagacctgatcgccgtgaaccgccgcaagtgaggcaagggctgtgtgtgtggcagggtagagaggtcgaaggttgacctttaactgggctattttggttcaagtagacaatgattagtggacgatgttcgacgcatctatacatagaccttctttcatgccagaaagtaggagaatacttaccggtcagaactttgagaccgacatctaatccaaactgcatttcctctttctctccgctcagattttgtatagccctctccagcctcgccacacctacacacctttccctcgcatccttgacgctcaactcgatttcttccattgcaagtgcctgatctaacactgctctgaccgatgtgttcttcgtcggaagcgctaccaaaattttgagggccgctttccttttttcagaggaggatgacatgagttgagactcaaggaggggaaccaaagtttcccaaccagttggagccgagccggaagcaagaataggctgtaagacttgggaaagatttttgagcagcacagagggaacaactgttttgctcagtatggatgcaagcaccacatccgtaccgaacaagatagaccgaatatcggtcacaccctgagcgatggtggtacctgaattattttcccaaataactccaattgtctgcagcacctcatcgaggatgaatccaagatcgagaatgacttctccttctttttgggtggactgcttataagcctgaaccccctctcggagaaagccaacaagagatccccacatgggtcctttagtgtcttctaatcggccgatgagtaaaagtagattatcgagaatcaggacttcatctttggattgggaggataatgtctgagacttgagaccatcgagaagggaagccagatgaggaccgagagtttccctaggaggagatttaaaaatggcgctggtaagaagattggcgcgagagagattgttgagtaaattgatgatatgaggaagactgggggatgtgacggaggtttgcttgaatgcggaaaacagtgatctagaatcaagtcaacaagaacggttgagttatttgctggtaaatacaaggaagaaaaattacaaacctctccagaacacctccaaataacacgtctcctcctcttttccaccctgaaccctcgacgacccacataccgaccaatgcactccttcttgcccagtcgccctccagactttcccaaagagcctcaactgttgaccggtatttgagccaagcaggcagattggtgattggcagaagagtagatacgaggtagacaaatgaattttggagggttgatgaggaggttgaaagcttgaatagaggtggaagtagagaaagaagaggtgtgtgaagagtggctagagtttgaaaacgagatttagttaaactactagtatagggtgtccatgtgatggttaatatgaagagacctactagttaccccctttcctttacgagcagcactaaccactcccaaggcatctaccagcctcgtgatccgcaaaatatcagcttcgtggtcctcctccagagcattggaagaagccttgacaaggacgtcgatgaccccctcagtcatttcaggtttagggctggtgtgatgtatgagcgccgttaaaacattcgaaagtagctttttaggaagcaaggactcggcaggcaaatccaggagagcagacaaaagtgtttggaagaggtgaggggttgttgagggaagaatagggacagggccctgtgtgtgtatggcaatgttggaagggcttcatcagtctcttacgcaatttgtatgcgaatcccaaaaccgaacaacaacaatgatgagaaacaaacctttagcgcttctactaagatcaagccaactccctccctaagtacgtctacgtgttcgcccgtctcctcctccgtcctgagcgagctgaccatgagcccgactactctctcagccttctctcctcgagctcctcttctaagcaagcttccccaaccctctacggctaaccgtctctgctctcctccatttgcacggcctccgtttcggacaaacaacagatgagggacccagattgaccatactttctgcagagtcgaatggttctctggctgaagcagcaggggagacatgggtttcaggagtgccgagagtgagggaaacaacagcgggagatgaaatggagaattcgaaagatccagaagcggaggcaggatcttctccaaaaagggaaggaactcgtccaagagagagagcgctagttgaggaagaaggtccaaaattgacggaagcgacccgcttccgtcttctgggttggtctcttccggatggcgcaagacatccacaaggatgtctaccacttgggacttgttgaataatagtagaggaaatgtttgaacgagtggagttagctccttaaggagcgcttggaaagaggtagataggttgagaagtgacaagtgcgccagatgcagagtgaagggagtggaggtgtaggcacccgtcggatcggtcgaggaggactcctacatatgaaaattgagaacaaaattcggaaaaaagacaaaaccaagatcacacaggttagcctggcatagcctgcttgttccaatcgtttataaacacaatagcacacctctagttcctgggtaaagtccaacttgggagcgactcggagattgacatgatgggccttcgactggtcctgtaaagacttgtagacgtgccgcttggcatgctgcctaccctgtcccgggtttttcttctgatgtgtctttttctttggtggcatatccctgatgcaacctagaagaaagaagaagaaaaagactaaagaaggttgtgaagagtggacggtcgatggaaacttgaaacgagtggtgaaaccgaacagataaaattgtgggtttaaagattttggcattcgaatggttacgcagtctgtccaatcggcgttaccatgaatcgatgattagatattatggttcacgttgatattcggccaatacaaccaatttgtaatcagaatgagaggtcacgctgtgcttattatttgagtcacgtgactgtttcagctacgacacacgacgcgtcctagtcgatgtccttcctcgtttctacttaatgaggtagactcgtcgcttcctaaatagttactcctaccgttttccttttggtctttcctcttctcaaccctggccaagatggccgagtgtgggatttgtatcgaggctctttttatacacacaaacacatttgcctcggcccaagcgccctcgtcatctttgccttcttcgtctgccggcgggccctcttccggcaagggtgagccgctggagatctgttctcttccttgtggacacgtgttccatcaagtttgtttctctaaatggttctcctccaacggaaaggcaagtaagcgatgcccccactgtagagaggatgtcactcgtcacaatcccgtcaggttgcggttcggaggagacccctgggcggctccgatatcagacggaaagacgaagctgaagcgaatggtcaaatcactcaagactcaggcgaccgatagaattgggatcgatagctcaggtaatgaggtcgagacttttgtcgaagggctggaggaagtcctgaagacattgacagatacgaaaggcaagggtcgagaggatgactggcttgatctgatggaggacctcgaacttaaggtacgtatttgtgcgaattatcttgactacgcgttcgcgtgtatgcatccgtagtccatatgctgaacgctcctcgacctatacttccttcttaacaattctcaggcctctctgaagtctctctcgggaaacgtggctcatctccgtgaaagactacactattctcatcgggtcacctccttgtgtgagactatcgccaagctccaagcggacaacgccgaattacttaaaacaaatcaatcgaatagggaaaataagatgaaggctcttcaagacttcaaacaaaaggcggtcgagaagatggatcgggaaaagattcgacaggcagagaagttaaacgagaaagaaaggggctggcgggatgaagaaaagaagttaaagttggagcttagaatgaaggaagatcggctggtacaagcgatagatgagaagagaagggtatcgaggtgagtcggcatactatcttgaggatatattgttctccctatcctaatgactctttctaacatgcgctgttgtgtatgcatcactagggaccttgtggacatgaaagagtctcttaatgctcgtttagcggccttggaaagccaaaacaccaaggtaagtgatgtatgatcgacttaatccataccatgtgaactgatttttgattatgtacatgtctctttcgctgtctgcatccctccagattgccgacttgaaaaagaagctcttgatccagaaacagatgatctcctcagccagtgtcgagaattcatcacttggtaaacagctctcgacagtcaaaacggccaccgaaatagccgatccagcctcgcattttcctagaaaacgaccgcgctcatacctcggacacaaccaagaccgaactcgatctgatggttacgacgatccaggtttaagattcgatgatgagggtagggatccaatgagcgaggtgtcagatgctagtcggacgctcggtacgtccgacgcgatagaagaaaatcaggaaaccgaacgaggacatgacttagcccttagaggccaaccagactaccggtcggatgaccaagggatcatatatgtgaacgatagtgatgaggaaaccgaggacaaggaggataagaagcgcaagatgattctaaggatgaaggatggtcagacaacaaacggaaaaacaatggaggcgacagccgggatgacttgggcggatgatagtctggaggtcgcagatgttagttggagaagtcaaatcgacgtacccgtcagaaaaccagctgttcgtgattctttctccagttttcaatcttggatgcagtttgcgattgaagtctcaagaatacaacgtgatgttttactatatttgtcttgtatggaggtttctatagaaagtggtgtatcaatcaaactcgcgaccactcgctcccaactcgatcaaccgcctgttccgtgctactcgctcatttgaccgttcatccatagttgacccagcccaaccactttccagccgagctcctctctctagatcatcctctttgcagaagatatccagtctcaaccctaccggacgttctaatatgaccttctcatccggcccgatcccgatgttgccggtacccaataaacagccagtgaacgcatggtcttttgcttccgggccgagatatggctcgactgggatagacgaaagaggtaagcgatcaaaaaagacagacccttctacgatgatgactggattgatcgccgtcggaccgaaagtgacgaagaagccttctgcaaagctactctgagcgaagtttccattctggaaaggattcacccgatgagactattctttcgctctcatggacagtcgtgtactctaaaactgtattactttctataaatgatgttaccctatatagagtttacatgaagatatagagaagtatgattgagtgttgacagaaagcggtcattcagaacgggatggcgaagaaacccgagatgggatatgcttccctttgacatgatgctgaggcctgttgagagaagtagtagagaaaacgaatgttcgtctttgagttggtatgcaggtaaagattcgctgaatgataagaaaaagaaaagccaagatgacgaacgggttgaagggagagtagtctagatggacgtaggccctagcgaccccatcaagtgcctcgatcatcccttgcatcacctccctagaaacatcaaccacgttgaaacagtttgtgtcaatagagaagaaaatcagatcaaatgggaaagagaaacaacctcgtgaatactaacccggtgtcgtgggctttgtgtagagaggtttgcggcggcaaacagatgtcaacttcaacaacgatgtcatctcctaaatgatatacctccatatccgatatagattcgatttgcttgaactaaagattgacaaatccatcaagaatatcagacgtgaatcgaacatccattcatcagttctacgaacagagcagtggaatgcttacacggttgaccaggtacaaaaccttcaggaattcctcccgatcggccgaccttccagacaagttagagaagttctcttcaagagtctaagaagataccaatagatacgaacgtcgggaagtaagaaatcgaaatcaaacgattcgcttttcgacaagaaaaaaacattcaataggcttactttcagccactggaagatgatatacaaggaaagaagtgctcctcctaacggatcaagaagtctgatgttgaatttttcgcccaaccactaagaggatatccagttggtcgtcagaatttttcattaaaagttgtattttcagaaaagagcgcagcgtacagggaatgtcaaggatagagcattgaagaaactaaaagatgaagattcatccaatgattagtcaagacgatgaaagcttgtcaagagataatactacctacacgtcgttctgagcgtcctgagctagtctttatacctcggaagatatcaatcatcagtttgggcttgttatggaaagactgcctctttatggttaagaaagacacaagatcactcacgccctaacgcctgaggatgagagcttgcggcagaccacccagataagacctttgactccgattgtgaccagcatcactctatgagtgaagtcgaagaaacaaagacagtcagaataaagccttcgttcatttaagttacaagagcgtgtacacaatcacgaagagaggtaggtccgctgatttttccggatcactcttggaagacaggatgttgaatagttgagttacagactcgatgaagatctgtattagtttcaagaagaaggattgagcacatcagtaatggtgtttgcaccgctgaaggcagtatgaattaagatagggtacgttcttgactgaaagatgcaatcatcagaacagagaacagaaggatgccgagcggctcgaaccgtcttttgccggtaggatatcgcttggaaattgactagcggttttgaagtgtaaaaacatcagaagactacacaaattaggcttgctggataggggtgacgacttacttttgtcggatgggcagcccgtgcggtcaagtagatgatcagggttgatagaacatccaaagcactatgcaaattaagaaatggactgagcatgatggtctaaaagagaaagatagatttggagctcacctatccataaaggaagccagaagagagattgatccggagagggccactgcacccgccttgatcgagagtaggaacagattgaccgcgatgttgactagagtcaattattcaagatcgagctttatctttagtatagatggccatgttcaacgtagcattcagaaaagagaactcacgattcaaaccccatttgtcgtttctctcttctctttgtctgttctttgcagccaggtctaacccttctgaatcttcctcaccggatgttcgaagcgcatccaacaacggctcccgctctccatcccttgtgacacacacgccgagcgcgtcctgagacatctttctgctaacaaacttggaggtagtctgtcggcggactggccgagggggacgctgagagacaggttgatggaaggatgcaaggattttggacggcagagacgatgtaaggatatcatcgatcttttcatattcgtctagtaaggcgtctaaagaagaaaatcgagggtctgagcgacaggtaggcttgagctttaatcatgaggacgagcactcactctgactctcatagaactctctaagacatttgctcttaatcttcttgagttcttcttgagactttcgagaacgaccaaagtcaggcgagacgtctagaagtaggctaaggtaaacccgaaagaaaagagattacgacaagtatttagcacgcgttgcttgtctacgggaacagcaaaagaaaagggagagagtgtataacgatgctcactctttggccttgcatgcatgaccagatggttcactcatcgtgcaaacaaagtcacacttggttcagagatagaaagatcgatgtaacggatgtatgaatggatggagagatgattggttgaggtcaagcagcatatacggagatgaccaaggcagtgttcaagatgatgaatcctagctgccgctctctatattcctcctgttgtccttatcctctctttgtctcgagactcagtctactaatgttctcaagcagacatacaacgctaacgagcatatatacatctgtggtcatgatgaagaggcagagaatgatggaccagatctgatggtagtactcacgggaaatgagtcaatcagacgtctcctgtttgatcagctggcctgaggacaagaacatcatcagatgactatataaacctgatcatatctctctgcccgttcttctttctttctcttctttgcttgttctcttcttcttctcctctttctcgccatcgttagacaagtatgcaacactcagtctctgatggatacaggcttctcaagcaagagttgtaagggttctccttgttttctgatcacgccggggggacatgatgttgacgacggcattctctacaaggtctactctgtctccatcttcgctcaaggttcgtttcggttgctcaggatggctcttacgcatgcagacatgctcatcaggctaaagatatcaagcgttaatcgttttgtctttccagctcctctcttccggaactctgggctcatctgacacccgattgagcttggtcctagggttcattcctcaaagtgcgcaaatgccggccaagaaggtgagcattcaggatcactttcaagcttcctgaattgacattcataagtacgctgaacatgatgaccgatatcttcctcccgcaggttgccgaagataactgggagatggtcgaacctgcgactccaccccgtgctacacccacgtcacccaacccatccaactggtcgcctcctcgatgggccattcctcacagcccatcttcctcttccaaaccgacgtcctcgatccaacccgggtctaacaatggtgataccgctgacaacacttggagcccaccgaaatgggcgatcccgcttcgacctacggtcaagcaagctccccttgctcctttcggttggaaaccacccttctgggctcggtctgtgcatacacagcctgatgtgcttctcaatccagtctcgttcgtcaaactcagaaactcaaagttagaggtgagagagaagcatacagaaagagtaggggccgatggtgagatggtgtggatacctccgagatgggcaaccaaggcggggctcccgctgctaaactaaggaaagctcatgcttgcactgagagcttgatgcgactctattcgggttgcgcgtgatcagtatcatatatctcgttctctaccgttctgtgtattcaatttgttgtaacatgctaggcgatcttttgttgttttgttatcaatgtagaatagttgtgtatcctccgagtgttgtatgtgatggacttgtaccaacatcttgttcttaatatattaaaaaagagacaccacatacacatctattgatttctttgtacaggtgactattaggataacaacacacaaaagcactacagcaagggaaaagaaaaaacatgtacaaaaaccaatcgcagaatgcacaggctactcagcctgtttggctagatcaagtagcgtttcctctatctcttccacgtccctaaacttgagtactttcacacccttggactccaatctatctctagcagcatcaaatctagctctgaagccatctgcctgtttgatctgtttcagcatggcagacgacatgacttcctcgatatccaaagactgaggctcatcggtaaaaaccccatcaagggttgtcgaagctcctacaggagcgctagccgtcatgcttgatgctccaaactggggtgacgccggtcgagaggcatacagtgggtcaagaacgtcttcagagtaaaccccagcgttctcggtctggcttgtcggctgagcagatgaggatgatagagatgcggacgacgatgacgatgacgatagggtttgttctccgagcgctagtttcgagtctactaggttcatatcaggtccctctggttgctcaacagaagtactggccgttgatgaggtcatcgtcggtgttttttggcctttaccgataagtgaacttgatcggcttctggttgatctcgccttatcctttacagcttgcgagaacgcgcctgtaccgatagaggttgatggtccaagggacgaggaaacggacccaacgtgggatgtcagccgagacatccttcctcggacggaagaggcggatgacgaagtcccagacgagaagaaatccgcggtatcgcttcttggtcgtgtacccttggtaggtgaagatgaaccggaagatcctaggctgagcccatcgggagtatgtgtcgatgaggaagaagaagtattcgaagattgagagggaagggtcgagttcgatcgggcccttgctgaggacattgtagaagaagcaggaacaagaacagatacatctcggatgatgatcgctaagatctgatggggtcgctcaaaggcgatcgatgcgtacagatcaaggtcttgttcagctgaatccccaaagagaagaaacttggatttaggaaacccatccaggatctttgaagtgcaagataagcatacgataagactgatgctctttattctgtcgatcagtctgaaacacacgaagccagacttacctcataaacacctcgagctttccgttccccagctggctcccataaacccttaaagactgagcgaccaccatagaatttgagtttgagggagaagcccgctggaaattgggataggttgaggaacgagttgatcggttcaaacagttcgaacggcgagttggactggttatatcgagaataccggcgggaagtatgagtacaagattcaaacccgtgtaggatgagaaaaggacatacgacgaaatgacaacctcggatgccgccctccgcctgaagctttctgtacaagtttcccattcctttgacctctaaatcttttaggtccttacaaaacacattctgtaccagtccatgcgagcaagaagtcacacatcagtatacatgtactctggatcacatatcgatgcggaaaaaaagattgagacgtactctgaagacgtttctcaagccacccatgatatccgagtgtttcaccgtatcatccagatcggagattattctgattccttttggcatggacagcggagtaactatcgtactcttcagggcatctcccatggcgggcggcttgactttaaccagtccaagctcatttttctctggaaccgcttctcgagatgtgaacgctggcgaggaggaagaagcactgtttgtagtgatatcgggaggtgtaggtgatacaggcctagagcctgtgacgatatcctctccttcggcagagagcattcgagcggtgatctcaagaccccactcatgaggtttctcagagtcgctaatcgaggatgattgagagttctttcgtcttcgatcggagacacgttcaggaaatatcaaactgggttcgaacgaaaacaatcaaattgagcatcaagcataaacgaagaagctcatgaagaacgcgcgagagctccctgtagaaagatatgcgtactctagacattccgggtcttccaccaggctaccccaagggattcgtatagtttccatgaaagttccgttcagcgacgtaactacgcgcatctcaaacaatggccgtccacgctcatgcttctcttccttgttcgatcgatttccagccattccatcctcctcaaccgtgctgagacgtggacggacttggagaacaacttctctatttgggataaccgaggcaaagaacggttggagtctggttgctagattagtgtgcatatccatcaaagactggcttattgtatgagcggtgagagaatctaatgcggaagatggggtcctggctgaagaagtctcggaagaggtagaggaagagagagtaccagacgtgccagatggctggaatcgagagtgagcatgagagaaagaagagtgagtcgtatcgattcgaggcctaagtgaggccgaaggggatggtactatgtgatttggcaaggaggatcctgaattttttcttgctgaagaggattcgatcgtggacaggcctacggagcggacagatgctgtatccggttgactagtcttttttgaggatgaggatgaggatgaaggagaagattgaaagaagggagacagagatatatccttcgtctcgtcagtcggagcgggcgagtcagtgatggaagattcagtatcacggtagtatgtgagttcgccattggactctgtcaagtaagactcgccccggacgggctgaacccgcggagtcactggtaaactcggaaggtcggcaaagtttttggccattctgttggatgcgcagattatgatgtcaagtggttgaggaaaatcttggttctgatgcgcctttgtgaaatacatccgcacccttgaggccgacgaacaagaaaggctgctcaccgagtaaacatccgttgggtccggctggcttgttctgggggccgaagggttgtacaaaatccagaaatatgaatgaggatgtcgaaaggctgtacatggtctgtgagagagtagggcaaactgtcagtaccttttaccgttatgatgcacaggcgcaagagagtgattaaacagagctctcactaggctcagaaggacttggctcagaatcgtctagaggaactttgacggcccaccctgggaacacaacgattctttgatgcgatacttcgaatggagctacgtatcgaacgaatttaaggaaaagaaaggaaaggaacagtgagcatgttctgttcaattatatggaaaagagagggggcaatgtcaacgaacctttccttctcctaagccatccaccgacggatgctctcactcccggtcgatcgccaccactattgccggtagtgacacctccgtcgaccatatcggcagccctgtccagcagttcctgctctttgttttgaccaccaccgatagccttgtgggcgagatggccgacgttgccgacgactgtgccggcggtcccggcgatgccggccaaacctttaccaaatccggtcgtgagagaggaggctaatctggaagacgccctggaagacaacaaaggtcttgaagttacaagggtgtttggatcgagatttgatcccgaatgaggaagagcagtcggttggttggatcgagaatgagaatgcatgataaaggaccgacggttatgataggatagtggtgaagaaatatgaagccgcggtgttgaaagcttgggcagatgaatgtgtcgattgtatttggattgcttggatagaacaagcagagcactggcgatcatccaaagaagagcagaggaagatgaagagtgtgtatgtatgtactggtcggatagaagagagattgaaggtgagcaaagaagaaagtaatcaaagaaacagtgagagaggagaggcgtcatagaacctgctaaccctaacactgagcgtagtagaccgtgtacttgaagtaggcgagtccgctttttgcgcgctctcttccacacactcatcctacggtctcaccattgcacctgcatcttcttcttccgttcatctcctattctcccagagtacatatctcgcagaacacacgcgatgcttggccggtcttgaagaggagtcttgacggaatagagcgaggcgctgcttacctaatcatgatgaacttacctaatcagccctcgcttacctaatcagatgtcccgatgacgatttcgaacggagtaactttggatctttcttctggctctcttctatctatccgtcgtctctccctatctatccgttcttttcctcttcctttctttcgaacatacactcaccgatacatatatatttcagttcttattcggcttcctgaaatgtctgctgtatggggtgaagagttagagtggcaatttgagaacgcggctcagctctggtctggtcagtctgctctcttttcttctttcaccaatgtctcacagtatctcctctcattgctgaacacacaacctgatcggttgattatctgatgacatcagaactcgaagatacactccgtataccaaaacggccgtcgcttgagcagctcgacaactcttttcttatgtactctcggatttgtgcaaactacctaggtaggtcactctgttcccttcttctgtcctcgcttttccaaccctaatcgcttgttccgagagactcatctctttacccggttgcatcccattctcctatcttccttgtcattatcgttcctgctcacttactaactttcggctcttcttattcctttcaacttctttccttgtatacgtttctaacccatgtcacccgcctgacatagatatctatctgacgaatccgttagatcttgaaaacgcgcttatcctgctcctcagaagcgtactcttcaagttccactctaccagaatgatcgatctgataataaaatgggtcaagaaagtacgtgtctcttcgtaccgagctgaacgctctcatgaactctacagctaatcactcatacttgtgaataacctctttgcgttcaaacggaataggggaaagacccttcgttcttgtatatcctgctctctatccttcttctctgcggccaacagagcccctccatcttcaaaagctatgttcgttggcgcccagtcattccttttcttgtgaacgtgttggatcaagagattgtcgatgttcgtactccgtcttccgtatcgatctgatcaagcgtctcggaaagcctgaccaagcttgttctgtcacttgttctggaaataatgttggagaaacagaccagcagagtgccctgcaacgaagtgtcgatcgagcttcggctgagagccccttgtgctcatctgttatatgagctagcgcgcgtccaaaagctagactcgtccgatctgggtgagtgccctatcagtacttatgctccgacctagccgtcttgacacactaactcttgatgcaatatccatgcacacatgctactcagagattttcaacgaacaattcatcgatcagctgtttgagctcgtcgagcggactcgagctatggatgatgagactttgaactatgcgatcatcaaacttctggtcagcattacctgcctctgtttcaatctgttcctttccgttagcatcacgcgctaaaatatctattcctgacgaatccgtagatcgcactcaacgaacaattcatggtggctaccttgcctccaagtcatcactccaaacggcatcaccatgaccggtcttctcatccacacacgcactcaaatcgttcatcacaggacacgaatcaggaacagagtgcgcatgtcccagccgatcctacagaggcgaaaaaaatgaacagagtgctggtcgtgctgatgagacggttgggcgccagtaagacgttcggagagaatttgatattcatgttgaatcgagctggtatgttttgttccccttgtttctatgtgcaacttacttcccttctacaaaagcaaaagtgtcgaagaattgacctgatcgaaacaatgtctcaaaccaacagaggacaccgcggaggatctatgcatgcaattactcatcctcaagattctctacctgcttttcacaacgcctggcacgaaagagtacttttacacaaacgatctcaaagtcctggtagacgtgtttgttcgagaactaagcgatctaccagaagagagcgagtctcttcgacatacctatctccgagtgcttcatccactcttgacgagtactcaactgcgtaccctgccctacaaacgcgctcacctccaacgagttctccgatcgttgacggccaatccacatgggatccgggagatctctccatccactaaacgacttgttgatagatgtctctccggcgaatggtgtatccaagaagattccgccaaacgggccgacggaaagccggccgtcagccttctaccatccagtcagccccatagagttggagttaatggagcacaacaacaagggagcttggatacactcaacagtctagcaggaacgctaggtgtggacgcaatggcagaagggaccgatgtcgaaccaggggcggatctctcaaagagtctggatcatctgtcgttgttggatcctccaaacagaaacgggaacggctacgcccatcgcgcagatgggagacgactctccagctctacatctgcctcttcctctggacgtcctcaccctgatccgtccgggtcgttccgatcgcacaacacacatctggatgaagttgacaatcttccgttatcaagagctgttccccaggtcgctcgatccgccccaattcagtcgagtccgctggcgatgacggctgctgggaagccggcgagaaggaaaccacctgcaccaccggtaaatcgagccaccaaaggccttctcagaacaaacacgtcgggagcaggggcgggatcagaagataatcaaaggattgggtctggaaccgacgacggaggacggtgctcgcctagacaagagtgggagacgttcgcctgaaggatgtgtatttttcttaggctctttctttttgcgtccttttcttcttctttcctcttccttctcctcctccatccgccttactcttctttccatcgttccactcttattttacagaatacacaccatacaatctgtacccgttccgatacacatttgaatatctacttcttcttttccattgcttcaagcatgtttgttccttttctctctctctattgttgtgttttccgctgctggtctttctcgctcgcactgtaaaccaaaacgacatcaatcgttccgtcgtcccatcgcatgtacatctcatcaattcatatcttcgtccttctcacgtatgttctcttggctttttcttttcttttctttttcctcgtcttcctatcgtattgtggtcgtttatttgatccgggattctgtcacttttcgcgtcttgttcatcatgtctattgttgtttccgaccttcttttcctcttctttctattggaagggagaaaaaaggtcgactgcaccaccaatcggtcccaattgaattctgttggaccccgcctcctcgtccttctcctcgtccctcctttcttttgtcttttcgacgtatcgtacttgttttgcccatcctcttgtttcgatcatgtatcttcgatctttcttcttcttcttccgatcgagaagggcgaataagaggaccccatatgcaaaagacaagtttgttcatggtcatgtatatacatagacccgaaggggattccgttcgaaaagacaaacgaaggatgaggacgactgggatgtgcttgctctgagggtgagacgaacaaagagagaagaagttgtgtgatgcgatgcgatgaagtctgatgtggagcgatttgatgcaagggatgcgatgggatctgggagaggatgatcaggattgatggcgtgcgagagagagagagagaaagagatgtcgagaagaagatctatgaaactaggaaaacaagatgagaagaaaaaaactacaaaggattacaacaagcgagcccggaagagaaagagagaataacgaatacaaagaacaggaagagcacagatgtttttaagtgggagggaggaagagtg

SEQ ID NO: 1881 - DNA, 2409 bp, Xanthophyllomyces dendrorhous
ctatatgtctacatctacccagaaatcaccatctcctaaataatcccctttccactcctcaagcttgcgaagtgcagaatctcctgcgcttgcgcccgcgttcatggctgtgcctggagggacacttctcgatcttctgatggatagatcggtttccgcagggacgggaaccgctcggacctgatctgggaagaaagtgtatcgtttgccggtcgaaggggatgttccgacttggttaccgctgtttgagatcaaccgagccgacaacaggtgggtttcaacaaatcattcccagtctttgagaatgcgtatatggaccgttgataaagaaagcgaaacataccaggtcagacaacacactttcatattgccccaaactgtgtcctgcagcaagccgacgcccgaggcttctcttgcttcccataccgggttgacttccttccccatgaaggcttttggattcgcactcggtcggaaagcacgataggagaggaccccgtcgcacgtttccgtcgagggatgatgtgtggctctgtccatcggcgtcgacgtggtggaccccgacggagggagaaaggatggcggggacaacaggcgccggtgatgttcgagtttgatgtttctcgacttgcgccctggtgaggactgtggtgtggatgacggaggtgcctgacgggatggatctcctcgtgaggaggcagaggaggggtggcagtagaggatgtagtggttcggatcgagatggacggactctttcgatcggttgatggctgcctggctgtcgatggagaacgaccaggtgggatcacgatctgtgatctgctcgtccgtttcaccgtcctcttcttcctctgggaacgtccgttccgatacccggggtccttgtctgtagagcgcagagaaggaggggggatgtcgagggaacggaacggacatccgattcacgctggagaacgtcgatgaggatgagatcgatgggagcgattggtttagcaccgagcttcgatggatagcgcctcgacggcggagtagagaaacttggcctgtgagcagggagtgagaaagcatctgctgtagggatggaagatgatcaagatgtattagacgtcgagtgaacagacgttttgcgtaggagaaagaaaagactaacagtgggttcgtcttcatcttcttcgttatcgttgtcattgccgttattattcccattgtcgttgtcgttgttgtctccgccgtcgtcattggtatcgtcgtgtccatcctcccgctcattattctcaccctctgcttgccggccctgctgatttgtagctgccgatgcgggacgatctggtccaaaggcgatggcaccatacctttcttgttcctctcctagcgtcctgacctcctcgagagcctggtcgatccgatcgagccatcctctcatctcggtcgttctctcccccctgccgtcgtctccagggatgacgccgagaccatctgggagtctgccgacgccggctcgactgctggaccgattgctggccgggacgctccagtcgatctcgttccagctgaggagggcggcgatgatcctccggacggtgttcagccgatgaacgatctggcctctgctgtttgccatgaagcgaaggtagatctctctatctatccctgcttcttcctccgtccgtccggatccgacggacagtctgagggtcgacgtatcaggggacgaggcagcgagccgggagaggatcaggttgagtgtgtttgagatggtggcgtagagtgtctggtccgggagtgtttccagactgagggccggaagggccgggggggttcggaggtcatcgaggagggacaccggctgggtctctcccggggagagggccgaatgggtgggcgacggccgttcgatcggggaaacggctgatgccgatgtcggagcggaggtagaatcgggagtgcgaagatttggaggagtggatatgtccatagcgtctggcagacggatggatataggaggaggactcgaaggatgatgggcgggttgtgctgatggtgattcgagtgaagaaggctcaacgtcatgggtggtcgtcggcgtcgagctcctcggtggtggttgtgccggtgtgatggacatgtctgatattgatgctaccacgggcggcagggagcgacgagagagggctgtctgtctgtcgatcggcatgcttgctgctgttggtggtgatgatgataaggacgatgatgtcgacggtgatggtgacgacgatgatgatggttagatggaggaagagaacggaaaggatgaaaaggcgcggctctcaaattcttctgcccccccccccttgacgaccatcctcacctgggaccccttgctttggagacgcaacgccgagttcatatatatacacacacacacac

SEQ ID NO: 1882 - DNA, 609 bp, Xanthophyllomyces dendrorhous
acacacacacacacacacaaggccaggctggaccgcaagaacgcagggaaagaaagatccaaccgaaatgtttgcctcgatctttgttcgatctagaccgctcatcaggagtgagctctccttccggatgatgcctagtgtgagccggatgggatccaccagccggtacactactcctccaccaccgccggtttccaagggagtcccacccggctcgggctctttggccgatgggaacggacaggcaaggaaggtcaaggtgccgatcaggagtctcgcagagatcaggagggagaaggagctggcagagcaggctaggttggaagcaatgggagccgcttggagggctagtaccgccgagggcgagtccgaggagtgggtgttttctttcctcttcttcttcttcttcttttttctcgctttctgtctgagatgctcctttgtttctgctgactggatgtgtgtatgcggtttgccttgaaagacggacagtatatgaacggccgatggtcccttctaacggacttatctgggctttcatcatttctcaggcgatctttctgtgagtttctctgctttgtttctctttttgcttgcttgcttgcttgc

SEQ ID NO: 1883 - DNA, 3065 bp, Xanthophyllomyces dendrorhous
ttgcttgcttgcttgcttgcttgcttgcttgcttgcttgcttgcttgcttgcttgcttgcttgcttgcttgcttgcttgcttgcttgcttgcttgttttgttttgttttgttttgtttctgaccgaatgggatatcggtacaatacggctcatctggggtacacaggctagttgcgatagatatgcagcgcgaatactcgatactcttacctcatgccaagcctcgaacgaatgtgatcccatcgaattccacgccttcgccgagtgcagatccggccgggagcagaccggacagcggtgtggattctgtgggtgctctggtggatgctacagccgcggggagcaccacggagagtgctcctgggacgacggtggtggagggcaaatacgagacaccggtcaagacgttggcgtttatctcgcttctggcgatctcgattccgtacgtcgctctgcaggtgtgggcaaagaagtcagtggtcaagctggtctcgtaccggccgagcggacggacgagggtgatctcgaggagagaccggatgttcagttggtttgccggcgggaaggagatcggaagggtggttgactatggactttgtcagcaaggtcgtcgaaacggaggtatgtctcttttgcctgtgtgtgtgtgtgggtgtgggtgtgtgcgctttagtacggggtgattaattctaatttgtttatttttgttttcttctttctctctacacgactggctcgacgttttgaacaaacagagttgatcccttcggtcgaactcgttctcccgacgggcaaggcgaacgggccagagagctaccgaatcgatctgaccaagcctgctcgttcagagctcgaacgggccaggttgagaggagagggtgtggtggtcgagagagagctggtcgagcaggctttgttggggatcgatgtcttggttgagaccgtgcccgtttcgaagtgagggtgggcagggaggagtgacgaatgggaagggaagatgaggggtgaggagagggaacggaggaacaaggtagcagaacacacgaggcataggatgctccaaaagaaggattagaagaaagaaagaaaagaaaaagaaaagaaaaggcccatgtatggatcatatagccatctctctgtgtcgcgtgcgcgcgacgactacattcttattttattgattctcgataaggagggacaaacaaagcaaaagaaacacgaaccctagggaaagaaaagaaaagaagaaaagatagaaaagaaaggaccaagaacggacgacccatctaagagatactgcagagcgggcgaccagctttactttttcttgccaccggcggcaggcgcaggagtcggacccctggcggcagcctccaacgcgtcaaagtccggggtaggaagagctgttttgagaggtagcatcgggagtagggacatggtggtcaggaagaacgtacagacgcggagaaagctgagagagagagagagagaatcggatactcaccactctgtagaagggcagaaagaagacgacgaggaagaccaaacagaaagaaagcgaaatcaggcagagcacaacaaagaggcagagagataggagagggtacgtacgtgctttgcttgccagtgttcgatgatgttgttcttgtttgccgtaggcagcttgcaggacggacagacgagcttgacggcggctgcctgggccttcaggtttgagcttccaccggccgccttcttcagcttttccgcgttcttctgtctttgtgagggagatcatgggttttgacatcaggaagggttgatagttgtttaggtacatcacaaagagagaaagagagagtagagacgtactgtgattgagcctgtgagggagggatgaggacaagaacgaagacgagacgagaaaaaacgatcaaaagccgtcagcgcccaaacctaccgaaccagatcgacgacaagcaagagagactgaccttctggagtcctcgagccatgatgaaagagtgtactactaaggaatcgggggggggtgggggaatgagaggatgcgctgcagaacggaccaagagagcgagagaagaagaaagaaagaaaaaaaacaaggcaggaaaccctaacaggtggaggttgattcatctattctcagaaggttattcaaatataagcggtgctgaatatggttgtgcacgtgatgcatgcaccgccctgtcgatcccacgtgaaacacctgctccgcgatcacgaaacatccgaccacgtgggatcagagcggaaattctcgtcggagccgagcctggggtcccttgttgttcacttggtttcgttctaatttgttagctcggccgaaggaccggtctgcatgatcatcccctgggctgggcgaacggagaaacccgtggagactagagacagggcacgccaagcgagcacgtccggcggacaaagacagaaagcacactaaacagaaacagtcagcatccagaggcgacgaatagggtgattaccggtcggaacaaaggcacgaagccgagagggaagatcaaatgaaaccgggtgtgtcgaggggagaggaaggggttggcttggggccaaagacatcgagggatttatgctcgagccgagccgaaacgtggcgaaggcaatcgaccaggaacgaaataactcaaacctcgtggacgcccatgtttgtcgtaccttctttaaggtttccgacgcgttcaaacacgtgtacagcggcagacggcggagattctccttccgcaggcacagccacactgcgcgcaggctgccacgaggcgcgctcgcgtggatgtgaccgacccaacattccggcatcttcttgtgtcttctctttttttcttctgcctgctctctcctccgcgcgggggatggcaggtgggcagaaggccgggggaggaggccgaagaaggaaagcgtttgatgagtaagagaactttcggatcccacagggtgataggccaactgggggagaggagaaggaggagaaggaggagaaggaggaggggagggaaggtggaggaaggggggacatgccgtactaacacctc

SEQ ID NO: 1884 - DNA, 448 bp, Xanthophyllomyces dendrorhous
gatggagggggagcgaggcaggcaggcaggcaggggcgaggggcgagggcaaccaggagctggggtcatcttcatcggcaggatgggcaaaggcaaaggcaaggccgaggaaatgcaaagagggatggaaagattgatcatgttgttcatcgccatccaccatcagcattgttgaaagagcatcgtcaaaagcattgtcaagaacatcaagaacagctgtcaacaagatcagtaagcctgctcgctatccctccaccacctgcgggaagaacagacaagcatgggagcagcggcaagattgaaaacacaaaatgctaaaggcagaggagagaagagcgctccatcatcgaccacacgggagatgatgaggggagggggggaacacaaaggattcttcttcttgttctgttctctctcgctctctctatgttgtgtcgagtcgtattga

SEQ ID NO: 1885 - DNA, 1318 bp, Xanthophyllomyces dendrorhous
cttcttcttcttcttctttcgccttcgtccacattccattttcgtccttcttcgagaaacactgatcccccatcactcatctgtcgtcgtgcttgtgtgttgtcagtagcagtagcagcagtagtagcagcagcagtagcaccagtagcaccagtagtagcagcagcagcagcaccaacttcacccacacacgccacaacaagaaacaatacaaatcatggcctcagactcacagggcatcttggtgagtcggcttccctcgcttccgttccacccctcgactctttctctcccattcgtccggccggatcttctgcagtcgtccgggtaattcctccgtccgcttcccctcgccccaccgccgtgcagacatcgcagacagatgggcagagggaaaggacgctgggacgaaacaggcgagagaatagaagaatgaatgaatgaatgaatgaacgaacgaaagaaaaccctctccccataacctttttctctctcttctcttctcgctcttcatcatccgctctacacacatcgattcctcgttcttctctcttgttctttctccctttgcaccttggcccgtggcccgtcgttcgatctccttagtgatcaatcttgcagaagaatatacagagctcgatctcgaccaaactttcatcttaatccttccgaccgccaacatctgtgcttcgtttccttctccttctccttcctacctattgaaccctagccggacgatccatcttctcccctttccttctccttcctctcgctttccgatggctgacactgacaactttgacccggccgcgttcaacgctcagctctgtccttatacttccaccactgtgagtaccatcctgtttgttctcttgtcctcctctccgaggctttcctatcctatctttttactcttttttttcttcttttctttttaaaccttctttctgacctctcttgtgtttttttttctttggcctttctttcttgtattcttcctcctcccttcctcctctattctcattcccactcaccactcctccaaaaacagtgccccttgctcgcgccgtacgcatcgttcgacaacaacggttcagcacaaacaccagtcactccctccgcttgcgctaccgcccatttcacccaaccgagcgccaactcaaaccctgactcaaacagacagtctcaaaaccagtcccacctccaatctcaccctcagccccactctcagtcccagtcacactctcagtcccagtcacactcccagtcccagtcacactcccaatctcaatctcaatcccaatcccaatcccaatcc

SEQ ID NO: 1886 - DNA, 9724 bp, Xanthophyllomyces dendrorhous
cccaatcccacccgcactcccaatcagccgaccagtcttactacccaccaagctaccaccaccagcagagagacgcaaacccaacactctacgacggctcctaccaaccctactcaccaaacaactcatccctcaacacagcatcagcttctccttacggccttaaggaaagagaagatcgatcacccatggtgcccatacattccctcgtgtcctcccactcggccctctcccaacagagaccgccccagtgcaggccgagctatccgtccgtcggactgattcctccttactcaccctactccagggaccaaacgaaactgcagaccacagactcagagtacgactcgtactcgaaatccccagaggattctctcctccccaccatggcctccaccccgtacgcaccctcgcccactctccaaccgatgcccccggttccgttcctccaacgcccaaacttttcacacacctccagctcctcccaacatcgacacggcaacagccagcagcaaggcaccaacggccacaccccctcctccgcccaacagaccccgatctcgttgccctcgccttccgccctgttttccaaccagtccttcatccccgaagatagaccgagcaactcgagatcgtccagtcgcaccggtgccccacccagctcggtcgaaccgaccaccagcccgtacggctcggccgccgcttgcgacatggaagacctcttgttcagacggtcagaccagactggacagagcgaagaccgcaagccgttcgcagagatccatccggacccggcaccctatcagctctcttacgcacagatcccctctcaccagccagtctcgccaccacagacagcagatcactcgacagaccctatccctcctgcctctggcaccaacggcgagcagactgctttcatctccaaggtgagctttccctttccttttggttttcctttgcatagttcctccagctgactctttccttcttctcttcctagctatggcacctgctgagccatccggaatacgcgcgctatctcaaatggaaccagaccggagacgccttcatcctcacaaactccaacgagtttgccatcaacggtttgtcattgtttcttcgtctttgtctttctttctttcttctccttttctatctagtcattcttatcccgttcactgaacgtttccgcgcaatctctcccctcctcacagtccttccaaggttcttcagacactcaaatgtcgctagtttcatcaggcaactcaacctgtattccttccaacgtgtatccaccatccggctcctcgttagtcttttctcttctccttgaatcccccctctccttctatcttgttgttaatctcatcgaccaaccctttcacgcccggtgtttcaaacaggacatggccgactcttccacctcgacctcgatcgttccccacgcccattcccaccatcacgacccaaacagacctcaccatcctcacccccactcccaccaccgatcactatccacagaaatagactcggaggatcatacgagccattcagacgggtccccaccttccaccacttctggtctcagtggagatagtaccatcgccgcgtccggtaggtttacctcaccctatgtgcctctcgttcactgctctctagaacgcatcagctgacgttgcttcttacttctttcacctctctcacctctctcacctctctcacctctctctccctcccaggcttcacccatcctcatttcaaaagagatcatccggagcttctcaaatttctcaaaccgagaggctcaagcaaaaaagtccagtcaaagaagcaggcgcacaccgtcggcggaaacggacccagacgagccggcggaccgggcggaaacaaaaaggtcgacagagccggtccagtcggggctaccctggccggtggaccaggcaggaaacgttgatcgattttcgtgtcctctttcgtttttctttccttctttcttttcttttttcttgatcgattggcttcttcctcctctcatactttctctctctctctctctcgttgtctcattcgcgctctctctctctctctcacccatagactaaatactgtatcatttctcttgtcttttgtctttgaccttctctaatttttccttctcgttctgtctctgttagtgttcttatcaccccatcccaccctggccagcatcagatcatttcgttcgatctctgatctcttttttcttttcttttcttttcttttcttctcggctttcttttttttttccaaggctgtttcattctttcagatatcttgttttccttatctcttccgatccctcttctcttgcctctttcttggttcgtgtggtgtctgatctctgatctctgatctctaatctctaggcctcctccaacccatccagctctactcgacccctagctctatttccatcgttttatatgcttccgtttctttatctttatttctaatatcttgactctaccctttagcgtataggaagaaccataacgatatccaatctgaaacaaaggcgaaaaaaaagagaggaagaaaagaaaagaaaagaaaaaaaaagcccttccccctcgtttccactttgatgatttttttttaaatttaaatcctttcctattctctgcccatctcttatccatacttctttttctctcccttccttccttacggttatcagttgtctataggattattagagtgtaaatatatgtgtcttccttcattctccctctgccctcttcccaggtttgcttgtgcttgtgcgtgtgtgtatgtacgcccgtgtaacgtgggaaggcgtcagtcagagaacgagcggactgaacggatcagtccggggtaagcgggcacgttgtttcttttccttagcgaaagggggagaatgcaacccgaccgttgacaagagagccaaagcgaaaagagaagatgaaggcaaaggcaaatgcaaagagcgtatgacgttttcccgctcctgtgaccttggtttggcttaccggaaagatgacggacgagcgagaaatacatgagattatattagaagacaaacagacagacaaatagattggaaaaagagtgtatcgaccgaagcttgggctttgatcaggctgtcatagtctatatcatttcacgctcccgaccccgaccgcggtcctggctacacgatctatcgacatctaaagctctttcttgagctccgggaccgaaccagacggaggagccgaagcgaggtagccctcgagtttcttccaggcataatccgtggcgtgctcgacgggttcgtcaaacaagtacgggagcagcgggacgaccgccagacctagtttcgtattcagtttcccccccacgattcacccgccagcccgatcaatcccgtcgtaaacaaaactcattcagccttccggcctcacgagaaagaagaaagaaaagagaaaagcgagaacagatggacgaaccggtgagagtaggtccccaggtcttcaacctcgggttcttcacgttcacaaacagccggccgctctgcttgacgacggtatggatggtgaaagccggaagtgccatcgaagccactccttggaacaccgctcgtttcgaagcgactgagaggatcgagagaaaacggttgcatttccaaaggagaaaagataaagggaaagcaagtacaaagacaagaacgtcggggtatgttggtgtcagcccgtagtgggtactaggattagcgaactggctcaaacggacgtacgaagggatagccgggtagtctctgaaaagttggcggcctcgagcgcgttaggaccatgtttcttggctgcacacacaaaaaagcaaaagaaaagacgtgtcagatcgatagccatgagtcggcgcccagaagcaaaatcactaacctttgtaagtctcgtacgagacatctccaatcaaatctacatacaacccgaaccccgtttgattagtcttcttgctcattcaagtaacagccatcctgactatcacgtcgaaatcaaacgtacatgcccaagagacaccgtactaatcaagcatagaagtcacacatacaaaacttagtcacgtgtacgacgccaagaaaaagagacagaaaaaaaaaggcaagggagaagcgtcacatacaccagcggtgacgacccacggagggacgaccggtcggaaagactctcctacatcacttgtgtacgcgacataactagataaaatcgttttttccaagatgcaaaacatagacataaaaccccgggttaagatgtcgaaaacagcagtcatgtaagcatcaagacaaacttaccgggtaccggctctgagcgcggttcgtagtcggtttccgtacgctgagggacaaacagcccaaaaagacatacatgtaagtatgaacgaaatctgtcatcagatttaacacagtatcctaccagcatatcggagatcagagtccgtagtatcgaaactatgggcacacagaaggtggtcagaccagggtcctcagcacgtttgtttcacttagagactggccctgttctactgagtgtgatggacgaactcttccttgacgaggtcgtcgagctttccctctgctgccttctctccctgctggatctttgcctctccggccttcttgtagtcctcggcggccttgacgatcttatcggctatgagtttgccggcgaagaaacgcggttggccggatgcggagggagggaaaatattgagtaagcgttcgcgaaggctacaaataagtctcagtgccctaagatgtactgactgttggtagacatggtgagctaggatgtgcgcttgtatcaaatggttaagagacagaggaggaagaacgacggcggatacaacagcaagaaagagtgatggtcgaaaggaaagaacggaggagagagaaaaagaacgatatcaacgggctgtaaccatgttggatgacgtcagcgccggaaacggcgatcacgcccagatggttacaatattacataagcataaccctaacatccgccctgagttcctacttcttattcctactaagcatcgtcaccgctgctctcaccttcaacctcgaccccaacaacggcttgcctcatcatgtctttgggtctcagtcgtcagatccttaggctgccagaccatctaaggctgccacacctggcagccaagcttccatcaactctcgattttagccgtcataatcctctctttgcgctctcctctccatcataccccattcctcaaggcttcacgttctttccagtattctacaacccattcgaacaacagatccttttggaatcagctttgatgaggctagatcatatgggaggtataaaacgaatcaatggcaagaaaatcaaaagatctaaagctcagatcgcccaagatagagaatcccttggcctacagggttggttcctccccacagacgcctacaactttgagcaggtgtgtttcttgattagaaatcagatcgcaaggacgtatttgagtcgatgtctgaccaaccatgcagagtcactttgataaagtcatccagagctatcgagagactcttgtatcaaacggtcttccagacttaccgcaatcccagacatcctttgccccgacgccgtccgagttgatcaaacgactacactccttcttccctgaccagagccgtcgacttaccacacacgctcttcatctcagtccgacaggctcaataggtggtcatgtcgactcggtgaatgctatgggcgacatcatcgtcggagtcagtctcggagcggatagggtgcttcgattggaaaaagagggcgagcatgaactgggcgcactcgatatcgtgctccctagcggaagtgtctacatccaatcgttcgttgtctgtctttctgaaacgcatcatcgtcgtcaacgccacgagaagcttacatatgtttcgacattgacgaatgaaataccatatcagcggagaagcgcgttataaatatagacattctgtcttgaatgttcccgaattcaatggtcaactgcttagcccaggccatagagttagcatcatgatccgggatgaaaagccgtttaacgaacaggtcggtgttttacatctttgcttcccttacttatcgcctcgagttccactttgaatgtcctctatttgagattcttaaattcctaatcctgatctttaaaaacccctaaatgtccaagatagaatttacccagtgacccgaatcccactcccccgcctcccgcttctttgcctacgttccatccacctaccgagctcgaactggccgctcgcttacaagcagacacggcactcgcgctcgaaagagccagagccctccaacctacatccttcgttcctctatcgtcggcggatgagatgatactagccggagaagatcctagtctagtagagagcgcattggagcagccgaaaaagacgctcgacaagagtttaccgctctcccagcgggcaagagaatggaggaatagaaagggggaagaaaagttgcctcaagatctgttgaaggctggcatgagagctagaagatggaagtagcgtccttcgtttcctgccatggtggggatgcgtttgacacttccagtcttctcattgatacctgttgtaaaacattctatgctaattacaatctatgaaacacaaaaaagggatgctcctctggttcctattcaaaacaacaacgtcgcatcagaagtaagagtctatgctaaaggcaaatagatcacttcttccactcagtaaccttccactctccgacgttccaaagctcgaatccccccggtcctgaatgaggcatcttcatttttcgcatttctgaccagagccatcgtttcgtaagaagagcgagtgatcttcccccccagctaacattctcaaacacagacaatgtacgtcatacgtcaagttcagttgtttgcaccgctcccaagcaaaacatcagaaggattagaaagggaaatcgtgagcttacgttccccaatggatggccacccctgttccactgttctttcccaagatacccattaattcgaccgcatcccctggtgtcatatgaactccactggtcaacactcctagattgaccatttcatccgttatccagttcgagactgctgagaatgggtacggaacgaaactcgatagatacggcagggatgaaccaggagatatcgggaggaacaagagggaaaatgacgaggtcagggttgatgcagtttgggagaaggctgggcagatgtattttggatcggtcactccgaactgtcggtaccctgtgtctctgtttctcgggaaaacaagagaagattaggacctagaggagataggaaaaaaaggacaagagcggaagtttatataaaaacgatggaaaaaagactcacccagcaaagtagattgtacaaggcatgttatcccaatcctttgttgattttcctttactacccgttgattttccatcgcgctctttctcttcaactcctacggcccaggaacaccaaagagaagtgctcttgtcccaacctgaccgaccacttccatgttgacagggtgtgcaagccaccctgagcgatcgctcaactgaggaatccggctgggctgaatccgacggcgacgacgacgaggagatagaagaaggatggcttaacgtgatttggtcccaccagtctagctccgagactcggtcttcagggatcccaacagatttgaaccatgatttcaaaccgaggggcacgatccatcggatatgcgccttgtggattgcccataatgcttgggttgttgggagagacaggtgatcgtaatgtgaatgagatatcaacactacgtgaataggctatgggagatgtataccttgacatcagtctcttgttccagtggatcagatgtgcgaagggaaagaaaagagaaaggaccctagcttacgggcagatccttgacatcgcatggcgggctgatatctctcacaggtccgacaaatccacttggagaacatcgctcctcaaataccggatcgaacagcacacctacttcgtcatccccctcactcctcagaggaaccatgacgagcacactcgcatgacctaaccagcagcttctgaccttgccctgctctttctttccccatctactcctagttggctgtactgatgaagcaatcgagtttccctcttgagcctgtccgcctgtccgttcctctgtatccgaccacttgatacacctgacaggatgctcctcctcctcgtatctcctttgagattgtccattttctttcagctccagctctatctcttgctgctcgtcctcctccgtaaaatcctgatggttgtcttccggccgccagaatgcgtgtggtaaaacatttgttggtggcaggtcggatggccaagggttcttgaacgtcttcgttggaaagaagaatgttggtttgacgtgatgatctttcggagaagctggctccgctgaagcaaccgcctgcacagatagcagtcctgtagccatctgaagtaaactcgaagaaaggaaagaggtaaagaggaaagacggttgagtgagagtgaggtgtactaccaagaaccgccaaggatggaaaagggtaggataactaaatgacgttctcgtatcacgtgatctctgactaatttcaaggctgtgttttttcctatgttgccctcactttatttgactctacattctctctctactctcgtcttcgctcggacgaccttgatagacaagaccatacatcatgtttccgatagctagatcgatacggggaccaacaggagccctgtcaagctgggtatgcttggggaaagcttcgatttcaagacccgtcaaggcaacatgttcccattcgttttctacatcgacttcggctcgttcttcatccgcctcatctccttccccttctccttctccttcacacccatcctcttcttcaagtcgcccgtcgatctatacgttgaaagcagtcgagtcgtctccttatccatatccgattcctcaagacatggaagactttcttcgtggctacccaaacttccaaaggaacgctagacgcgaggcaaatacacttttttaccaaggagaacaggaagcatggccatcagagttaacgattgacgaactgttgaatgaacttaaagaccatccagacgaagcaagaaaggccttgtaagattccgttgcactttcatgttttttaatagatagctggatctgtcaacttaataggtgcttgaactcttgctcttgttttatgcttggtctaatttctccgacagactcgtctatccctgtaggtcctacgtgtacccaatatcgattacgatgagatcaatcaatctgacactatatattgcgcatcttcacaatagggctgtttcccacaccggacgctggacctaataagtatgcttcgaagcttcaaccgcacgaggtgtcggcaatttcgtcggatccgttgtgtattcacaggttgcagcaagcgtactcattggtcagtctgcgctgattttcctttgttaatcttgatcgatttgtgacaaaacaagaagactgaatcatcttctatctttgaattgcgttctatcagactctcaagatgtacgggatacggctgatcgaccccgcatccggactgcttgtccccacctgggactttgaagacaa

SEQ ID NO: 1887 - DNA, 6611 bp, Xanthophyllomyces dendrorhous
agaactatctatgaatctaagaccctaacccataagccatatcactaccggcgaatccgagattaacgctgcgtcgacgattatggccttggtgctgaacccaatgttcgacttgaaaaccacgtacttctttatcggtggcattgccggtatcacacctcattgtggtacgttgggaagtgtcaactttgccaggtttaccgtccaggttgccctgtcctatgaggtcgacgccaaacagaagcccgaaaacttctctaccggatacttcttgcaggtatatataatttctagtcttcggatcagactgtgtatgtttcaagtctaacagttctcttcgtttgcatcgcttctctttacagggttcttctgcgccgggcgagcctgcaggaaatatctatggaaccgaggtgtttgaagtcaataccaacctgcttgataaggtgttgaacgtcacgaaaaacgtcgtgctgaacgacagtaccgacgtcgctgcctacagagctctctatggttacgcgcctgtcagcgaacctccttcggtaagtgaagggaccaggttgaacgagagtggaaatgaatcgcaagaaaatcgactaacctgtgatgattgtgacaggttgtccaaggaactgtcaccacgagtgacgtctacttcttcggctcgctcctcggcgaggtctttgcgaacgtcacaaagatctttactggcggaaagggagcgggatccgattattgcacgactgcccaggaggataatgcgacactcgagtctcttatccgagccgctcgggctggacttgttgacttttctcgaatcatcatcatgcgaactgcctccgaccttgaccgagcacctcccggtgtagacgagtacaccagcttcactgccgatcagggcgggttcgagattgcgctggagcatatctacgttgccggtaagccggtgatcgacagcatcattcaggagtgggacgatctctatctcgaaggaatcgcgccacaggcaaacttcaccaccactgccgacgatatccagagtctggacatccccgagacgtacacttaccgaaagagatcgatgcaggggaaggcctcgatgtttgccaagagaaggtagacactgtaacagcaatcaatgacggaaactttgccggccttggggaacgttggaccgtatgtagtctgttctcaagaatctacatgtcatattcattcctattcagaatgcttggcagaattgagccggtaaattcggctgaagaagaggaaaggtttaaacatgtttcaagttcctagtatacatacacatatgcacatagatacacacatatgaaagcatacaaaccctccttcgttctcatctatccaggtcacccaccaccgattgatggtatcagatatgagtagactatggcacacacacacacacacacacagagcacgaacgtgaaccttgggctcacctgacgaatgtggaattcctcatgcctgtgtctatttttacaacctctggcgcgtggtagagctgtaactgcgggattcttcacgttggattaatcaccatgtctaataataaaccaatatatgttcgtgagggggtgatcgcaagatattttagagtgccccgccggtttgtgccttccccggcacgttcgacttcacggacgtctccgatcctgtcgagcgaccatttctccggatcagctttcagcttaccccaaacgtctcttcatcttccgatcacaccgatcacatctctcagtctccctcgcccctccgagatctatgatctcgctcagacgaacgttgtttgagcaaagactatcggacggacgatgatcatgtttgagcctttccgaacagaaaggaaaaaattcaatcccttgcaatattcttgatcgaccgctcaggtgagtattataaaaaccctttagttaattccattcctgctatccgtttctctttcctcactctgctcatcttccgtcgcaagtctttcttacaacaaaaactacagacatgaacgctgtcgttctcgcctcccttcttcccatcctcgccgctgccggacctttgggtcagagagcctctgtggctccctctgccaccgttgctgcatccttcgtcggctcccacacctcggatatcttccctcctccttctggtgagcttctcttcatcagctgttaacgcacgaacgcgtcgataacatactcatcctgctttcggcccaacagccactgtcaacccgaccttgttcccctccgagcctgttattggcttccctggagtgactgctaccggagttgagcccgccgcgatccagaccgctgctgcttacgcctacaacgaccagcagactcatcactaccccctcgtggcggacaagccctctgatgtcaaccaaacgaccgagttcgacatcttcaagtactggggtaacctcgctccctggtactctgttcagtccagcgcgtacggtctcccagaggccaacccgttgatgcccgagagctgctcggtcactcaggttcaccttctctaccgacacggtgccaggtacccgaccactggagccctcccttacgcctttgccgccaccgtggccaaccagaccgctcacggtgggttctccgccactggtgatcttgagttccttaacacctggacctacaagcttggtgccgaacttctcacccccttcggccgacttcagaacttcgagctcggtgtcgccatgaggcagcagtacggacacctgctcaacaacttcaccgagcagggtactttgcccgttttccgaacgcagtcacaggatcgaatggtcaagaccgccgagaagtaggtggtatctatctattcttattaacaaacgatccatgctgataggttcaacttctcgccagcttcgccgccggattcttcggagttcccgagtacctcgaggaggtgaacattgagatcgtcgttgaggcccttggtttcaacaacaccggtgctccttacgaggttagtgcgagtatcttgactttaccctttgttctttgctacattttactcatatccttcttggtcgttcacgcatcccatagatgtgtcctaacgccaaccttgccaagtatggttccatcggctccaccgctgccaatgccttcgccaccactgccttcaatgccaccgccgcccgagtccagaagctcgtcaccggcttgactatcacccccaccaccatcctctccatgttgcagctttgctcctacgagactgatgccttgggttactcttcattctgcaagctcttcaccgctgaggacttcaagaactacgagtactactacgatctttctttctactacaacaacggagtcggatcccctgtcgctgccgcccagggtctcggttacctccaggagttcgtcgcccgattcgaggcctcgtctgacttgctcgccaacgccgattccactgtcaacaccacccttgaccttaaccccgagactttcccccttcaccagtccatctacgctgatgctactcacgaggtcgtcgttctcgacaccctcaccgctttcaacctttctgccttgttcgctggtggtcctctccccctgaccgagaggtcgaccaagagtcagttcaaggccagtcaggttgtccccttcggaactcacttcaccatccaagtcttggaatgctccgaccttaccccctcgaaacagatcaggttcatggtataagttcagctttgttcttgtctggtctcgagcgtttcttaagaattcctcagctcaccgatgtttaatatttcttttcgtcgacagtaacgacgccgtccttcctctcaacggaacctacgccggatgcgagtacaacgctgacggtctctgtgctttcgacactgtcttgacctccctcaagaaccgaatcgaggagattgacttcacccatgcttgccacggaaactacaccgccacggctggtgttgactacaacggtcttgccccctcttcgtaaagagcggctggctgttgacggggattcgtttgactaattaattcattactttactttatccataaaactcgatcttttgtatcaatctctactctcagacttatgttcatctctatattcatttctcggcggaactgagccagcgaagtcgactagagaagaacgaaatttagcaagtcaggtattcgatagattgagaaataaaagagaagcgctagatacctatgagttttgtagcttttcggagagacaatcttgggactccgcgtaaaaaggaaatctgagggtgttgccttaaaggaaaaggcaaatcacggctaaaaattccaaaatcaagaattaatgaaaaattgctcaacgtttgcaacatatccaatcaaccttggcaatggaacatcaagatcgtatagtatagtggttagtacttccgcttgtggttcttcaaccgaaacgcagagtcgcggacgacgggtgttcaattcaccctacggtcattcttttgttcctttcgatgaatataccctttttcgttgcttcatattagggttgatcttgtcttctgctctcggctggggttggtcgacatagcctcgttcgtcttaagacttcagccattggagggtctcagtgtgcagactagtgttttgccattcttcaacatgggcgaaagagagggatcaacgagtcaaaagttcctgttctgtctttctcgttttctttcaagacaagaaggattgaacaagcttcatgttattgtgatgcgacgagcgaaagagggaggaaaaaaatcgaaacagtacagacagtgataatgacaagaacggatcgcaagggtatatgtaaattaaagaacagacgagttctggacgaggatcaagcagaatccctggcagcaaaagaaaagggagatcgggcacatggcgaataggtttaattataaaacacgagggatggaacgaaggaagaaagagaagacgagtggtttgagaacacagaggaagcgaaagacagagtgtcctcacgaaactcgccatggtttgacaaggggatcgaacttaatgattgaagcgaaggaaaagggggggggggggtataaagggaaagaatttacaggttagagcgataaggctgtgagtgacttgtgaggtacgatagacaaatcgttgagaccagaaaagaaaaaaaggaagagggagtccagatgccgcccacgttactttgatccgaactctgaatccgacccaaccatactagctctgaacgggttgttctctccgacgacgctcctcctgtcagcttcttcccatgcctggcctacgctcggttggccttggctgacactggcagatcggttcctggcggcggcataggccttgagcatatcatctggcgacattggtgatgccgacgatgggtcgatcgacaccgccggagggggcccagggaaacaagcgcttgtcggagtgagtgaaggcgacaggatagtagggttggctgctttggaagggatctgaagccttggcagctggttcttcgacgggttcacatttgactcgggcacgtcccgcagattttcttgatcctctgaaataacatcctgtcctctttgttgtccgaaccggtcgacctcgtcgacgccgaggacccagggaccggacgtttgactcgggctggtcgagagttccagactgttccctcgtctagcttccgagtggttgcccatgtcgactcttggtcggagaatacccgagagcgaggactttgatttggcatgtccagaggcatggtgtgcttgcgtggggacttcatgtgggtctgatcgacgggaatatatcgaaccttgggttcggctcgagtagtgcgtcgcccggttttgatcggttgacgaacgagcccccggctcggcaaacgacacggctcgactatttcgttcggcgtcggtgaacattgttcgtggtcgggcgaaggaagcaggatcgatctcggacatatccggttgaccggcctggtgggtaccgaacccggcatggttggagtaggtcgacatgactgtccgtctgttttgagagaatgcttcggattttcgaggagactcgccctgtccggtcccaggttgccatgcgttggaaagaaccgactacaagaagcgtatgccatgagtttaagacggtcagatctgcctagtagtgtattggaaaggtaacaaaggcagagttgacttaccatcctgttgtctgtttttttaagagatgagacgcgaggaaaggcaggaaaagaagaggatagacgatcaggtgccctccggtcagtgatggaatacgaggcgcaagaggagaagaagctagagaaactatgtacgaaccgattgcttgagaccatctctgtctcttctttgcttgtttcgccctcgtccatctgacgtagataaagataccggccacaatgaccacgatggggaagaacacagccgcaaagatactaccggcaggaagggaacccgagccagtgccgatcttaacgacgactggatccgagatggctggagagagggaatagaagattgaattacaaaagaaaagaaaagaaaagaaaag

SEQ ID NO: 1888 - DNA, 3182 bp, Xanthophyllomyces dendrorhous
aaaagaaaagaaaagaaaagtacatgagtaacggagtattcattttggtgaaaatgtaagtcatgaaactaaccagtgttagccgctggggcagccacggtacttcctccaaccgttgtagtcaccagtgctgattctgggtaggtcacagtgaattgcggaccaacaggtaaggaactaaagacactgtcgatcagcgagccggagggcgagatgatgatctgcatgccaatggacgtagtcgaattccacctgtgtgtgtgtgttttggacagagattgaacagtaaaagagctggtaagtgtcccggacacgtaggtttggctcatgtgctcagctttctatttgtcaaaacaggcagttcacgacgtaccacctaggaaggagttcctcggagagcgagccggtggaggcatcgatcgattcccaaatcttgtgaaacacaatgtaaaggtcgatttgaatgcaaactgattgagtttcactctggacgagatgtctgcagcttaatgaaaagatagcacgtactttgatggtggggtctgcagagttgggcgcgaaaagtttgagattgatcttggaactcgagatgcaggtcttgtcccatttgaaagttatcggaccgcttgaagcatcgaacgtagataacgattcaggcgagaggtaaagttgagcggtcgtgcaacctttgaaggaaggagttgagaagagaacaaagaaaacaagagaaacaatcgtcagtacgcgtcggacacgtgacataaagaaggacgacgaaggagaccctcgaagagacagaaggacggtgtgacgacgatgaacgcgatctcctttcatctgcctctgcctctgcctctgcggatatagtttcagagctttccttctcgaagcagcacggacacgcgtgcgtgtatatgagagcaaggatgctgtagggagatatggacaaaagacatggaaagtgtctgtggcctacctctcttagtcaatgatcgtttcttcatcatgagggacgattcatcgagcgcgtctgattcgtcgagactggcaagaacctgatcgagtgttgacaggcgagtagacgccaaggtagacgagatgacggatgacatggattattcgattaggcacacgattagtagatcttgatgataatttagatggagagagcgagagaacgaaaagattgacgattggtgaggattattaaagaaggactgaagaaagaggaggaataagtgagcggattgggcaagccaaggaagattaaaacggccaaaagtcggggaacaacaacggagaaagagcggagtgagttggactggaagcgaactgataaagacttgtgccggaaacactggagagcaagaagaaggtcgaggtgatgtaagagaactcagaagaaggaggagggaggaatggaaaaacaacaacaaaggtggctgacgcgtcggtcacgtgagctgccaggagccacgtgtctgtgtggctgtgcagtcctcgtctccgagcccatcctctccatcctcctttgggacatcttgtaccgaatgcgcaccccatggtcctctgctctcgaccatcatcgggacaatgctgcaacacagaccgtcgcatgtcatcccgggtggaacggtagctcttgttttgttcgtcgtctccctcgtttcgttcacggcccagtcgcaactcgcccagtacctccagacgacgctcggtcagtcctttcaacctgtagagtctacgctggctgtttgtgaatcttatatgacttctgtttcggtgttcttttaactatgtgtttttgatgaacagaataccagaagtcgtactttatactctactgtgcacattcgtcctttctcctgcttctccctcttcacctggcctttctatatgtgtggccgggtgagaccgtgccgataagattgatcttgagagagctcaagtttcaggtgagacatcaactggatgggacgtcggcctcgaccgagcttgctgccaaacgtgtgggctggccatgggctaaagcggccatcagttctatcggtttgaccgctgggatgacgatccctgccggttgttggtatgcgagtgtacccttgactaggtgagtgaaggggggctgtgggttggtccagactacgtcgcgcctgttgcgctcacaccttttcttttcttttcttttcttttccaaacgactccttaccacggccaattagcatgactagcatcaccacgatctacaacacctcggctctgtttgcctacgcgttctccgtgctctttctcgctgtgccactggagttgaagaaggtgacggctgtaggggtggcgaccgtgggtgtcgcgctggtcgcttatggcggagcggcctcgcctgacggacaagaggaggacgaacggtcgaaggacagaaaattgggtgctagtttcttgggagacctcctggcgctaggaggagcggcgagctatggactctacgaggtcggtcttctatctgtctttgttattactatcatatgaaaacaaggatgtctgatatatgcacaatccgtcggtcctgcttgcttcttcctttctctctccctctccctctttgttcttgacaggtcctctacaagagatactgttcgctgcctgacccgcctccatctctgtccagtcgaccgcggacggtcggtctgccgttcgccctacatgcgaacctattgacgtcggtgatcggattgacgacgcttaccgtgctcgccatccccctctacgtgtttgacgcgctcgggtgggaaccattcgagcttccgtccgattggatcacctcgctcaccttggtcgggatcgtcctcggtggtataggtttcaacggatctttcatggttagtagttgttgttattgttgttttgtgttgtcttgctttcttgtgtgagaaggaaagcgtcctcgacctggatagaaagttgctgatgtccatctttgctttttctctttcttcttctttttcctttccctctctttctttctgatcagatcctcttgggtttatggggtccgatcgtaggtacgtcagaacggccccaaccgtcggttctgcctgtcttctctgcgtgtgtatcgattggttgacgaacgcgtctttgccgcattccatctttctgtgtgccttttttttttttgggggggg

SEQ ID NO: 1889 - DNA, 1841 bp, Xanthophyllomyces dendrorhous
ggggggggggggatggatcgggatgtgtgaacgataaacagcctcggtaggaaacctgctgacgatcatcctcgtcgctctgtctgagtctatcttttccgatggttcctatccggtgagtcgtggtgcagcagcggtggcggcggcggtggcaggcttggcttggcttggttctaccaagacgccactgtctgctgtttttggctctagttttgttttcgttttgttttcctccatcgactgacacacacgcgcacacacacgcacgcactctctctctctctctttctcattatcgaattattgtttctctgaaagctaacgctgacgatcctgacgggcggtctgttggtatgtacctcgtttggagtgctcgtatgggatctatccgaagggacaggagaaagcgtccgagagatcggtagggaacaaggagaaccacgagagagggagtcgttgattgagtctgaagacgaagattgagtcgaggccctgtagtgtgtgtatgtgtgtgacttgggggaataaaccgttgtatcgatagacagacagatagatagattgaaagaaaaagatatcaagaaaagttcgacatgtatggtatcgacccgagagggagaaaggacttgtctacaaggagaaagtgagaaagaacaaggggggaagggaaaaggaaagatcccctgaagaatacattttcgcatgtctatggaatcatcctcgggctttctttgggcttttaaagtatttggttctcttatttttgtaatctcctcgttctttaaaaatcatctgcttcgtcctccaatgcgctgatggcctgatcgatttcttgttggaacgccaggagctcggtcgaggacggatcgtaagagaggccgaggacgagagctctgtgaaagatggacgtagagggagggaagaggaggaggagggatcctgaagatgagttcgtaatcctaggttgcgagaggggaagagagaaaggaaaaggaaaaggaacactgaatggacgtactctttggcaagatatggctgatcgagtgccaagagtgctcttttgataaggtttaaaggcaaaggatatgtttaggaatcaagaccggtttgctgaaaaagagagagaaacatggtctcagaggactcactttgcttttcggaagtgacctttggaccacggtctcttcagtctgatcacgctctctgcgtctgcgtaagagtgggtccactgggagaaagggcgaaaagagagagagagaaagaaaggtgatttgttcgactttgtcagtcgattgacagcaagagacagaggcatctttgagagaaggcgagaagagagaactaacctcgcctagggcggcccaagcggcacttcggttacagagcaacacacttatctcttctttgaccaagcctgacggctcccagggcagacgttcggctgctactttgagtgcgagcgagtatgtgttgaccgagggtgggtactgttttgccttgaattttgtctgtgtgggcaggagtgcggtggtgagaagtggtgaaaggtagtacagagtcagttgcagaacaagggcaacaagatgggagagatgtgtgggggcacgagaaaagaaggacgtacgttgccttcctctttgagctttgcgacctggacggatcgtcctctgtccacgttgtttgggtttggcggaggagggatcgctccgtctggtgctttggaaaagacgttggcgagtaggttgacggtgttgaacaggtcgaccggctggacgtcggcgttgatgggagagagaccgtatggggactgggtggaggccggaccggagacgaacggggag

SEQ ID NO: 1890 - DNA, 1147 bp, Xanthophyllomyces dendrorhous
gggaaggagggtgggccgaggatgaacgggtgttccgggtggaacgagaggggcaggatgttgaccggctgtgtgtgtgtgtgtgtgtgtgagagagagagagagagagaaagagagggacggaggttgggtcagtaggaggaaggcaaagacagagtgcgaaacagcagagagagtacaagagagcagacagagagcaggacagcaggaaggaaggcgacgggacacttacctcggcgtcttgaccgacgagggattctgccttttgtaggttcaacagacgttgttgctcgagatgttgtgccatcattattctctgttcgtctggtgacgggccttccgggggtgcacccggctgggggtttcccaccacagggcttgcttccatgggagtgtgtgtggttgttgtgtgtgggtgcgtgggtgtcaatgcgagggatgtacacgctaacagtgacaagcgagatggaagaccgaggggagagaaaggaaggtgaagcgaacggatggagagagggggggtatgttctgtcggttagggttaacacgtgtgccagcgcacagcctgggtgtgcctgtgcctgtgcctgtgcctttaagagtgggcgtcggcgtgagtctgggcttgggctcgtctgacgtaatcacccgatcagtctggagccagcagcataccggggatgatgaggagtgtgtattgggaggacggcgcagaagaggatagtgctcctgacctggactgggttgactacatggtgtttagaacaggtagacacaccgagagatcttacctgaggcaggccatgactgatgatgttatggtaagcggatgacgatagatagaatgcgcgcttgtgttgaaaccagggagagtctgggggttctgttgcttggctgcttgctagcttggttgatcgctcgctagcccgattggtgaccagcatggttgatggcttggttggttgctgacttgcttgctcactcacttgctcatttggtgatcgttccgattcttgccggccgctcttttgcctgctgatccgatcgagggacgggcgggcgcgaggacgaggtgtctgagtgagcgggtcagggcgtgccgagtgaatgggagggatgtgttcctggtgcgtgtgtgtgtgtgtgt

SEQ ID NO: 1891 - DNA, 2000 bp, Xanthophyllomyces dendrorhous
  misc_feature (700)..(709): n is a, c, g, or t
agattttcaaccccccccccgcccggcctcctcgtctgacgcctgaacgggaaagtatttgattatatttgattctttttttctttctctccgactttccctcccacccgacttttaccttgttttccgctcgtctggcccggtgtcgtcgtcgtttaggtcgctcggtcgctcggttggtgttctctttgctcatccccagctcgtcccaggtcatcccaggtcatccacagctcagctctggtcatcacacatcgtcccggctcgtcctagctgttgcctcgatctattcgctctccattccatccggcgggtcaaaagaaagagcggtccaaagagtacgtcggccgtttctctttcctttcttccttccttccttctttccttcttctcctatcgtgttcttgtgttcttgtgttctctctttcgcactcatatacacacacacacacacacacacacacatactcactgacacccacccacccactaaccgatgctctcctcactctttcagcacaacttgatcgcaaagatgaacggctcgggcacgaaaccagtgccaatcagctcactaagcattcaatctgtaatgtcctcttttactcttccttccttctccgctctcctctcgtcatccaacactgatcgagcaatctctctctctttctctctctcacacacacacacacacacacannnnnnnnnncaacagttccacaacgactctcctcccttcaccggctcggcagattcccccccgcctcacggccagccgtcatacctcgatttgtcccaagcactagagtccgcttcctccatcagcggcagcagcagcaataataacaacaatcaccatcaccccggcacgaccacggcctcgcccgcacccaacccatcatcatcatcatcatcctcatcctccgccgcctcgtcgtcatcatcctcagcagtacaaccacccctcccaccatcatcccttcacgacaccaaccatcactctgatccaaccacaaactcccacttccgcaactactccagtccacccacccaccagatcacacagatcaacggctcgttaaaccaccaccaccaccaacaacaacaagctccccctctacgcaccagacacagccaacccgtcctccctccttccccctcggcctcaaccaggacgatcaaaccgatcagaccgtaccactccgacaccctacccagcccatcctcagcctacccgccgctcacgtcctcacagacgatcgtcccaccctacaaccacggagacccggtacccggcccggccgccgtcagacatacccccgccccttccttcatcagcgcctacgatggtgaaccagacatcgacgttgacggtgacggcgatggagaagcagacgccctcagtctcgtcggcgcagaacgcctgttgcccagcctgggtgactctggaaagtatctccgaggtgaaggagactacctctttcccaagcatcgtctcaaatctgtctgggatggtcagtccagtgtttacccttttttttcttcttttttctttcttttcttttaacacactctctctcttcttggacttacctttacccttcctctcaacaaccaccaccaccatcaccagaccaagaaaagacgccgttggtgatcgtcgcctgtggatcgttctctcctccaacataccttcatctgttcgtaatcctatgttctattctcacgaaccattcctcctttccctctttctgacacacacacacacacacacaatctctctctctctctctctcctccagccgaatgttcgagatggccaaagatcaaatcttggaaagtgatcaatacgagatcctaggtggctactactcccccgtgtaagccctcccttgtctcggttggatcactcgaattttttcctcctcttgacgcgcgagtccatctgtctcgttttggtgctcgtcctctttcttcctcaccttcaccttctctcactc

SEQ ID NO: 1892 - DNA, 2037 bp, Xanthophyllomyces dendrorhous
gaccactacaagaaagcaggactcgcacccgcacaagacagagtcaagatgtgtgagctagcggtcgagagcacgtcgacctggctcatggtcgatccctgggaggccggtcaggaatcttaccagcggacagccgtcgtcctccaacactttgaggaagaactcaacggtggtcccaacggtggagttcgtacccgaaacggtacgttcctaaaaggccttcctttctctctctctcctctcccgtttcgcacactttctcaaaggttcctttccatcccttcatcctcttcttcttcctccccaggcggccgacaacgcatcaagatcatgctcttggcaggaggagatctcatcgagtcgttcggacatcccggagtctgggcgcccgacgacgtgagtgccttctcctcttcgtgctcaggcctgtacatacaattctcaccccacccttcctctcctctccacacagctacacgtcattctcggtcagtttggttgtctcatcgtcgagagagcaggctcagacgtctgggcgttcttgctatcacatgatatcctctaccaccatcggttcgtgtttcattcatccttcagccttttcgttcgttggtatcgtcccactcatatctcgtcctctccaaccttccgtcacagccggaacatcatcgtcatcaagcagttgatctataacgatatctcgagtacaaaagttcgcttgtttgtccgaagagcgatgagtatcaagtgggtttccttttctttttttccttcaaaaattcatttccaatacctagtctactacaaccctcttcttgttcactctcgggaatactcacccaaacgaacctttttccccttgtcctttccaactttccttaggtaccttctaccgaacagcgtcatccaatacatctacgaccagaaactttatacttcgttcgtctctagccttctctcttccccccccaaagcgcaaaacggctgatcccctctcccttttttccctcctcttttcttcgcttgggtatatctctgttgatagagaagcaccagccgtccctctagaagctgtcaccagtatgttccttttttcctttcctttccttttctctctctcccactccttgtcctcacaatataacaccgaagactcatcctccttgcgtctttgtttcgtccctcctgcccgttcccatcgataaaaagcaacgtcccccccgccgaggacggtcccaccgacgccttccgccttgaccgagcgcaaaaagtttttcgtagcggactccgactcgagaaatagcgccaggacgacgtctgcgtgatggcctgtttctacttcttcttctttttttctccattcctttcgtttacacttcgtctttttcttttcccctcctttatttccttctttattttttaaaaaaaaactttttgcttgtctcgtttgctctggtcagtcgatcggtcctttgcgtgaacgcatcttttcctttcgttcttcatccattcatccatccatccattcattctctccgtctcgtctgtctgtctgcctcggttttgtcctgcttcaccggccttagaacgggcctatgctccaacatcctttcctcccctcctcttttttcttttctttcccactttacatctttgttttttactcatcttgtctctcggatctctggatatctgatattcaggaaattcaaacccgaataaccacacacacacacacattgttctttaaggtaaaataagataagggaagaaaagaaaagagatgaaatgaaataaaggcggcggccagggttctgatggacgtcgagaggaatggagtaaaagccggatgtgagattcatagagcgacgccaagaaagcgaacaaacaacagagaataaaagagcaagaggccaaatcgagatagtacgagaggagagagagagagaagaaaagtaaaatgtttttttaaagggaaaggaagagtctacgatccgggacgatcgattcgactcgttcatctttcctatcaacaac

SEQ ID NO: 1893 - DNA, 19202 bp, Xanthophyllomyces dendrorhous
atttccagagaagaaaacatatacacaaaagaaaaaaggcaagagaaacagaagcagccagtaaaacttttgtacccccttttttcgttcttcattcttcttgatatacttcgtttacaacaataacaacaacagaacagaacagaacagaagaaaagactcgcgaccttgatctctccgcactgcccaacatcggctagatcgaaaccacctagggcttgaaaagtcggtacgtgaggaatcctcccatcagagcgaacgccaagagacaaccctgtaggataatcgagcgcaccgtcaattttcagctcgacaaaggaacgaaggaaggaaggaaaccccgagacgattcagaactaaaacacgtacgacgataccccagaaccaagccaaacccggtgcattctgtccgggaactatcacgttctgttttcgacccacccacccatacacacacagaaagcgcgaaaccaaccgtcagtgtcacatccccccaaaggcgtctttatttatggtcaaatgaactgaccattccccacagaccagtcaccaagttcatcggactggtagaaaccacgagtaaagatgtatcgttagtctcgccaggtaacatttgatagaaaaggaaagagccatatgaagagaaaaaaaagagagaaagttcttcacattaaaaccgttccgagctaaagagaacgagtcaaacggccgtaagcatacgttatgatatgattgattaatacaaacaaaaacaaaaaaggaagaagaaacgtacggcggtcatccttccaagcacatcgttcatcttgttgtttgcatctacacgtttagaaggaaaaaaagcgacatcaaacaaggccatgcagcgtcagacccatgtacaccatgccagaaaggagccagaggcatccaaagacgaacctgtcatctcgatcgagatctgagccaagtagttactatgcgctctcgatagaatcttttcaaacacgttgagcgagctcgtcatcgtgatcaaatggtcctatcacacacaagacgcacaaccgatcaagttagctgtggtgcatggcaatctgcatctagacgatctagagcggaaaaaggtacctgaatatccgatagatagagtcctatgtctgatcgaggagccacactcctatcgatcccaatgagcaagccagatggtctacgggtcaacaaccagatttgtatcctagcacagacaacccaaggacttaccaattctcattgcatcgctttgctagacccttaacgacatccgccttgttacccatcaatcggagcaaacccatcaccttctttcgacaggttccgattctgatttatcccataaattccagagtattcagtgatgcagtcttattgtccttttttttggtgagcacccagatcgacagggacgcaccttcgaagcatatcactttgttcggtctccttgatgataagtaccaactacaagacgaaaaacacaaaggggttcacaaaacatagccaacaattagtaaccctcattgcaaaagattcatcattgagcgacatcaacaaactcacctcatccaccgaatcgacctcgtactcaatactctggatcaacggaccgaacgcatcagtcacgtcatcgataagcgcgtacgagatccagtccgaagtcacagtaatgtaatcctttagctgcttgattcgacgtcgcacattttgcggatggggagttgctcggaagtggaactttgattgcccaaacaaacaaacaaacgtcagtaacgggtgcattctaggataaacacagacgaaacctacagagatgactccctccctgaaaacgaggagatacaagttgagaggcctgttggtggagaggggtttttcttagtttccagagatcaaatcttccaagatgacaacaaaagactacgcaagatacttactctagatgagtagagctgtaaaagtcctggtcgaacgacctgaaacagaccagataatagtttcggaacagttcaatcttttctctcgtctcttccatttggatatcttccgtagtaagcggatggattccaaagacctgatcatggccaaataaacagacggcatgataaactttttagcatatctgatcgaccatgtcccgcataaaataggtctgaacgatgtaacgtaccttgctcagcatcttcatctcatcgtccgtcgggcaaagcacgtccaaccaccaagtactcgcctccgggtccccgtcgacgtctcccagaatcgagccttcattttttgggctgtagccatgagagaatcctcctcccccatttgaacctgctgtttgtccttgaccggcggcagcggctccttgcaacgccttgtgtaacagaccctggctactgccacctgtagtgttggtgggggccgtcccaaacgggctcacattctctgatgcgtcgcctctcacactttcttcgtccgccttggtttccctgccggtgaacaaatcctcaaacgactggccctccgcaggcaactctgagatggacctcgcgtggatcgttgcaggcagcgcgttcgaatagaatgagaatctgaacggtcgttcctccctctgaacgggctgaggcacccaggatggtaggtctccgttggccgggaggtgggaatcaaacgaagacgtgcttccgtgtcgttggttgtcttggtaaggacccttcagcaaaggcgactgatgaggaaccggagcagatccttcgaagagagcgagctttccctgtcgacgggcatgtggagacgggtcagactgagaaagctttcgttggcgccgacgtgtgaatgcctgactttctttcggaggagatttgggtccgatgtcgataagagacacatgggggattgaagctggctttgagtcaggcgacgatgtcaagattgactcggggatttgctgcggttgacgtcgtccaaacccatcgatctcgtcctcatcctcatcttcctcctcaatcttgtctgggtcatctctatagggttcatcctcatttgccacgacgtttctctttcttctcgagtgaagccctccagaccgaggctggctcttcaatgcctcccgttcgagctcgagcctttccttggaggcccagttttcaaactgggaaaagtcaaagacattccgaccgacaaagccaccgttcatgccggcccttcgtatggtgtagtcgttcatcccgttgttcatcgtcatgccacctcccaaggtgccaccaccgttgacggtactacccccaccgattgaccgagtctcatcctcatcgccaaacggcgacggaggcgaacgatcacgctcatcatgggatgaaggaacccgatgagcatagtccacctcgaccggttggatgtgtcttccgtcggactcgtccgtgatggcagcttcggggatgtacgttccactttccaggtgactctcctcgtcctcctttgcctcggataggataggaaactgggtggcgtccagatgcttcaatggcgatcggccagcaccctggtgggaggaagaatgtcgagctcgcagaccggtgttgttggtgtttgattggttcagaccgctgctgccatcggaagaatgaccagacgtatgagatggataagatacgagcgaagggatgtttgggccgagtgagctgctgagtgtgggcgaggttgagacgttggcagagatagactctgaacgagctcggactgtttacacatcacacataagagtgaacgaagcatggtgggtaagcatcagaatggtatcctgaacagatggtcgggaaaagattgctaaagggagccatgctgtgatgataggtagccttcgattagagaatcggatagccaatcgctttccccttcatctttcttcccgcaagacccttccgatgccaacgctcattcgcacacccgaagacctccagccacatattcaagtgagtggatagagcaggctaagcaagaggaaggaggaactgatctcgtcttgtaccaggcttttagagaaccaagagaagaaggaaaaaggatggacacccacagagtgccatggccgagtccaggtcctgcgcccgctgtctctcccgatggtgagaagtgttcatgcttctacctgacggaagcgtcagccctgcagatggagaattagaagtcttaggaggaggtgatgatgacaagctaggcattgagatgtcgagcttatagtgttcagagtcgggatggtcgtcgctcggtcaaatcgatttcctttggaaggcgaggaggaatgagaacaccgaccgagggggatgtaaccatgactgatgacgcatcgtaaccatcggtgtgattacgtaatatggcttcgtttgcttaggaaagaagagcatacaggtatatgcgtatatgtatatgtgtattgatctctcttggatgtgtgtgcttcagacgatgacagaagacaagatggaagagagcaagaagagcgagaagaggaagaaaggcatgaataaacaatggttttaaccgtacaccctgaagtacatgacgaaagaagaaccagaagaaggcattgttagactctgagcctgtgcgagtgtccagaggaaaggaagcttacaatcggaaaacgtcgttgaatctataatattcagagtcgagcgccagcagaagggagatgaattgtcaggtcagcaaggatagcttacacccaattgtaacacaactcaaacttacacccagtaggttgctccctccttgatgagctgaaacacctgggagaactggagcgggggagagtcgtcgatctattcaggttcaaacatcgtcacatccatcaagatagattattgtacccgacaggcaaatgataaataaattaaaaaaaaagagtcagtaaatcgcaaagacgatcgagatggagtgaaagatgcacgtacgatgagctgaccggtcacaagaaccatcaggtgctcctgtccaggctgagacggctgagcgtcagtggtaacaatcttgtgctggacctttccgaagggaagctcctgtatgcgacaaacaagcgacaagagaattgagagttccaaagaacaaggaaaatatgtatgcgtagggtgagtttggctagctggaagatctattgaggagaacgacataggaaagagacgaatggatcaacgaaccacaaggtgcttgacaatagcatctccactcaagaactgcttctcctcccaggtaagcatagagacatctcgcttttaaagagaagcagaagaagaagaaaagaagaaattacacaaaagccatgtttgatagcggagaccgatctgggattagtctccagaattctttctagtcatgatcaacataagggagaagtagagggactaacgtagagatccttcaaagcaggtcggttggtagcgaacagagagtagtagtactctgttcagacgaaagccatgcccaacagttgagcgagacaacgaaaacgacggaaataacaaggcaaaaaaagggtaattcagcgatagtcgattagatgatggaattttcttttgtctctctgaatctccaagaggtgacttttgaggagcggataagaacaagacgataacaacaacaatagaggagagatagatacgaacgggtgaagctggtagcgacggcgttgaggtcggccatggttgctgtatgattcctttgaatttgttgaaggtctaaagagaagagaagaaaagaagaaaagaaggcaagctcgcttcacgtggagggaaacagaggtggattgagaattgttagggttgcacagatccgtcaagttaaatcaagtttagaaattccaagaaagggtttcgctctcagctgattgacataagatttctataagagattgaatacaatgttgtttgtatgaagatgaagatgaagatgatggagcacagaacactacgagaaccaaaaaagaaaaaaaaagcaagagagagagaggaaaaggagagaagaacaacaaaggaggagagtgtctggattcgtatgaatgcagtgtattgttgtgttgaccttcgaggggtcaagagattaggaaatcgctctatatcgttctagttttggaaattaacaaatgactaagtttggtttctggtgtatgaagaggagatgaagaagaaggagaaaaagaaaggatcggagagtaaaggatagaaaccttggaatgcaaaatacgcatggaagcaaaaaaggaaggagctttctctaatctccgctcatgtatgatcctacgacctcgtaacaactgaccatgatggcacaagcaggcgcgacctttgccagcctaggaacaagtccggcaaaaagagcggtgaagccctcgttcttgatgatctcgcgaagcagaggaattgtcgacgatggcggtcgagggctggtcgatagaagtgaggaggaggtcgggttggaggtgatttgacgccgagtcttgagaacgtcgaacggggtcgtaactaatgcagcaaactaaaggagagtgttgaacccgcaagacaagatcagagagagaagatacctctgatgagcaataaaataaaataaacgaaccattccactcccagctccagccaccatcgctctgccccattcaccctcaccagaccctgccttctcccaccttggtccggttagaactcttcctttcaaccattcataccctccccagtaaattccactgaatgggacatccctccataatgtcgcgccgatgcctctccacaaacttcggacgccagactcgccaaccatctttcgaagatcgatcacagtcgacttaactgttggctgaggtcggcctggaggtggatgcgcctggagacgagtcctaaaaagttcgacaggagagattatagtagcggagaacgtcctagcaagcgagccagcaaaaaggggggtcgacgtggccaagaaggaagagttctgaatagagggctgctggatcagatacgttcgaaggtgatcatatccaaccatatagattgcggaggatggcacgcccattgttctgtcaaacgtcaagagttgtaacgttagccagcacgaacataaagaccagataggaagaagacaagggcaaaaaccaactcacatcgtggttcccacacctctccagaacccacgaactccactttctctccagacgctgacgagttcatctctaaatccatgggcaaccctaccactagccttgaactcctctaccaacgctctccacccagaaggactggcacatccaactggctcccgatccaagaccaaagtattgccttgagctcgtattgaggccgtcatggcggctgacgagaccgatgttggaagcggagcggtggcgcagtggatctggtggtatgaacggagagaggatgaagatgaggacgatgaggaagacaagagtgtatgctgacaacacgaagatgatgacgtgggtgagaatgagggtagagatgatgcagatgcaggtggcggccgtgattgaagacgagtcttgaggacatcgaacggcgtcactttttttttttgtttttggtatgcaacaaataacgatcgaatcggcaaatagaatacaatacaggccaagcgttagggataagtagataagagatggagaagaacgaaagacaagtacgcaactgagcaaagaagtagcgaccgctccggtcatggcacctgttccttttgctcctatcttggccatcaaccctttttggggtacacgatcatcgggtggggagggagaaatctctgacggaaacggggtgtgggcggtgtggggatcgatttcgagcaggtgctggtcgagaagaggggtagccatcgtctggcgaaaagaagggtattatgttctcgtgcgttccgactcttgcgtgtgtgggatgatatgtattatgtatgtgaagcagagataaaagcaaaagcacaaggagagccgaaggagttatccgtatgaagaaggaaagaacttagggaaattaggcggacgcgctaatggagcggagacggatttgggcggtagcacagcatttgggtcacgtgagactggccgtgtcctattcgtcattcattttctccttcgatagtgtattctacctactctgggcgaacagagagagtcagagtgaactctaacaaggaccgacctcatgacagctcaagtgagtgacaagagacgagagcgcaatatgtttgaaaccgatgagtttcttccatcatacaggatgttctgaatgattcgtttacataactccatgaaattaaactcccatacttacattcacaagacagaccttgcgctgttagccgttgatacagatatgatcgtccgcggattcattcgtttgtcagattattctgaactaagcatactaatacacacgcagactaagaaacatgtacatgggaacgatctctctcactcacagaggaatagctgtcgagaggtacaccgatagaagagacctgttcattacgggtcacgtgagagtgtttggacgaaagccaaatgctgtgcgtgatcgatcaactgacgtcatccaatgtcgtaacccggccagaagagatgaaaaaaaaaacatcagatgagcgttcaacttctttctcttcctttctctctccacatcctaaccttccaactgtttcatcactcatagtcgaatgtcgtcctcagctcaagcttcttccactcgtcagcgcaactcatcctccctcttggcaggtcaggattctgacggtgtcgatcacactaccgatgctccccagggaaagcggatcaagcagcagcctgtgacatcttgtacggttcctttttatgttctgtgcttctttgttgattagatgctgatggtgttgagcgtatttatgtcttgcagtcacaagcaagctcatcttggttgccatcgctgtcacatccttctacgcatggtttgtccatcaacactaacctgtttgttctcgagtctttcgaatcgtggtgactgactgatagatccttctctcgggtgataccgtatcttcaggcgattctctgttcagtccgctgaggttggtggttggtggaacttgatcactggacataggccggtaaacacacccatcgctgctgttggtatccattcaatactttccctttcttgcatgtttgtgccctttcgctgacttgtgtgcatacgtacttatgatctcctcttggtttgtcatctgcctttggtagcagaaagccgctgcctcagcagctgcccttcaacatttctctacaggctctgccggatccgactctcgagctccttccggccaaatcggtgtcgaggaccaaatcatccgactggctgactcccttggtgtcaagttcgtctcatctcttctttatattttacatcttgatgttcttctgctaaaacaaattccctctgtatttgtcaaacacaaaaaaaggcctcgacagttgactgaagctatcgcccctctgctccaacccgctttgctctccaagaccgattctgccatccacaatgacaagaccccggaagagattgcagctgaagaagcagctcaggcttcggcggccgagacggctgcccatgccgcaggtggagttctcggtggggtgggaacgatcttggatgctctagcggattaaaccgcaagatcaaacgatcttgcgttcttgtgtttgtgcgagcttcatccacatccttcttattatctgtatcgtcatggctttttttcctcattcagtacatctttttgttgtctagctatccattgtgtctgtagattgaatgtgatctctcttgcttgagcttgtatttgtcaaggtgcagagtcgtaacgtcacatcgatacgaaggcatatctactcagctttcctccatccgtaacctcattctgaccgtgatccgaatcccaatctctgttgaatcaacccaagtccaacccactctgtgcctatcatcgttgttctcgtccagacaccgcttagaccgcctcctccggcactgcctaagaaactaaagccaacggcgaataccaaaacgacgatagccagcctgatgcttcttcctcctgtccctcgtactactccaagacgtcgtgcttgagcgagaagcaaacgaggcaagaattcacgccatcgggttcctaaacggcctgctatagagccaccgccaccagctccagggttacctgccgaccggtttcgatgaccgaccgttcgtttctccgatccaagtgctgtatcttcgtcttccgaatcggacaaggaaagtgaggaggaggaacagacgatacactcgagagggcccagaaggatttgctcggcctcttgaacctcatctgtgttttcgtgcccgggtttgtcgtcgtcgtcgtcgtcgtcgtcgttggcgtcagagctttggacactatcggcaacaccagccttgtcggatcccgcgtgcgccatctttctggcccattcggcctcgtaggtgaacacaacagattgagggcccatgaaagtgtctagctgaaggtcaggacccagaacagggaaccgtgtttgaagtcgaatcgttcggtcaaacaaatctggaagagagataggcaacaccgttgatttctctgtgggcgtggatagtggtgatgtagctggaagagggttggaagagggtgtagaagagatgaaagggggcagttcggacaatgtcgagtgaaggattccggggtcttcagccaaaagttctttcattgagagaatcaactcttttttcgacaggataatctaagaaaacaccacattccgaggaaacctgatgttgtcagaaacttgctgattgattgattgatcgatcgatcgataagttgaggtaagagtgagaaaaaaaatactaacagctactgagaggtaaacgacaaccaccgggttgttagcaagaaggaaatcaaataataattgtatgtgggggaacgagtcgacgtcatgggagaaaagcgtaagaagccaagacagggcaaagaacgggaggggtgttgccctaaaagtagagggtaagaaggagaggggcaagaataagtgaaggttcaaagaacgactcaaaaatggctccaagaaaataagcaagataagaggagcgtagacaacgtactggttcacaattctatataactctggatcagccagtttgaggagtcgtttcatcactctgtaaagttaggaacagattcagaaagtcgtccacgagaagaacacatcatatgagagacctctggctggcccgtctgaaactaaaagaacataccgaagcaaacccatgaccggctcaaggcctgatcccatgccatctctgattctgaacaagctgactctttctaaacagtctactagagttttgattgaggtagggtctaatggcgtctctgcggtttctgctggctcacaaagacggacgtcgaatgtagaaactggatctgatgaagtctgagtgccatcaggtttggatgcagagcgggcacaccgagcttgggaagaggatcgtgaacacaattggcggcgcgcaggaacaaggcatcgtaaaggaatgaaagttaggagaaataccgaagcgatatcgtggtagccctaagatcattgtgagcaacatgtgacattcaagtcagcaggccaaccatcaggggggttctcactacaagagtaacgtgctgacctgaaagtatcgcaaaggccgatggcgtctgagaactgtcacgatcaacgcgtgaagctctgtctggagaatctctcggtcgttggcttccactgggggatatacaacgaagcctctccgagtgtcgagcttgacctgaccttcgtctgggtggggttctaacgactcgccgtgctgagaggcgaaatgtccccatgtgactggcgtaggtgtctttgaagatgagaatgtctttggcgaacatacgcctggttcctgagttaagggctgaagggaggacgaaggaagggcctctgatatgtcaaccgagccttcaaccggcgaagaagatggagtttcatccaagggggagccgtcgagctcattgagtgtgattggagttgtcgcatgggtgtcaagagatgccgaatcgacgatcggtgatgctaggatagacgtccccagctgtatgaactctgagctgtcatctgcaacagcatcttcacagctatcgtcaccaccgctatccaagcaaccacggttagactcctgactgatagagtctgccaacgaagtcatcgtagattcagaagagtgaatccagctctctcctagacaggatggcggattggatagtgcgctcgaagtagaagccagatcggattgaatatcgacaggcgaggcaggacgcgaggccaaagcgacggacggctctacttcagacgaaccaatagaagaaacatctggataaacacctaggagaaacggcctggagcaaggacgagattgttatgatgagggtctatccattgatggtcaaccgagagcatcccagagggacggtagaaatcaaaggaggagcaagagcagacttggacaaaccagacacgtttgcgaatgtcatcagtgagaaagcctccttctcgagctgcaaactgacggagagcgagcacatcctctctctccagtgcgtctgatataagctgtgtgggcgttggctccatttagaatgggataagatctgtctgaaagcggtcgatggtactctgatatgctgttatgccactatctcggtgtctgggttagctgatggaggtgatcgactgaagcggcaaatgccgagtcactttccatattttatttccgtctttcttgccttcaccataaccatcgccaccatcatcgcccatgagtagcacttccacttggtcgccctcctcatggaggtcaaagacagtcgctcaggtgagcgcccgtttctgtctgggtatgatgagatctagctcacaatcatgttctttaacctctctaggatgtcgtttaccctgatcagtcaaaactcgataggtttgctttcactcccgttcttcttttttcttttctttttctttttcttgtcattcgccaactgagaccttttcatctttagtgtgctcaacaagcttaagcaccttccacctttagtcaccccaaccgagatccttcgccttcgtgctcatctggccagtgtatcgagaggagagagctttttactgcagggaggagactgtgcggagctgttcgactattgctctcaggcaagccatgccttccattgaattcgctcataatgccgtcgttctgatctgttgaaccctatttatgcgaatccgtttgcgtgtatttcaccaggacccgatcgagcacaaactctcactgattctgctcatgtcgctcatcatcatctggggaggcagactgccggtggtacgaatcgcaaggatcgctggacaatatgccaagccaagaagtaaggccacagagtttgttgagggctatggagagatcatgagcttccggtaggttcattctatcttagcttatcttttgttttgtcaataccatcgatcatagacaagttgccgtcacgaactcattactgaccgatggcgtctgtacaacttatctgcccgatcagaggagataacgtgaacgggtatgaaccaaaagatcgagcgcctgatccagaccgacttctagggtgcgtttcccgtctcttccttctatctatcatccgttcatactatctgactgtaagacatcgacataccttcgccatttatagagcctacttccattctgctgccacgctcaattacatccgatcccttctctcctcttcgtttgcctccctatcgacacctacatcttggtcgttctctcacgtacggtcacctacgcttcaggcagaattctccgacgtaatggaccgtttgtcggacgcgcttggtttcatgcagaccatcggagcagacctgggcggatcgatcgaaggagtcgagatattcacttctcatgagggtttgagccttgaatacgaagaatgtctcaccaggtctctcaaaattccgatgtcggcggaggacagaaagagaaaagatttggaggaaaaagtgaggagaagaagagaaggttcgatcagcccggtaagaaatccagtggaggaaaagaaagcatactttaacgcagggtcccattatctctggatcggagaccgaactagacagatcgacggcggtcacgtcgaatacttccgaggcctagaaaacccagtagggatcaaagtcggaccgtctatgcctgctggtgaacttactaggttgttgtccatcctggatccagagaagcaaaatggaaagatttcactcatcactcggtacggggcgagcaagattgaccagttccttccggctcatatagatgaagtcgaatcatccggtcatcgagtggtctgggtctgtgatccgatgcacggtaacaccaagacggctgagaattcatcgctcaagacgagagctttctcagacatcattcatgagatcactcgatcaatgaagattcattcagagaaaggatcgaacctcggtggcgttcatctcgagcttactggagaggtcaatgaggaagggttctctgtcaccgagtgcgtgggtggctcgatggaacttgccgataaagatctatcgaccaactaccagacgttctgcgatccccgagtacgttctcatctttcttttcctttcttgcttgtcaaactcttcgatccgacgtgtccgtgtcgatctcaataaaatcaaacgaaccactaattaacattttaaaaaacatatacgtcgctttcaaaagttgaactacgaacaatctctggatgtggcgttcctcatatccgatcacctccaagccgctcgaaaaggaagagtgtcggaagaacgtctcctacatgctctgaggggccgagtcgaggcgagagtcgagagaagagcttcaatggcagcggcggcggcggtggtacaaacagagaaggaaaaagactcaaattaggaatgaggtgaaatggaatgagacggagattcgtttggatcaatccatatctgtactcttcgtatctgacggggaacgtaagaaaatgtctttacattcttgatgtttcgctttcatcttgtcttatcttggtcatctcctatgattcgaactgagtttacatcaatcttgaacagaacggagaggaaggaaacaaagaagaggaggagagagaaaaggagacgcaaagaaaaagaaaaagaaacgaatcatcaaagagtccaatcgtcagaactaaaacgacagaacggaatcaggatgcctgaaacaaggattgaacttcgctcaatcttcttcttgtttaacttcgattcttcctcgaacttagaaagacagagatggaaaagaagaatagcagaacagatcgagattgactgtgacatgaagaaacggtgtttacgtcgcttataaaccaaagcagaggattgagaaaggaagagaaagaagggaaccaggatatgagcagggcatcatagcatatctcttcagacttgatgagtcaaaagaaaggaatgaaagatatgagacgataaacatgatgaaaacaagaagcgagagacagaatgagggtaaaggcgaatagtgaatgttggatataaagaatgaatgtatggaacgtattataggactaaggactctggtagaggaaacgtgaatggttatgccggtagagaaaggagtagaatctgtgaaagaaagagtctgacagcatggtaaaaaggcgtttgattgggaataaagaagaatgggtggaatcaataaaagcttggggagaatcacacaaacatacaggcacagaagacgagaagagaacttgagagagaaaaggaaagaaagtgaagaggaagagaaagcaaagaaaaaacaaataacatttactctactctatgagagatgcaacgaagagatcacccggtcgagctcatccgtcggatcattgcctaccaacaaaaggaatttcgtcaaactctataatacttctagcttgtctctcctcacacaaagaaaaaacctaccatggtagaactgttcttcgagcgtcccggggaacaaacttgatcgagccgatccgggtggggaaaacccacctgatccgttgaccctagcgtttgagctaccaggaaacgagccaacagagtacacactctgtccatgcccctggtgattatgatggaagctgttgcggtgattatgggtatgttggttgttctggtgattctgttggtgtcctttattgtatccagcataagtcaaagatgtcatatctagcgactgtgctctatttgagccagatcggttgaccgaaccgatttccctcatctttgcagccaacgtcgagtcggagtctcgcttcgaaatctcttccacaggcgatcggggagcagacgttggtacaggaggcggaggcatcgaagagaggatggtggataatgtaggttgagacgattgtgatcgttcatggcccatattagaagccctggtctgagacgtttgcgattgagtaggaatccagaggtccgacagctgttgacgatgccccaacccgttccgaccttgtgttctcggtggctcgtaaggcgtcgaaccgctaaagagcgagttcgagcctccaccacttccaccgagagagactgaaggaatatgcctacttggtcgttctggactgtgtctgatttctcggtcatccgaggttgactgattttggaaagaagactctgtatagaacgtctgagtagagttgaagagtgctttgacgtcttgggcagaagctgctggccggagtcgccgttgaactaaagactcgccttgagtcggcacttctgtttcggctagaggatagaacgccaacaatcgacggctcacgatgagtcaaccaagacacatccgagcaaatcaatttgagggaacgacagaatcgagactcaccaatgttaaatttagaaggaagaagagcagaattgaagtgggagaacgcatcggcatatgaatctggtgcagcgtgtgagtctgaaggatagatcaaaatctatagcaaagattgacaagaggttgagatttaagtaatctgcgtcagcgataaaagtctgaatacaaagagaggaagagagaactgaccttcctagcgagcagatactcttccaatgcatctttggctggtcccaggaaatcgaggtttgatcgttgacatttgaacttgaataccgagtcctctccttgttcctgttggtagatcctcgcaggtggcacaatcgccacttgagcttctctgttgatcctctcaattagttggacaaactctggggttcccagcacagaggctaattccatactgaacgggacgtgtagatcggcttcgaaagggacatggtcgagcaacatagcagcagcgatgtgagcctgggattcaggtccatagatcgttaccacatcagacgcggtctccttgtggggaaaacggatggtcgagtttgtcttgctttcgatgtcgtgaatgaaaattgatttttcgccaaggagcgtccgatgatatcttctcgggatcgataccgtctctacaatgtaatctttatccttggggctgacgagctccatgacagactgtttgagctgctcgagattcatcgcgttcttcgccggtgtccgagccacgacattgtccgtgttgtcctcatagccacccaacaacgcgaattcctctgcgttcgagaacttgacgtagactgagagagggaccagcagagatagggcacgatcagtaagtggcccttcgaatagagaaggtgagagaagtacaagaagacgataaacttctccggactaacctccatacttcttcataattcgctgaatattctttcctccaacaccgatgatccgcttgtgataactctcgggtacatggaacgatacttctgccggcagctcctcctgaagcatcgacaatccagaaagcgcatccgtatcatttccagcgaggtccatcaagaagttgtagtcgttaaacgtctcaaacttgatcttgacgttctccatcttcatgatcttgttgatctttccgttcttctttccagagatgaattcgcgatgctcgtttgcaagctcgatctgaaaccgaatctctcgatgaaagttctgatgccacgaagaagaggagaaaaaagattaggacgaagcttttctatatgtccacaaggaaaaaaagaggagaaaatcaagacgaaaagagtaccttgacttcttctagatcgagtgccatccccacggctaacctgacgggaccttccaagccgtggaactcaaaacaattactcttccaaacgacctctgcacctgaagcgtttgcgatgtgcaacaacgccggttggatgcctatcgggttgatcgagtttgaaggcatgagcacatcaaacgaaagtggaagaagccagaaagaagcatctaagaattgacaggcaagtgccatgacggatcggatcgtccgttcgatcacgactctggagtcaccaaatacggtgatcaagctaccttgactgccaagggttggaaattgaatgaacgttccgttgtcaatcatgatccctcggacttcatccactcgttcggtcgccagccagtccaactttcgaggcaagatcggagtgtctctcgaaatgatgcatttgctctgtaattgagtaaaaagagaggtgatgagaatcgatgacaaaacaaggaaaaaccctaaaacgtactctgatctttccaccagcgatctggtagatcatgtccctagctctctgaacaccaaagaactcgcccgtgatccagatcgtattctttgcttctcctgatccagatccgggaccggtcatctgagcggactgattagattcccacgggccattcccattcagccgaagcgctttctcaattccgcctcctggggctcttcctccaaccggccctggaccgatgctaataccgacaccggcaccggcaccggcactgactgctccagggaagccagtgtatcctccttgctgctgctgctgctgctgctgtggagacggcccgtaagggtttgaatacacagaatacgcaggataagac

SEQ ID NO: 1894 - DNA, 23171 bp, Xanthophyllomyces dendrorhous
ggataaggcagcatgtttctgtgcggaggggtaaaagcattcataggctgtgaatgagcgtgagggtgtaacgacgacgatgccggcgaggaagatgccgacggctgcggaggcattgagagagggggaggaggcagatacggcagattggtccgattgtgtcccggttggaatggcctcacgtttgattgttgtccgggcggaggaagagggatagggccaccaggtccaccgaacggacggacgagcagaggagagggcatcgatggactaggcggaagcgccgagagaggcgaggacggtggcatcgaagaaggtagtaaagagagcgaggcggtcgggaaataaatgttcgtccctgtttcctcctggatggtctgaatgacctgtcgtttccgaccggcgatgattgaatgaagcttgtagtcgatctcacaagaggccgaatgaagtccagtctgtaaatgtgcgagatcaaaagaaaatcaggacgctattaagaaactcatgataagtaaaggtgctagacggaaacaaaacttgccaattcgtccagaaaaactagcaccctaactttggccgcgtcaaccgagctcgactcgccctcgacgatgatgccacaagtgcgttcggtttcaagtccaaaagcctgtttttctctgctgtcctctgacataccctgtgctctggctgagttgccgagggctgaagaggccgtctggtcaaatgaaacggtgaccgaggcacctgtaagtgtggagatatcatctagcctggcctgaacgcctggcttgaaactatcctggttgatgattgctgccgacggggagtctaaaacgtctgatcgaggcactttgatccggtggacaatcgatcgttggcagtctctgaggaaggcgcccttggcatggaggacctgagcgtgagttccagatatgaggatgttgtaccctctagtctgatgataagactcgtccgcggaccgacggggcgagcggggctgattaggaaacggatatgaaaattgtgtttggggctgaggctgagcatacgcatggcctgcgggctgacggagatgagattgctgaaagctaggataatgaagcagggaaggcgaggtcgatgctactgtagtcggactagcagaggacgggggagatgttgaggctggaggattgttgctgttactattactgctgttgtaagtcgtcgtagttgttgtcggattcgtcactctggaggctggagtgacagtgagcaagcagccctctctggagccaatctctgaagcgagtcgttgaagagcttctgtaggtgtttgtgagctgccatccggtagattggccgaaaacgggatgagtggtggggatgagaggaagaaggatgtagtaaagagatccatgttgagtaggattcaagaagagtgatgagggataagtgaaatttagaaagacaacgggaagaaatgcgacgtgaaagggcacaagaggaagggggtataagatccttccaagaaaaaagttgtacaataaacgcgaatgaactgaggtggggaaggtggatagaagagtaagtcaacccaaggacgtgaatcgaacggagaagagaagaggaggacgtatacggactgaacgatgggatacgagaggacgacctgacagtccagacaagaagagagagcaaaggagtgcaagaagagtgtttatgcaaagagctcagagaccaacacgggtcacggaagcaaaggcacaggggtgactgaaccaaatgagcaaaagacacgaccgtccagagtagatgggatctcggcctgttgaatgaattgttttaacagcaggacgatcgtttgctgatggaaacgataagacggcctgaagacaaaccgaaggaaggcaagaaaagaggagcgagtgactgttggtgttgattatagaagcagcagccaaggaacaagagggaggaatcggaaagaaacgcttggacgatgaggatggatggggtataggctgacgttctctcttgctgttcctcttctaggaaagaaatatgtcgatatgagtgtacgtatggaagagtttactcttggtttcctcctcctggacaagagttataggaacgggataaacggaggaaggaaggtagtcgggtgggtaagaaagggaacaaactcaacggggacggatggaacgaagacgagagatggaaatcagaggcgtggctgtatgcgcatacagctcagggctacgaattttccttattgtcgtctgtaatctgacctagtcatctttctagtaatttttctcaactgtttttttgacgtggtacacctgaaatctctgtacaggtccgttgtgtttctgtgcggttctttgcatcaccttgtagcatcgttgttgtcattcataagatcttgttgtagttctttatggaacctcgtcatagacgtcttgtattttgttgtgactcctgaaggaggtatggtgcatcatctttgacagtgtcttgcagatatctattaagttcaactctattctctatccagctttgtcgtggtacgcgttatagtccgggctgaaagtctcttgatgggattctcttccagttcttcaaacagacactctgctttgcctctctctctctctctatcgccaatctcatcctgtccaaggatgtttcgactctgccgaatctctccaagtactcacatctcatctgcagagtatttttccatcaatatgtctgatgttcttaggtacatcctagtcgtgttgtcgcgtctatttctttccctaaccattctagtctctaccgccctgtcgtgtctccaagttaaatctcgtaccagctgtacatcacgtgtgagagaggcgattacgttttcgcctacgatataattcataattttagcgtaattacatcgtattatggattgtaaccatacagatgaccacacgtgttctttctgatctctatccatctatatctctttcagcctccatctcgaccccgctctctctctctcttcagtcattcttacttaacacacttgaacatatagacagtcatgtcctacaataaagcaggcgtttatccacccaatccggttactacaaggttcgttcgataaaatcgtgaaggtttccctatactcatgactgataaccgagtgacctacaaacaaaaacagaggccgggcctgtaagatcagctcggatggtaaaggtgaaaagctcgtgtacgttaacgaaaaggccgtcgtggtgagtatacaaccttgcaatcgtcgatgttgggttctgaaactagatatctcatcttcttcgctcattccctttccgaccgaacgtcctagattcgagacatccgcgtgcgttcttttcctccgacggacattccatgagttgcctcagtcctaaccttattagctcctcataaaacataaataccatcccagaacctagcacagtcgatcacgtacactcaacaccttacccctccgactatcgcaagactctctccctcaggctactactgcgcgagcgccgatgcatccggtaccgtccgcgtttgggatgtcgccgggtccgatcagatcctcaaactcgaatccaagtcgcttctcggaggaagggcaaacgatctcgcctgggattcggagagcaaacgtcttgtagtcgtcggtgagggtagagaatccttcggcaaggccatccttgtcgacggaggcacttcttgcggtgagattagtggtcattccaaagccatcaacgccgtcaccctgcgtcctaagcgtccattcagggcggtcacctgcggtgatgatggaaacatcgtacttcttaacggagttccctataaattctccaaggttggtctttccttcataaggtcgttcatcatgcgcaatactgtcatcccatcagcttacaccctaagctatacggacgcctttcatgacagattatcaaatctcactcatccttcatcaacgatgttcaatatgcaccctccggagacgtctttgcttccgttggtgccgacggcaaagttttcctctatgaaggcgccgagggagatatcaaaggagagctgagcgcaggagcgtcctcgtcttccctggtgagttttctctcggtttttgtcatttgtagttcatcttgctgatactttatgatgtttctttctcccatttctctcctcctttaatttcaacacgactcagtatggccttgcattctccccagactctgcttctttggcgacctcctcagcgtcgtccatcatccaactttatgacccctcaacgctctccgctaccacctcgttcaacctgtctttctcttcctcttcagatccttccagccagcagcttggattaacctacctgactcctcaaaccttagcatctgtctcgctctcaggtgcactacacatcctcgatacacgagagcctgacagaaggacgtctctcttaggcccaaccagaggaatcaccgctactggtttcgtcaccggtgagaccgaaggaaccttttgggcaggagggttcgacggcggagtcaaacggctcgaagagaacacatggaaggacgttgtcggagttggccatggcggacagctcgtcggatttgctaacggagtcgatggcgtttggtctgccggctgggacgattctgtcagagaggtcaagcaaggagaatactcgttcgctcttttcttctctctctcttgcccttttctccggatgataataacatatcattatgttttggttatagatcaaatactctcccgacaggcgctcagcctacttccatcgcctccctctcagcaaaggatctcgtcgcagtcagcacaggtcaggcggtcgatgtgctcgtcagcggcaagaaggtcgcttccaggtcttttgagggcgagcgcgtactaagcgtcgatctagcagacggcctcttggccgtcggtacagaggtttgtcttttcgttttcgcttcccctttcctctttctctttctctttctttttctttttcatactgatggagttttcggtttggtggcgcatgaatctttcattcgttctatcgcttcccgcgcggctggtaggcaaacaaagtttatgtcttcgagttttcaaaggaagcccctgagaaactcagttctgcaaacccaacgacgacgttcacagataacaggaacccggtctatgtcgtctcttttaatcctgagggaactctactcgctgctggagaagtaggtcatcgtcagctctcttttcgagcggttctgacatttgagaagctcatcaatgctgttcaacacgtccggctgttacacacacactctctttgttcagtcaggaggaaagatccaggtgtacgacataaccggacgtaaagtatgtgtccccacctccttatctgtctatccctcatttggaaagagtttctgatattcatgggtcgaggacacgtagatcaagatctcaggcagatggggttcgcatacaggtcgaatcacttctcttcgatggacaactgacggtaaacattgtgcgagttcgagcttggacacgaatgttttcgtttggagcgtggaaagaccattgaggtctatcaaaatacctgtatgattggtttctcttttcgcacttggtttgttgatcttctcctcagtcgactgaccggctggtacaattcaactcactggaaacacgcaacagaatgcacatgcaggcggagcgacaggtgtggaatgggttaacccatcgcgactcgctagtgccggatccgacgccaccgtcagattctgggacatcgtcttccattgagaaaaacactaggctccctctctgctcgaggatcaaccgatcctcgagcagaacccttctgtcttccactgtcgtattgttctttctctgtatgaatcttattctgttctttttttgatgagtagtcgaggcaagttaggagaggggtccgcattacatcatcgtcttgccttatccattgtctattaagttgggtttcgaaatacaaacaattcaggtcatcatagattttgcatctgttgagtgttcgattatcaaaataaataacaaaaagagggtgaataacagatatgacactgggtggaggatcggatgaaggaatgaatcgaaggggacatccaatcgagataataaggatcgataatccagagacagaataatgacaaagagggaaagacgacaaggataggggcatagatggggaaaagcgtcccaatagaagagaagatagagtttggaaactagaaactgtgtcccgaataaatatagaaaaaacgatgaaagagaagaagagcgaggcaaacagaaaagagtcgcagaaagtcaatgtggttcttccttcaaaagaagtagatcctcaatgaacctttaaaagaaacatgagcggtcctacaatgacaacggtaaatctagaagtttctgtctggatttattcctgtttaaatccctcatagatgcgcgggtcaatcaactgagcgataagggtttcaaaagaaccttgaagggagataaggagggtaaaatagttaagaaagaggaatgatttatcgtctcccacctttgtttttttgaactcctgttccccagaaccatcataagatccataatgccatcctttgatcctcttctccatcctctccgccctttttttcccgttcttctcatttaggtatcgtgtccttgccagacgagtttcgtcttggtaatttggcccgacaggcttcgcaagatttttgacgaatccgacgtcatcggcgtcagcgacgccgacactgaaaagctggatcacgcagagaaggtggaagagcgaggacgagaatggccggaaatacatcccttagatctcccagagtcgatttctagaaggtcgatatcgaatcgttaatcggttgatccatctactttcgtcccagtcggctcttatactttgatacctgataccaaaatacattacataacaagagacaaacagggcttcttgttttttttctctctttagacttggatattttattcaacttactccggttcagtcagtattaggaacacatcagacgaaaataatatcggacggagaggaaatacgacgtggctgttcgatcagttcacgtaaagagaaagaaaaagaaaaacacagataggaagagaaaggaggctgtgagcaacgcaagtgaaaacggtcggtcagggcgtcaattcagggcgcttcgttagtccgatgcttccccaacttgataagtcattcccagtataatatacatggtaatccctttttattcgtttagtcgactttgaccgagaagctctggaaaccagaaacatattcgccatccttgcctctcacgaaaacaccgaggcgcccttgttggatttatgatcccaatcccaaactttccacttagcattgaacctatcgtcccaagtcaagggtgagttctttttcaaaagctcgtaacctgctagatctcctttcgctcgtctctctctcttgatctggccttcgaggtactcttccagagagaacggagggtgtcgttgttcggcatcggtgggttctaataaaattcagagacaggtaagaaggtgtgaaaccccatggagagagcacagctttcattcagagagacgcaaagagacaaacctcgagttccctttcgcagctcccaaacggctttcaacttgggtggtaaaccttcgtagtacgtcttcattcgttcttcgacctgttttggcgtcttttcaaaattcccgggtactctccattcaccatcctccaaatcaaaatcaagatctcctccttgctccttcccgagttctactagctcattcgttggcccttggaaatctctactaggctcttgaaggatgaatgccatggctgcctcagcacccatcttgacgtccgctcgggtgttgaaaaacgagaggatcgaccgaggaatcgatgagaatccgagttcgggatgataaggaatcagaatcgtcggtgggagcggaggaagcatcgaaggcgcgggctgaagaggagggagttcagcagacgtcggcgtctgaaccgcgatcggcgaggtcgaccgaggtggaccaagaggagaaaacaatgacgaaggcggtttcgaagatgcttctggaacttcaggaagcgaggacgaagaaccctcctggtctttcaacgccggatcctcgtagatcgaccggtcaagcttatcaatccaactctcgtctggtcggtcttcgaaccaacccttcttgagaccatcaagatactctttaagagtgtgtcgaccgatgatcataacacccccgtcgagttcgcgctgaatgagttgctcgggcgagagctgggttggtgtgcggggttgaaacggcacagaggatgaagtagatcgaatagtacggtatttgttggcaagatgttcagacagggaggtatactcagggagagaaggaagcgtgtaatccactgcagcagccactaggtagggctaagagaaagatttaggaggagctatgagtcaacgagccaggatgaacaaagcacagaaacgaaggaagcaaccaactttgacatatcgtttccaccaagcggccgctttgccttcttcctcacccggccatctggacgcataaacagtgcaagtcctgactccaccaagatgaccatcttctaagggcttctcagctaggaatttgactttggcaagatactcttgtttgatggcctctgccttttgacggtcatcgtaccaaaagtacgtcgggatggagacgatggctgcagcgatgaaccaacctttgtgaggtagttttgacggaagagtcggcacgatataagctggaagtggttggtttgccggtggcttgggtaccaccgggggcgtcggagtaggtgtcgccatggctagtcgttcaatgcttgctgttggtgatggtctagatggtctgacgaggagaagttgagtggttatgaaaactgaaaaaactaagaattcataaatgtattcgaattttatataagtgaccttatactttgtgaggccccgtcaagtctctcttctacctctcatctgttgttccatcgccatcaccatcaccatcaccatcgacaccgacaccgatatcaccattagctctcaactagtcatgcttagaccaaacactctcgtcaagatgtatagaccagttcttttcgttccagtctctccccagcttttggcttcacaaaagagatttgctcacggattcaatgagcctaccggttaccttttcggtgaaaaggtctgttttctctggtttatcaatctgattcgttacactataatgtatcgtttgctctctgctgatgagattgtttcttcgtttgacagcctcttccaaaaggccaaaagagacagaaagagtgtaggtcttggattcatcatgtctggttcttcaatgaacgctctgccctactgaattgaccctccttttcgtgatctcttatacctctcctgttgatgattagtatgggaatacatcttttgtgagcttcatcctgtctattcctcttttcatcataaccacaactcctgagaccgctggcatttttttttttgaatcactcataattggaatgttttgcaatatgaacagtttggccgatgataggtggtgcggccgcgttctgtactctcaattactactttggaggacagtcagtcaaacattttcctacttctatctcatcgttcacttttgaatgagaagctcagactgaccatatatctaataccttgtatgtgtactcgtctttctctttttcttttttggtaccgatttcatttgacactcgtaggagacgagaatgggctatgaaagaggctgcgcgacgattgaaggaaagaggcgaataccccacctacgtatgtccgtttcgggttgtcttcccatttctgcatatcgccttttctatgtgtgctgatcgcgagttatcaaccatcctttcctccatccgcttccattagactcccacagtgccggctggagtgaactttaaccctcctcatccagacaaacaataaattgaacacgctcccattggatcctgccagttgatcctcttctgttctcatcttacagttgcctctttcttccatcatcaattttgccagtgttttgtgtctgttcttttattcttgtatgggctatgtccccttgtgttcttgccttatctcttgtgcaaaagttattttttccatgtcaatcccatcgtgatggtcggtaggttgattccctccgctctagttacatcttagttgacacaacatgtttcgaagattaagcatttagtgggtgagaacggctaactaactgacgcattagagaagaccgctatatgctcatcaagcgacacagtttggagtgctcgcttatccagcttactgttgtccgttaatcctgatttcctccccttgtcaagtccttatcgcgttgccaactctcgcgagctctactttcagcttcgcaacgttctagtagcttgcaatatctttttttcgtacgaccagatcgtgatacagaacatagacaggaacaggaacatggatatatcggtcccttacagcctccccgtccctctttctctttccatatatctcctgtcgttgcttctcaacatccatcctctcgttcggtatccttctgtgtcacacactcaccgcctttcatttgactgttagtgaatacccttatcgatcaactatcaagctcacaactgtgcccgctaccgaattttcccccatagatctgtctgcaaggccaatccgatagccggctcctgacttctctcgtctgaatatacaactacctatgacatctttgtttggaaaaagaaaggctgccctgtcggccaagaagtctggccagactgaccaagacccatatccacatagccaaccctccacacccacacctcatcctcgacctcgatcaatgctccttcccatgttgacccaacctccctcatcctcccccttcgcctcttcgacgcccacaggaacgttctccaatgccctgaagctcttttcaaggcgaaggtcgttatcggcgcgtacccctttggaagaatcgaaagcaagaccaagatcgtctctaagtaacgctcctcagctcgagctgaatttcaccgatttgatcaatggtcatcctcgagatggacataccgaagaatcaccggtagaagaagaagaagatccgggagagaaacaaaagcgggaggaaaggatccttgagaatatttggttcagagaagaagaagtcagagagttcttcgatatcgtagggaaggcaatgaaaggaaaaggtatgttctccaagtctacaagttcctttcggttcgatatactatttctgttgcagagttgactcaggcaccgttgttgttttgtttacatttttcccttgtcaggaatcgcgacccctgggttatttttaccacacagaccctctcagtctccttccatccaacatgcgctcttgatttattttgctcaaacgcataggccaagtctcttttctctcaggtcatcttcattgtcacttagtcagcctagtcctcaatatctcttcctcactgagctcaaatatgcgcttaatgtccatgatcttgcttccgtcatccggttctcgctccgccatctcgattcatccaagggaatgtcaagacgtgctttgtatgatacattcgcggtttctgagcgagaggctggatttccctctcagagctggtcgacatttgtgccagaaggagaagataaagaactgattcgttcagtcttggaggtcctgatgtccgcagcatcagtggtcgacacaagtggggtcagtatcgggaaactgtcgatgatcatagggttttgggtgtttcgaagtagaggttgggctgtcggagaaagagaggcaagaggtgtcgaggagttgtttaaagagtgggaaatttggggaagaagactggagcatctccttctggcttacatcaggtcagcctcctctcgcttttgtgaggtttctgattgtttgaagaattgctgatcattaatcttggtcttttggtcgttcatagagatcaagcttcccgaatgcaaattcaaacccgacttctgcctctgattcaatcctacccaaatagctcacgtctcgctcagtcccatttgactcagacctcctcgccaaaaccagcttcccatcgccagccggatgctgccccttctgtctctggtttattcttaactagtcaccgactcaagcgagtgttgcatcttcggatcagagctgcgccttgtcggaccgtgcccctccttgagaaggaagtccggacaagtcctgtccaattaatcaattgggcagtagaagctagggtagaaggctcttcatggtcgaatgcaaaggcaggcccgcagcggagggaagaagaagaggccatggggatctggattgagatgagacggcaggcgagggaagagaaggagatgagtttggaagggatctttaccggggagacgatccgtatcttaggaataacttcggacaaggtgcagatttccaaggacagtagtgatactctatccacgaaggagaccggacagaaaaaagtagaatgtgaaacacacgaactatacagacccttcggggctagtagatcctcgtttgcattacaggatagcgtgaaaagtcatcagaagaatgcttctcctttagtaactctcgatcacttgaagtctacgccctccataaaacgaccagagctgaaggcggagacatggacggatttctctctagctggatttggagactcacctggtgttcccttaaaaggagagatgcatcaaggtctatttcaagacgcaagtaccaatttaccgtgggaggagaccttaggagaggaagaggaaggctcgaagaggatcagtgcgcggagcttagacatggagaggatcatgagagacgagtcggttgagacagctaggacgaatcttctgaagttggatgacgagggatggaacggagcgatggaagtggctggagcgtccatgttggttagtatatggccgcctcttttccctaggatccaaactagagcctgggattgacctgaacttggaatttgttgatttttatcctcatccttagaacatggacgaagctttcgtagagttctctcaggacattcaacttgatccgggctcggtttctcaaacgacgtttccaactttcgcgctgtatgagctcaaggcttcctctttctccccagaatggcttatggtttccatctcttctcttcttccttcaatcggtacccgggctccgattcgatccgatcaagcagctcttactcctatgacttcggccataatgaatctatcagcgcccaagtccagaagacaagcaagcttcctcgaatcgctcactccaaatttctttggtcataagctctctgctcgatcgtctagtgaagagaaaccttccttactcccggctgaccttcctggtcgaaggtctggcattccatctccggagctctctgtgacagccatcgaggtttcctcagtccagccacctccttctaaaccatcgagaaagagcgtatcagacgattatgtcataactgatggattgatcgatcgaagaagtaaaaacatatcgtctgcttcgccatcccctttgctcgaaagggatcagccggtgcttaaagaacatgattcagtactcgtagatcaaaaaataacctcgacagggcctcttcgtcggcttagaagcttcctaggtgggaaaaataccttgaacgctatcgatgacaacgaggaagaggatgtcacaccaaccagaacaacgttcgcggctgtctcttcttcggcgcaggcttctttcccaagttcctggacagatgacactcaggagggtagaattgtcgatatcggtcggacgtcctctcctcatccagtcggactcaactcgaggaccggtttggtgatcttaggcccaactatatctgatctcccggtagatgctgaagaagatacagggaacgaaccatctgtggatatagggaacgactcggacctggcgataatcgccgagatactttctctcgggaaggatcagtcagtgaatactcaagaaagggacagggaaggaagtgtgcagtgggaaggagtcctaccaaaggttgagatcagcccgccttgcgctccatctgaagattctgcagttgatcccaaacaagaaatgagtaacagtgaggagataaacactccatcttttgtctcatttgtcactcctgctgaagatgaggacggggaaggtctagcaacggagaaactcccatcagaagattcccagggatctatccattcgtctgtttctgaacgatcaacccaaagatcagaactcggatcggtagcaacaacagtcgagtcttgtgctgtaaaatcgcctttgcaggctgtacatggaaacattcctcagatcgaagatcttggcagagaaatatttgttgatgatactgttcgtattctgaatctgttttggatggttggtctgacaaaagtattgactaacgtttgattgttcgtcatcattgggtttctcaggtgactgaggaaattgaaggcacgcttggagaagatacgtcggaggtcgagtataagcctacgctcaagcagttaacgttacttgctcgacctcactcaccgccgccgcctctgcctgcccgttcggctagtagggaacgacttgttcggccagtcaaaatgatagcgcctgagatggttcctttgccttctagcccttgatcgtacgatcaatcggtatacatcaaagttgtattttttttcttctctttatctttttaaagattcctcccttacgtgtctcttccttttgcttcaatttggttctcggtgactgttctgatgtctgcgcgtcaacttgttaaactttctttttttgatcaatccctattaaaaatccaatcttagcatatacgtcctttctagtctgttctactattctattatatcatatatgggagcaacatcaaccatcttttctctctctttgtagtgatatacatgctcattcatccaccttttcctccgacttcatgagatagaaaccccaaaattcacttatcatctccaaatccagtgccccattttccagctttaggtccccacctggcaactccccaaaaatgtttctctttcatccgaggagggtcatcttttgagatgtcagtacgaggttgtttgcgtgtccgaagaggcgtgtcgtatgatgcttcatgagcaaagtcgtctggatgaacttggtgagggaccggatttgggagggaagagcgcggaaggggggtgacaaggtccgacgaagaagaggatgacgaaaatgaagcccgaggtgaaggcgaaggcgatagtgaagcagggacggaatcgagcaaagaaacttttggtgcctgagaagagaaacgtgatggagagagagactcccatgtgcggagggagataggtataggcgtccaacgtctggcgggaaggagagggtttgtgagttccgttagtcttgagagtgctcgtttctgtgtgttttattttaagtcgataagaaagagttgtcagtgaaggggcgagagagaagtgtcagagaacagaggaatgaaggacaggctcatcgattaagagaataagcaggaaaaagagacgaacaaaggcaaaccgttcatcctcccctgtgaagattgctaaattcgcaaaagcccctcccttcagtcctgatttcaagcccttcgtttgctcttcatcgatcgcagttgatgaactcccttctcttgtaatcactggctcgctaatggtagactcaggctggtgattttgattgtaaagagagatattgggtcttgtgggctcctccatctccttctgcatctcgctcaacgcttcctgttcgagagaatctctaaggaaaagttcatcaggagtgatagaagatgcgtctgggaagaaaagaccgtgtaaggatgtcaaagaatgaatgtgaagtcttgatcttgattcgtactgttcgccaaggtttccaaaggagatagatggtggttaagctttggttgtacatctttgattgaaggatgtcaaacagatgaaactgacgagagcatcgagcaggttgatcaatcgacgtgcttcattcttcatcgatgtcttgataggtggaatgtctgagacaaagatcgtagagtatgttgaggcaatcgagatgtagtctgccggaccgagggcctacgcgcaaagataaatgcgcaaatcagcgaacattgtgatgaaagaaatgaaatgcgacgatcaaggattcgactaactgtttcacagatctcggagaaagtgaatcgagcaatgcctcccacagtgggacaatcctccagtgtcgttgagcctgatgagagatctggtgatacttgggcaggaacaagaatcggccgattgtacaccaacagtgtcgcaggtgtgactaaggaatgaagagtggtgtctatccggttagagaaaagaaaagtaatatctcggagaaaagcactgatcaaacgtaccctggcgcccctggacaagtcgttcccatttgtcttcccacgctttccttcctgcgtctccgatgttccaacttccacctctgttatcatttgcctgctgatctaatagctgtttagtctgttcaacctctctgtaatcctttcctccgtcgacctcaagaacgtcgcatctgctcttgagacaactgagaaagctttcgatccgccttctttggacacccatagtgtatatatcatctggaatccgattggatgtggcgagtatgacaccacctaggcgccagaagtgagtaatgattgaggtaaacagagaggcggtcgctgggtcgaggatctgaagttcgtcgaatctgttgggacacgatttacaagtcaattactgatatatgagcgaagagaagggattgttgtctgatagattcaatacaaacaggatgagccacccctcctcgacgatcaatctctttgctactctgaatgctaactcgtcatctcttctggctcgctccaccaagcttcctactttctcctcctgcccgtcctggaacttcccgccggcgaagacagtcctccagcctcccttcaaagctttctctgccacaatttttctagcctgttcggtggttccctcattcatggctttgccttcgagatgtaggagtcggtagacattcaacaggaacgcatgataatgccttcttgtctttttctctcctgggagtaagctgaggtgctcaaacgcgagatcaagaaggaacgtttttccacttccaggaggaccagtaagtagaactccggttggggtacttaacgcagcgagttcttcttcgatagataatattcgagtgaggtctagagattcttcaggttgcggttgcgcccggggactgaacggccaccaagattcatttgaaggaggatttttgagaggaggaagaggaggaaggtcatccagtagatatgctggaggtttatatgttgccagtctccggcatagcgatcgaagctgtcaagattgttagagagaaaaaatcagcacagaaacctagtatagggatgagatctataacatgacgttacctgtaacaagatccgaacttggtgatcatcccactggagttctcctctgtggactttatctcggtagatttcgataagatcggttgttttctttatctgtttcgaccgtgaattttctgaaagcttgatgttatcttttctacagaccgctgaagagttcgagggcaaggcatatgttcgtataccggctggtgagcgagattgcctggatagagtggtagaaagagaataagttcctgagtatgagagcactttatgtcttccactcagattacaacatccgattctggtgctaactagcatggtgatggttgtcgatgttgtattggtaggtacgttggttgctcgtagacgagggacaaggagacgatgagtggagcgagcgaagggaacgagatcgatcggaagggaaaaatgtaatctgataagaatgcaatttgcacagccagaatattggtgatcgtggttacctcaacagtaatagccgttacgttgtccatcttctagctctcccttcgttcccctggggcttcatctctcgaatggtggtcctcccagagtaagaacacctaggtgccaaaggaggatcttatccaagcccggctgaaacttacgctgaatggcgcattgtacagacatccgtggcttctcttgtgtatgctatagacggctgacatcagacgtcatgatttgggccacgacgcagagcacgtgtctcgaacgacatgagaatttgcactgcatataacagtaggatattaataggcaaagtatgctgatatcttaccgtgcaagctcatgtaacacctcgcgctggcgtctctttacccccgcctttcctcttgaatgacgctgctcactttggtgtcactcttccagccaacaatgtccggctcaacgcctgcgctggtcaagaggccatcttcattattctcatcaataggcagatcatctcgtccggatcagtcagaccatactcccttttatgcgctcaccgattggcacacagagagcaatcaacagggtcaccatctccaggccgaatttgattccagtgaggacgagcaggacgttgatatcacaaccgataaatcttcagaaggtgacttgaccgccctagagcaaacacttgatgagattgggataggatcttatcgtgagaacatcgtgttcactcatttctagtagagacatgtattctctaaagtgacactcgtctttcatttgtaaaagaatggaaacttctcgtgagccattcccatctttcctatcctaaccttctaccttggttcctgatctctctgatacgtacgtctatattcacaacagatactatgtggtatgggatggtaagttctggtgtttgaaatagagtggtcttatcatgaatcgcactaaccggcgtgttttgttccgatatgtaggctttgtgacgtacgtttgagctctggtgtcgttcagtaatcaaagaatataacgagttctaagcagactcttactgtgtgccctcattgtttctacaataaattgtctcgcggtgtaaacgctcgcgacagaacatgtatctccaagtaagtaaagcagattcacactgtatcagttgatggctgctctccagtgaagatatctgatttgtacatcattagtgtttaggtgcagcttccttgtttggtatactgcttgacattagcccactctcgtcggcatttgcttacccgtcctgactaaaataccatagccatcatccttcctcgtgttcaggatcactttgacgtgcctgcctctcagatcgggactctgacggcgtgtatgatggtcggcatgatgatcgtatgtccatcctctgcttcgcggctcttttgagcttcgtttctcagataatctcgttcggttactgtggttcatgatttctgtcagggtgctgtcgcctggggctcagcagctgatatctggggccgaacgattccgttcaacgcaacactagcgctcaccgggctctttggtcttctgagtagttatgctcgaggattcacagaactcaggatatccgtgctcctactgggctcagctgttggaggatctatgcccaccggtatggtcttttttcttaatcaaatctcgcttcctctgaatcgattggtactccgaaaagaaagaaaaaaccacacactcacctttcaatcttttctttcagacggcacaatctttttagaaaacatgccaagaaaatcacagtacctactcactggattgtctgtatttttctctctcggcgctgtgatctcctccttgataggtctctggatcctacctggctcgagttgtcccgaacatagtccgagttcctcatatgaatgttcagtcgagacagataaccttggttggagatatatgctccgcactctgggtgcaatcgtatgatcactttcttcggtttgcctaatcaacattcgttagcttttactgacttgattcgaaccatcatcttcttcttcttcttcttcttcttcttcttcttcttcctactgtctattcagacaataattatgtttcttctccgcctttttgctttcagactgtacgagtctcctcgatacttactcgccacacatcggaaaccatcatgcgttcaagctctctgtcacatcatttcggtgaacggtcgtccggatctcatcatccatctagaaacctccgaggggcgctcaagcaatgatggtcagacaggattgaataggacagcctcgagagatcaggaggaggttgggagaagagaagcaaactacgtacttcacaaacctgccggggaccctgaaggacaagaagccggacggacctcgatcgaacacccagaaagagggcaattacgcccgtctgataggctaaacagaccagggatgatcgttcgcttaggaagtcgatctcctctaaggcagccgagtgaaccaccgaaaaatggcagaggtagtggtgtggattggagagtaggttggagaaagacggtgaagaagttgaaagagatctggaagccagagtggaggttgacgactggattgatgtgtgtcatctggggagcaatgtctctcggtgtgtagcttcttcacatggttctctcagttaacaagtcttctctttctcaactgactctaatcatggtacccatcgatgatcgggcgaccctctcagcgtacactatgttcaacgcattcttaccaatccttctagaagatagagtaccagaagactcggcgaaaggtggaaggattgaagcgttgcaggaactggtgctatacaccctagctggctgtccaggcgctttggtttgtcgctttccgtttcataccctgaccattttatcctcttgcgagaggagacttattgtctgagatctcccctttttttccagattggggcatacctcgtcgaaacgacgtttggcagacgaaagtccttagcgggcctgaccgcgcttacatctttggccaccacgctcttctcgctcgtcagttctaaaagtggagttgtctggagctcatgcgctatttcgatctctggtacagcgatgtatgctgttctttgtgagtttcttcttcttcttcttctccttcttctttttcttcttcatctcatgaggggtggataatctataatcgaggtctaatcgaggcttggttgaatggcttgcggaatagatggtatgactccagagatattcgaaacggacatcagaggaactgcttgtggaacgagtgctgctgtatctagattgtgagatctcatatttcggttctgtttctatctagaccatcatctgttcgctcacacgctgttgatgatggacgatcatacagagcgggcatcgtcgcaccgctccttacgggaaagcttctttcgataaaaaagtcgtctccaatgtgggtctcctcaggagtgtttgtcgtagcactcggatgtacacttctactcccgtttgagcgagcagaggataatccgaggggttcaaatggtggaagagttgagtacgatgctttggctttgcaggccgacggggaagtgtagaccaataaggactttgatggcctttttctatccttctccttccttactatgggatgattatgtatgactatgagtaagaaaacacgtgatgttccctatatagacatgaccttgactgtcaggaaccagagttaggtaacatatacacgacagcgtgaccatgctcacattccattattcatcatgccttccatttcgttatgctccttctcctcaccttatgcgcttgataatccttctcagctacgttcccttgattagtgataggattagtgatatggattagtgatctgttgcttgataatctctagttgataatcctgtagtttagtaatcgagtggcaaccaggtggccacttcatcgtagctagaacacataaaaggatcgcgtgcgcgctccttcaagatgtggttcttcaagttaggatccttgttaaataacctagtagctaccagtgctattcaatcacgattcatcctctcttccctgagcctggaagcctaaacctccacgcctcgagcatccctagtcaactacagtcaccttgcgtaaccctgtaacccggccccttacattgaccacttatcctgcatgatctagcggacgagcggatctctcgacggagttccgtcgaagtgtaattctctcgatattttatttcggagacatccggcgaaaagttgacaaattaaaatcatctatttagacaaaacagaaaacgaacgtttgggtaacattccaagaaaccatctacagatttgtcgactatggacaggatagatcttcaatcagatagtcatgcccaggaggatctcttccgaacagaaaagacagcgacagccgaagaaattcaggagtcgaagaccaagagagccagggaacgggcgttggttaggaaaatcgatcttcttcgtgagacgaaccttcttttgctcacacctgtgttcttgacctcgagtttacctcgatcgagcctcaattatgatgaccgagttacttggaagcaccagacagtgtattgaatcgtctgaactgactctgacgtgtttgtggatttcggtctggttgaaaagtgatgcctattttgacgatcagttatgggcttcaatacgtgagtccagggttactttttctttttcaaaataaattcccgttcgtttctctgcgctttctaattattctacaccttctcctccatgggaatggatgactgtataatggacggaataagtatgacaaagctgttttaggctctgctggtgttttcggaatcatcaaagatctcgttcgttcattcttccctcagaatttcattaagttacaactcttttcttgagtgtcctcgttcaatattccccttctttc

SEQ ID NO: 1895 - DNA, 31213 bp, Xanthophyllomyces dendrorhous
gggcctttcaacgacatcggctacaggtgtcgtctcgacaaaaaggttttcaacggcgacagctgctttctactatgggtatatcgctgctgtatgtccaagctttctgtaaacaaatctgtttcttgtcacggtcttgacccgtttgattcgatttaaaaccatcggattttcaaggtcctgccatttgcgctcgtgcttcagagagtcaatctgtcccgaacactctctctatgcgtgtatggtttcttttatttcttcgagtcagttttgaccgaaagaacgagtgtagctcactagagtcgattgttcgacacgcaggttcatttggggagtcatatgtattctgaccgtcgtcgtctcagattataaaggtcggacttctttctctatctatctacaaaccggtcaaccgagaaaagagaccaaactaactgaaggagatcattgcttttccgggttatgtccgtatgatccaggcctggttgttcaggttagttcgcaatgcatcatcactctaaagaatggcgcgttacttactgtcgaagacttcggattatattatgctcaccttctttctatctaaatttagcgtttcttccttggtctagttgaggtatgtttttgatcttcatctgaaaagttcccggactattctcaattcatacaatccaaatttctgatggggtcaataggctgcggtgtcaccgggtttcttggcgatcaccacgatgtggtacaagaaggaagaacgtatgtcgctttcagatgtttctctcacggattgtgattcggctgacatcgttggtcgggatcacttctattttttgtcatgataacgatggtgatgggggtggtgtagaggccataagattggggatttggtattcggcaaccggcatcttctcgatggtgattatctagtcgttcatatatcgtcaaattgaatttcacctgatagcttgtgtgttcattacagttgtctggcgcgctgaactatggactaggtgatcacttctcactacaactacttgacatgaaacctaccaactgacaacttccttttcgttttgttctcaatcataggatctgccaagggatctcttcccccttggaagaacctatacctatttgcaggtgccatcacactcgcctggtcgtttgtcatcctcgcgtttgttccgtcgtcaccgacccagcttggaaaattcggttcctggttctttcaggatgaatctgaacgtgcgcttctgagggaacgaatgagaggaagagaaaagggattgagaggagaacagtttagttggagtcaggcgaaggaggcggctttggatccaaaagtttggagtttcttcctcatggggtgagttccttttctcttgttatccgtgtctttgccttccttgtgagatgaactaacgcttgtgtatggtgttgctccgcctgttaacattcgaaagagctgccatatatgtaagctgatacaacattgtatataatccctcgaaacccaaagtcaatgatagagtacttacttgtttcgatcgaatctactctgtatcaggtatgcaagtaggtcgttcggttgattctgatattttttactcttgtgcctgctgttcgtatactcacactttcctcccccgacgaacacaactcgtctcgcccggtccccctagtatgtacaacctgttaccttcccccattatttgttttcagaagtcatgactgacgtactcttctgacgattatggtttttttttttttcaaaatcaggtggtggagtcaccgcatttggcgcaaggattgtttcctcattcggatatacttctctacagacgatcgccatctccatcccaggtggagcattcaccatggtatcgatttatatcgtcgggtaaggtttcacaaactcttttcagcacatgttcctacgagttgaatctcataacttgtcgtgattttgtggatcttgggtgagtgtgttaggtggatagccgatagatacaagaatatgagatgttacctcgtggcggtcagttgcttgccagttatcgtaggctcgatcatcatttggaagggatcctggtttgtcttcttcttttttttgtcgctcaaccctgaagccgataccacatgtactccactaaccttcctgtgcactttgggtgtcccaacacatacaaggatccatcgagggttgcctctatttggatattacctacttccatgtttcggcgcaccttatgtcatcgttctcgctctctctgccgccaacattcaaggctcgacgaagagagctatctccggtggatctatctttataggatataacgttggaaagtttgtctccttttttttctctttctctctctctttctctgatgcatatatgaatagaaattgctgaactgataggaaccttctcatgtgaaatttgatgtaactaaacagcattatcggtccatatatcgtgttcacccaagagaaaccaatcaaataccgatcgacctggatctcattgattgtctgcatgtcatttactatcgttctttctttggttctccgagtttggatgagccgggagaacgctcgacgggacaagacttacggtgttgtcgttgtcgatggctctggcgagaagagtagcggtggacgtgagagtcagggagcctggaagaagaaagaacaaaacggacttcagggaagggaagatcaggaagaagatccggaggagttggttgatatgactgatggtcaggataaggattttaggtattctctttgatcccaaaatctgccctagtctttctcttctatttatacttgccaggttccatcgagccgtcaagttttgtttattctatcataaactattatcttttagtctatgcttcttactttctatgaaacatctgtttctctctcttgatgtcgtccccgtattctttttccgctttgaagagatgaatatgattgataacattttggggatgactatagaagtacaacacaatttcttctttccgtttgggttttagtgtatgctccacacagggagacaaagatgttacagatagaattacatgtacaagaaaacgagagaaaaaaccagaaaataagaaactaaatgtgtacaacagcgtagagaaaagaaacaagtgattaaaaagttaagaaaacacaaaggacttccttgagagaactcaaactcagatcatgaaacacagttctgctctcgtgtactgttcactctcctctttctcgctcagaccttctttggatgctgacctatccctggacctttccttctcctccagcatattgatccaatcggctcttgagctttcccctggcataaatatcctactcgcccttcttccttgtatgctcttctcgacttctgatctcccgaccgatccatcccgagtttttcgtctctggttcgtagcagcagcagcagcacggttgtcaaatccgaaagcggaggtggagccataaccggtagaaccgatgggtgaggtaggggagtatgtattccagcatggatgagagctcatgaggactgatggatgaggaagaagtggaatagctgatggaccagtcgacatcctttttgctccgttcgatcgaggatgaaacggatgggcctgggtctgaggtagtggacgacggtggtgaggctcactggaggatgatcggatcggttcagaccgtttggtgtttggaccgatctggctaggaggggccttcggtcggttgggatcggtcgacgcaagcaccgaagtgggattaggccgatgagtgatcgtttgtgtcggtgcgggtatcgctggttggaaccctacgacagttgaattactttgagaggaaagttgagaagaattagtgccagtgacagagagagcgccagaggcagtggatggaccggctactttccttccaaatgacgaccgaccaaagaaagaagggaacgatccgtcgaacgggctggttggactggtcgggctgataggttcattgggagaagtactagaatgagagccgaaaaagttgtgagtcgagatccgtttgcgaagtgttttcttgttcgtcgtggtcgtggttgttgatctttctatgggagacttaacctgggcaaactctacgagtcggctgagaatctggaccggtgattgaggagtcgatggcatgggatcatcctctgttgaagaagtcagggagagttcgtccggtggatcgattggagagtccgagcagagtccttcagaggatgacatcaagtcgaggggtagtgaatctgtgttggggtctgacaacgcagcattctcctctggttcaagtatcggagagataggcaagggaatcaagcagggctggacggcaatgaaatcactgatctcgagacccacggggtcaatgagtgtgtccgatgaaggactggacgggagaggaattagccgaggatcgatcccaatcacgcgatcaagttcttctgtagaaattgacgggagaaatgagactagtggttccggcgacggagaggatggtaatggagtcgagcacgctagatcgaacgacgagatgtcttccactggcgacgacagatcaaccaagatggtctggtttgaatcgaatattaggtccatattggagattggttgtggtgtttcgatcgatggcatagtcaacgccttttggccagactgctctggtgcactgatcggactagccacggagacctttgaatcgttgttggctgctgccggtcggacgacaggtgatctagaaggatctggtgtggaggaggtatttggagaggaaagcttggtggtcatcagtcggggtaaacctttgactttggctatcctgcctgaggagaaagtcactctcagaaatgaactttttttgctgccctcgttggacatggtgtcgagaccgaagtcagagagagaaggagacaaagacggaaaagaggaaagaaagagaaagagaaagaagcggaggtgtggaaaagaagaaaccggaaagagaacgaagaagaaatcggaaaagaaaaacagtcgtcagttttgaaatgaaagaacaagcggatgtgagtgcgttcgttctttgctgttagttggtcgagacagtctaggtcggtcagtgtttagatgggtctctcggatggacttgttccccctaccggaagtaggcgcagagggaaacaagggcatgatcaggcacagaaagaggcacacaagagagtattagccttttggctttttggcctagacccatatcggggtcggctcagggaccgattggaacccgcagcagaaagccgccgggcactctgacagagtgcccacccggtgaagaacatcggtccaaggaaaagtccagactctgcgtcatccgcagttgatcggcaatataattgatctcacgtgaacaacggtttcgtcttacatggccgccccacaaccctaacaaagcttctcaagtgtgagctttctctcccctcgtctccttcgccatttgagattgagcctggttcgacaagtatcgttctggaccgagatgttcaaccaaagaagtcaccgttcataaatccagtcaatcagttccgtgacaagagccaccgtcaggcaagagagtcacctgaaagaacagacagatcaataaagaacttaccgtagatctcggcgtaatactctttatcgctcgtcgagtcaataatgctcttcctgtttacacaagagctcacccagctctcgaacttttcgcccacctcagactgcttgaatcctcggttttcctccaggatatacagcctgggcagaagcaagatacggtctgatcagctcgctcttttccatcaagcaaacatacccacacctacctggcaaagaagggagcgaccgcaatgtcgacaaagccaaaatcgtcgccggagtaaaatggaccttggacccggccggttagttccttcaaagcatccaccagatcggcacggagagaagcctcctgagaggaatcttgattctgtaatagcttgaaccatgcagggttcactttcttcgagaagtagtcgatctattttttttcattcgtataagtctacctgatcgtctcattcagaacaaaaaatcaaaatcagggactcacatcgatacgcgcgagagccttcttcttgggatccgaaggaagcaatggtttcgtctctggaaatgcgtcgtcaaggtactccaacaggatacttgactcgtacacttttttaaccctctcaatgagctcagaatgctttaggtgctttatcaactggcacactcatcacttacgagcatctccgtgatgttggatcgcagggaccaatcctttggggtttatcgccaaaaaatcttttctttaaaatgcatatatgtgttcccatatcgttcatcagttcttttatattgtaccgtcgctcgaccagaatctagaaagagagtaagagacgaacgacttatggtatgggttgacttctcggtattcgtattctatccccttctcttctaatgctacccacactctctactcagcgtttgtaaagatcaagctagttcagttcatctgtattcttcccttgtttcatctccacatcacgccacttccaggttcttttcatctcaatttagccaacacgaggtttggccttccgaagaagaaagagaaaagactaacctgattgaaaggacagaaccagccggaatggaaaatcaaatcttgaggggtcttatgagctgcgacaagctctgctgcttttccagtagccactggatgtatatctgtcgattgtgagttgtgcggattggatgtgtgtgaatatatatatatatgcgcatgagtgagtgagtgagtggacatatatgtcttaactgtcagtcgccataatcctggatgctgtcgtggacgaccaatgaatgcgatctgatcaggtagactcacgggcatcgggaagaggcatctcgactttctttgatatctttaatgtcttctgttctttcacaagaggggatgaagaggtgatagattgggagatgagagcaacgaatctatagacgagaagatgccagtcgttatcatttatatattctatgtatacgattcatccttagtaatctaagtataatagacatgcgattacgatcgatgacgcaagatcttctgatctcatcttctgtcttcctttgcacttgataatacggcttctgacaaccgggcgcatggcgaagagatagatgacgagaggggaatgaacaagaaccatccatcgcaggagatatccgcttgtttaagaaaaaagaaaagaaaaaaattgaccggagaaaaaacgatcaagatcggaaacgaaaccagaggcaaggtcttgttgaggaagagagagagaaagaatcgggtggaataaactaatagtgggatgatctcgaggtatttaaagagttgatcaagaacggatagagaagggagacaccaaaaagcaaaagcgtcgaccaaaaagacggtagatagaagatagggcgtaaggaaagagcacaaagaaaggccgcgcgaaagaaagataactactgtccgaagttgaatccaccctggggagcagagagatccgactggaaagcgaacgagccagtggcatccacctgaggagcatccactcctgtctctcctgcctcgtcctcttccgggaagaacttgtccatgatgtagaacgactttttgtaaatctcgaggttctcgtgatgctgcaaattgtgaatcgcatgcattcctccggcctcctcgacgaagagcgcgtattggtttactccgccaggtccagcagcttccttgtccatctctccaaccttaagaatgttatcaagaccgtccaaactaagggttccagtcaagagaatttctggtcagccaacgtaaactccccctcaagcgttgtacgcatcacacttacgcaacctggatgatcttgttgtccatcgtcttcaataaatcgcacagcggcttgatgcatccctgggaaacaaggtatctgatctgggacggctcctgaagtccgccagaagttgcgttcgatagagcccagcaagcttcttttttagtcttgaaatcagccgtctggagaatgttaatgagaggagggatgatattggcgtcgatgatggcttggatttgatgagtgctgtttttgcaatagtatgacacatattgatcaggatataaggttaccacctctacgcttcacctcaaaggataaatagaccacgaaacaaaccttccggcggtgacgttagagatagtccagcaagcctccttcttgattccctccttggatgagctgagaagggcgagcaaggcagagagtgcaccagacgcaatcaccacctgagtctgaaggtcatctccggtcacgatgtttccaaccgatcgaagagctggagtctggacggatgtggagggatgcctaagagaaaagattatttcaatgattagagatatgagctcgagcatcgaatattgtttgacaagcaggtgcaagacgagagaaacatacatgagaaggtccacaagtcgtcggcaaacaccactctcgatcacagcctggatcttgtcgttggtaccatcggagaggtactacagaaaaacaacaaacaacaaaaaaaaggaaagttttagcatgtgtgatatatgttgcgatggcgggggtagcaaggaggcctcacgctaatagcccagcaggcgtcgatcagaacctcgtcatccaacgagtagatcaacttcgtcaagacagtcaaggcaggtgaaatctgtgataaaaaaaaatacaacgcatataccgatcaaaatgaaattctcaagatcgtcttcacttaggatgatactcaaagctactcaaaactactcaccaattcccactttggctgggggttcttacccctgcagaagttactcaacgtccaagttgcgtttcggagcatgctcaacttatgattctctcccaacaaggccaaaagaggaggaagagcaccctgctcgagaacataatctctgcactttggcgaatcaccagcgatgtttcccaaagcccaaactgcctgctccctgacatccaacacgggcgaggaaagaagctggatgaaaagcggcacggcattcgactggaggacgatctgagtgtgagcggaggtaccggaggcaatgttggtaagggcccaggcggcttcgaactaaggagacaaaagatgaaagagaactgtggcgtcaataacaagatgctctctcggcatgcgtcaggctctacaagaagacagacctgaatcattgagtgggcactagaaaggaactcgacgaatcgagggacgacaccgcattcaatcactcgctcgataggagggttcttctccttggagagaagcctgagaggagaggagcaagtctatcaatatttcacgtcaccgcacaagccaggataggaataagaaggctaatcatactttctgaacttcgtagtggcatctagctgggcatcgacgttgtcagagaacactccctggatcatctggggtaggtcactcagctaataagagtcaaagtttggaagattacatagaatgagcagatgacaaaatgtgtggatggaaaacatcccggatgcacgacctcagatcggtgtttttgttcacgaaaaaacaattcggaccatggacgaaagttgatataatgtgagacaatcaacttacagcagcctctccactggttgaaggagactcatcgtccgagtcgaccgaggtagaggtaaagtttcgtcgcttggccacagagtcctctcgctagttgaggcatcgtcgtgtcataatcagcacgacacaaataagagaaaaacaagaggggcagacgacaggtagagaccaaagtgagacaacaaagtcaacatatagatacgatttaacagcaagataaccaaagagcatccttcacgtctccagctccaaggtagctcaatgaacactctcgttctagaaaaagaaagaagagagagggaaagagatcatgtcaagtaggaacaaaccttttgctttcgaatctccacctgctgctcctctcgacgctttcgcaactcggccggggtgaagttgctcttggacttgtaggctgcccttctgttttcctggtttctagactcagacattgttcaaatagcaagagagagaattgaaagaatcggttgtagagaacaaaaagaaaagaaaaaaagatgaaggaggtagttcaaagatggtgtgtgaaagttgatttttttctctctttacacgtttgttacggtggttacgcgtagaggaaaagagctccgagaaaccatctacctacccaactctccaatgtacatctcgatttcgatatagtcagacgaagaatattgttctacaaatgcttgcgaatctatcgttgttgcgttcttgatagtagcaataaacagagcagaggggtgatgatagtcatattgcttgctgcatttgtacttctctcttgaatccagtcccaactcgaacctcgacatatatgatgttgaaacatgacatcctctttttggtttcttctatacgtctcgtctaaaatcctccagtcccaggatcttctttcccttagcaagcccagagaccatctcgaggggatttgtgtatcctcgccatcctcttttgcgtgctgccggctcggcgtatttctgctcattcgcctttttcaacaccttgtctccttcaacgaactccaccggacgaactcggtcctgaaagtgaaccccaggagtgattcctctgggaagaattttggcaccttctggcaggctgtcgaggtgagagtgtagaacctcgcggaccttgtctcgaattcggcacgtctcccgggatagatatgtcgggttggtgtttaactgaaacgcggatcgtacacagatattcaaaacattattttggtgagtcaaatgaacactggagattgaagctgatcgctggagaatgagagcatacaaggtaattatcgaatcctccccaatctgcaatctttcttgaagccttggcagtcgtaggcattcgaaatttggcatcaagggtctcagagtagagaatcttatcctggacattgggcctgaagaatcggagtgaacgatgaatgaaattcttgtcttttcggttcacgttgtttcctgatagttcgttaaaccgtggaaaacgggaagacgagtgaccgaaaagatgaaggatatatacgcagagaatagatgggcaaacgcaataagaatgagaaagaaaaaggaacatcgagtgattatcagcgacagttcgagaaactagattccttcctttcaacaaagacccaagatacaaacgatcgaggacgaacccttgatcatcatcgttccatgatacactcctcgaagactcttcccggtgatcttaccaccctttgcgtttcggtaattcacaggattaaggatatcgagaatcctagattcaggagtctgcatccgatacctcaccttcgggacagacaagatcaaagaaggtcgcatggctgattaaaagtgtttaatttggtggtcgttttgatgatactggaaaaggatggagagaaagacgaggagggcaaatgaaaggttggccttaaccaggaaagtctcgattaaggaaatattcaagtataataaatgaattcgtcgctaacccctctctcgcctcgttcgtcctcgcgtcgtcggccaaaagttggatctatcaacgacccaattcaacacagagtcaaaacttattcccttgccccttttcacctttatcctttatcatgtccgataatgaaggaaggacctcatcagagggagaaggtgaagatatcgacaacgctagaaaaaaacggtctctcaatccagaggacgattcgagtgaagaagaggaagatgacccggacgaggttcgttttgccttttcttctctatcttccttatattggttgtatacgagtgatttccatacggcacagaagaggtgtggtggaagataatgaagagctgaaggacgacttgactgacgcgtcgatgatgactctgctatctttgattaaaggtccgccgagtccaagctggcttcattgtagatgaagacgaagacgaagacgaggcttcaggctctggcgatggttcagcatccagtggtgaacgaagaaagaagaagcgaaagagcaaaaagaagagaagaagaaaaggtctgtcctcattgctctatctggtcttcctatctatgaagctttcttactcatccgagaatcacatctctgcttgtcttctcccagaacgctctcgttccgccgacagcgcggacaacctatcggatgatgatcttgacttgctagcagaaaacactggatcggcgttccctcgtccgtctaaatcttcgaaatcaaagccgaagaaactacttcgtcggagacagtcgccagctgcttccgaagcgtccaactcaggatctgcgtctgaggatatgcccaacacagacgatctcgctcgcatcttcgaggacatgccaaggaaacgacgagaggccgcggcggccgaggaagagatggatgtagatgaagatgacgatggcttaggagactttattgaggaagatgaatttgatgaagatggtggagaggccgccgagagggcgagggaaagaaagaaggctaagaagcaagcaatgaagaagggcaaagccgggaagaggggcggagagggtggaatcagtaaagcgtaagtcttccttcgaaaagtatcagccaaagataatatgcatcaacatttacgtgcttacatactttctcgttgtgattcaagtgcttgggacgacatctatgacattttcggaaacggagacgaatatgattgggcgttggagggagaggacgagatgttggctggaaacgttacagaccttaaaatagaagacgtacgctgtatcctatcatctcatcgttgaacgtctgactgatcgtctatccttctgcactacgaacaggttttcgagccctcagaaatccaagctcgacacctcacagagtccgataacttgattcgactacgagacatcccggaacgacaccaactcatgaactcgactctttcctcttcgccaacatacattcttggccagttccccaaatttcctgatatcaaacttgctgctaaatggatttcttctcgaatttcagcccgaaccaaaaacactttcctaagcattcctattcaagctgatgagctcgatagctcgaggcccaacatgcatctcaaattcctcactgccgtcgagaaggctctcggtttcatgttcctcgagcattttgaggtcccattcgtttgggaacaccgtcgagactatctcgtacactacgcaaccgactctcaaggtcacatcatcccaaagggtatgatcgagctcatcactcgacctgaattgtggaaaatctttgagcttggactcaagtaccgaaacctgatgaagagaaagcagggcttactgtccacatgggagaagctcaagcagcgactgaaagatcagaccaaacagcacaccgaggaggctaccgccgctcctatcagtattgatggagaggccgaaggagaagaagaaaagaagccgatccgagaggagaaagtcgattggagactgacgtactttgaagagttcgtaatcagcccaatgggcacggcggaagaatcggtggagggtgtagttgacggagcagactggttaggaatccggttcatgaaagaattcaaagagatgaaggaggacgaggatctcgatgaagaaaccaggttgaaggagggtcgatacaagcggcccagcgcacagggacctaaagcctacctaaacacctaccgagacgctagattatctaactttgtcaaggttcgtcttccttttcgatctcgttagtatacagagctgaatcgtatgctaacctatcgaattacttttcttcactttcaggccgcaggtctcccgattgaggaggctgtctctaagaacttattcatgaatgaacaagaagctatccatgccgacatcgaacttttccctgaggactatgctgagcaattcatcgatggcaagatgttgactgacgtaacgatggttcttcgaggtgcgtttcttccatttgacaccttgcctctcaatttgataatgcttgattgtatctgaatttgtttcacttcgcgtctcttctatctctagctgccagagggattctggttcaggactgcttcaaaaatccccatcttcgaagaatcgtccgcgattacttccgagagcagggtcttgtctctgtttaccctactgaggctggtctcacaaagatagatgacttccatccctacaatgtgagacaagaccttctatatatcgattgaacctcaacttacatcattctacgtctgtctgtatcaacagtccttcaagtacctcaaagaaaaatcaatcaccgagctcgcgcaatccgcccgattccttcatattcttgaggccgaacggaataaccttgtcaaggtatcctttacgctatccgagcaaacccaggtttacttagaagagtcattattccaagcctggaaatcaaatgagacctccgacagctcgtcctcagcttggaacgcattccgacggacagtcatcaaagaggcttgggagaaagagttgattcctatgggagccaagtgggcaagggagtggttgagggatgaggtcgagaactttgttgcaggttcttgtgcttcgcttttggagaaggtacttcctatttctctgctgcgttttgtactttgttgtcctgactgggaatttttctatctctgtctttcattaggccgccaatcagtctccgttccgaccgaaagagtatgagaagggagcgtccccctcggttcttgctgtctcacacggaaagggtgatcgaaacgacgcagtaatgtgtgtatttatcgacgagcagggtcgagtccgagaatctacaaagatcgaaactttggacgagaaaaagccatgggagcttgagaagatggcacgacaaggcattgcatccaagactctcccaacggacgaatttaaagcgctcatcactcgacgacagcccagtcttatcgtcgtgggcggtttccgagtgggtactcatcgattgatggagagggttaagactttggtcttggagttggctcaggctaaggtcgataaggagaacgaggcctctcgacctggaggtagtattccgtggggagaggctgccaagacggagctcgagcttgagatggaactgaaagatgccagtatccctgtaacattcgtgcctgatgatgtcgctcggttgtatcaacactctgatcgagcccagcgcgagtttggtctttacccgcctacgtctcgatattgtgtgggactcggtcggtatgctcaatcacctattcacgagtactgtgcccttggatccgatatcgtcgccatcacattcgacgattactcccagaagcttgtaagttttttctacaaaccttaccgacttgctcggttagtccaagttaactaaccgcggcgaattatgggcttgaaatcaattaggttcctcaagagaagcttcttctagctttcgagcgggttctcgtgaatatcgtgaacgacaacggtgtggtaatcaatgatgtcattggggactcgtaccagcatcaaattcttaattacgtctccggctttggacctcgaaaggctcagcagcttattcgagacgtggttcgaattgtgagcacttttcccttctttcgcttaaatcttgctaacaatagtctgatcaactcatcctatttcaacagggtggattcctcacgaaccgtctagaactctttaacaagcaccttcttaccccagtcatgttcgataacgctgccggctttctcgaaattcctcacgagatggacgaacttgagctttccccggaaaaccccacgactcagccagatcctctcgacagcacccgaatacatccagatgactacgagttcgctcgaaagatggcggagaacgcattggagctcgatgatgaggatgtggcagatgaccacccttcgaaatccgtagtcaagctcatgctagacgattctccagaagagaagttgaatgaactcaacttggatgactttgcagataacttgcgggatatccgtggcgtcgaaaaacgttttgccctcaacgttatcaaggacgagatggcttctccaggaagggatcgaagggcggatttccaggtgcctactccttggcagattgtcactatgttgactggtgaatcggagacgacgttggtacctggattccttgtttccggacgagttactcgggttcaccgaggcgaggtgaacatccgacttgattcaggaatcgaggccattgtggacaagacttatgtgtcagacgagcctgtgaactcgtgtgatgaggtcgtcaaggccgacagctatcctcgagcggtcatcatcgctgtttacccggaaaagctgttgatcgagctttctctacgaaacaccgaactggcttatggagacgcagctcttaggaaagtcactcccgatgagcctttcgatcgagaacgggccgaagctgatgctgaggctgctcaaagaaaaaagcgaacggatgttgatcgattgaagcggcagattgaccacccaaactttttcaatatgaacgttgccgaagctgagcaggagctagccagccagcatcgtggggacgtcatcatccgtccgtcctcgaagggtgttgatcatctaaacgtaacatggaaggttgacgatggtctctaccagcatatcggtaagtctccgaatcgttcttgccttcctgtcatcccacacttacagtattctgatgtgtcttttgatgccctctcgatcagacgttttggaggttgataagccgaacccccaaagtttgggacgaatcttgcgagtgggtggacagtattcgtatcacgatttggacgaattaattgtgtcacacgtcaaggcggttgtccgaaagatggaagagttgatgaaccacgaaaaattcaagggaaagaaccaggaagagctcggtaagtattcgagttacgcgtgtgttttccttgtcatctatctgcgaggccttacactgattcgtctatctattcctttttttgatctattcttctaatctagattcatacttgaaaacgttctgtctagctcaacccggaaaagcggtctatgctttcggtcttgatcgtgatcatcctggatacttcaagcttgggtacctcgacaagtctggaggaacgatacactattggggtatcaaagtgaatcctgggtcttacgtgattggaaatgccgaagtaggtggaatgcttgagctttgcaactcgttcaaaacacagttccagaagcagcaacagcagaacaagttgatatctggcggtggcggcggtcgaacgcctggtatgggagctcgaacgcccgccgttggaagtcgaacacctggtgccatgcgaacgggcatgactccgatgcattctggagctgctggctcccgaagtgggatgactccaaacccttacgctcaagcttatacccaagcccaggcggccatgacccaagggatggtgcctggtggctatccagggtactcacaacctcaaccttacgcatatccgaatgccgccggaggataccctgtcggtggcaattacgctgggtactctgttccacagtcgggcgcgtacggagctcctcagagtgcctataatggatatcctgtccagggataccaagcgggttatgaagattccagtggttggggatctcaagcggctgctgctgtgtccggtggattcccaacggctatggcgacaaccaccgtgccttcatcgacaggcggaccgggtatgaacccggcgagaatggcgatgatctcgtcgtcgtcgtcgtcggcggcgctgaactcggatacgatcaaacctggtgctgagggaaataactatgcagcgggtgggtcgaacactgccggcgatagtaaggatgccggctggggtagtcgaggacgtggctaagtttgaaaggatttccacctttcttttctctctaacacctttcttgtgtgctttgcccttctggtttaccttctttcaacaccaaaacgacacaggtagacacgcgtgtcagaaggctttctacatgtaccactattcacataaaatgactattcttcatctgggtgtctgcttatgagattgcagttgaaaggaagaaaggaaaggcagcacaacccgctgcggcgctgtagacggaagagaattttcaaaagggaatacagaaagcaagtctggccaagtgtgaagaacgataaaaagaaaagaacctgtagccgacgactctgatcaaacaagagagagtatgctcttgaatgcaaatacattgtatggtgggtaagagagttgtgtgtctgaacatatacagatgatgcgatagacgttgtgaaacaacagggaaacactacaaacttatctaatgacgtcctgaaagcgactacgcggttttgtagtctaaatgcttttcgcggtcaacaacaccagttaccgaagaaacacgagttaaactcggtcaactccaaaccatcatcgtccatccatctgcgttgtccattcgttctcagatctgactatcgctcttggtctataaggcataaggtgtatccttccggtcgtaacgtgtctttgagctaactatctcctctttcttcgagagtggtacgtccacgtcaacactcgtttctcccccttttttcatctcatctaccctcaaggtctgaataagaaaaaaactcccaaatacacaacagagtcttcttgcagcctgaaagacagaatgtctcatctgttcggtcggtcccagagtggacttcatcaccatcaaaaagcccgtcgatcaccgctgccttcattctcttcatcttcctcgaacgcggccatcaatgaaaaactgtatcagtacaacccagacctccataccgcatcgtcatcttactggacgaccgttttggtccctcttccttttgggaaacaaccgcgaaagttccggctttctataccggtacctcctagactgtaccttcggataagtcggacgagctatatcagagcaaaacttctcgtgcttgcactcggctgtctcgttttctttgtttggctcttaggatcagggaagaagaagaatgacggcgacgacggaggaggtcaaggggatggtggctggccaaatccgtttaaagatccggatacggtggtgatctctaaggaggagattaaggccgtctgggaatgggagatcatcagcggacactggcccagcaggagatcaggtaagactgtgctgttgctgtagaatgagccgatgagaagcaagctgtcttgtcatgaccagtcattgtttttattatatttttgcttcttcttacttacttccgacttgctttgatctcttttgaatcgactccatcctctttggtcacctttagtgcctcaatccaatcttcagagtggatatgtcaacccctcccttccacacagccctccccctgtctcatccaattctccttcgcactactttcaaggttctggtcacgacagaacatacgtgaatttgaccgttccaacagatcctcggacggatggggggttcgactacccgaaaaggcctgtcactgggagcgtggccgacttggacatcattatgaaggaatgtgaccttagtaaaggagcggtgggtacctctccctcttattaagcgtgtcagctcagtgttaagaaataaaagctgacggagcgtgtgaaacattcgttctcaatagtatgtacgagattgtttggaggtccttcgtgtaggtgggaacctcgacggccgacgtgtcaagagaggagacctttcgccctggtcttatgtcttcaccgaacaaccatcgacctctgttccgtccaatattcgcactcaagaagcagatcaacgatcgcgtctcgttcttggactcggtccagcaactagtcttgatcaagactccctgaaaacaaaaccagaaacccccaaacctaaacttaacctgcctaccccctacccagctcgatcatctgctgctacgccttcccagccatgcgaccccaaccgacccaggttgttccatatcttctgggctggacctttcaccgataagccctatatggcgatattgtcatttctttttactcagaatctaggactcgacttgcctcaatctcaatggtcgaagcagacaaatcctccagtgtgccgacctcagttcctggtctggatcaatccaggtcatgccgcgagcgtgccaaatccggcggccaagagggagatgtacgaggctttggcgacaaacccgtggagtgcgccgttcctacattcaagattcaaggacgtagtcaagttcaagatgtggaacacgaccgagcagctcgacggggtgcctgaactgaaggaccactggaggagtatgccaatcctaaactcgggaggatttcagttcacccctcctgccaaggaggacagcgaggttggcgatgaagtcgatgcggacgccatgttaagtgacgaggagctcttggcaggaatcgtggcagatctggcagacgcggccggaggagatcaaaagccgaaaccaccaaagccagccaagattcccaaggtctcgcttggtgcttccgagaaagattatgataagctgtccaccgtgctctcggatatggttcggttcgtgctcctacatcgatttggaggaatctacctcgacgcagacaacatacttttgagagattgggaagagttgtggaactggaaaggagcattcgcctaccgatggagttatcacgataaatacaataccgcgatcatcaagatgcacaaaaagtctgcgttgacaagcttcttattcaagaccgcgttagaaaacaagatggacttccatccgatgacgatctcaagatacctcgaggacgccgggttgagtccgttgctttatcgactgcccgatgcgttgtttgattcggcttggttgaacatggaaaagtaccagcgagagagaccgccgttcccatacttcccagagtacgtgatttgatgtttcttgtccattttcaacgttcctgagtcatgctgaagcaattcaatgccaaccaatcacaaaccaggttcaagaagttttttgtcggtgacaagcagctgacggccgaacctcagcctgctggctttgatgcgttcttccgaggtgcattctgttatcactatcataataactggttcgttcttccccttttctcatctcaaccattgtccgtatgctctcgattgacctcttatatgttatacaatctaggtggcttccgttcgacccagctcgaaattggcctgatctgggccaaaagttcattcgaggcgaacgattgcttcgtgacgccatcttcgcctccaagaagcctagtaaacctcttgcggtgaaagatacccctgaagaagaatcaaatccgagcggcgtggcgattaataatagagcagtcgaaccggttgatacatctctgccggaaaatgcagtagaaagagtcaagagaccggtgtccaccggtgggacaggtaagaagggcgagtgggcggacaagattgaagacgatgagagggatttagcttgggcggcgattatgaagaggacgtttgaggcttatatcagaggagaggccccgaacatgtatgggtacgtcgggcgggattttttgttctgtttcgagactactcggtttctgtaactaactcctattttggccttggacatcacagtgaatggctgaagtgggagtaaaagaccgatcaggataccacagagaagatatcaaggaggtttccaacctattcttgtcagtttcaaaaggaataaaaaacgttgagagaaacccaaccagaaaggagcgaatctggttcataatcagttatatctggccatcctcttgttttcaagttcatcttctttgtcgtcttttctaggcctgtcttcaatgtcaacttgttcaatcatccactattcccattcctttctctttatctcatctagataacattctctatataccttgttctcttctgttccttttgttatcggtttctttaattaaaaaaattacttcgcaacacactgtttcatgggctgtgcatccactcttgttcaactggttcgatcaaatgtttctctgtcacaaggcaaatcagcttcttcctctacttacgaagctctgcatatatttcttttcctcttcttgtgaattcttgcgtatcttttctcctcttaaatatcacctaaagtcctctctttgttctcattgtgcgaggtctctcgaataaccctttctcaaactttcccttaaactcaatccaacacccataataactttttctcgctattgattgctctcaagtcaactgtctttcttctcttggttttaagcactgtcataaatctattcgttcacccctcatacacatacatctagacaagaaaaaggatgcgaaaagaaaacgcaaagaaagaaagatgatcgaaaaaataacaaagaagagtaatgggtacaaaattgcggaatgaaacctttaagtatcttttacttgatgaatctgttgtcatgacaaagcatgtatatgtcaattcagattcaattgttaaacgaaggggaatgacttactttgacatgaatttacctgtatagtcatcgtgagtagaatgagcatgataaattagtcgtcaagcttttaagatctggaatgaagtacaaagcggtggcaagtgaaaataacgaacgatggaaatcggtcctcagcagatcgttcacaaactccttcttcttgttcttatcctccgttccagctgcctggtttttgaaaatcagatcgtcgtcccatcgtctaccaaccttgaaaccagaagctgaagatcctccattggaaacggaatcagaatctccgttttggcctagggcggcagccaggttcaagagaggatttcccatcgcgatctctgcttctctgtcggttgcctcagaggcctgcagagcggcttcctattcaacaagaaaaaaatgataatgccgagagataaaagaagattagtggtggacatggcgtttaaatgtatcttgagcttgcagctaaggggtgtgaaggtcaggaaggcagcgacgaacttgtctctccttctcttctgctcgttctcgcttgattttctccaactctcggaggagctctgccgtctcatcctcagagtcgtcatccgagtcaacatctgaatcttcgtcttcgtctgaatcttccggactttttgaggaagagtggaaaggtagaaaagattcgaaaagattcagcattcaaaacgtatgaactcatccaggctgaacacaaggatcccaattcacatacgttgctttgtcttttcctttcacatcattctcgtctccactgtcatcatcattgtcgtcatcagcatcatcatcatctctgtccaatccaacagcttcttcaagctttcgtctcttgctttcaccctgctcatcgatctctgcactaggagacccgtcttgaatagtcttgagttcctgaccgggaagcaccaaaggaggcagtgcaggcaatcctcgagctttcctcttcttatcctcagcttttcgctcgttaatcaatagttgagttcgaagatctactcgagcgacatcagaggtagaagtctgaccgggctgtcggaatttaagcttggtgtgtgatgcaatctccttgttagagacttgctgagatccactcttagattctcgaccttgggcggggtctgaaggcaagaattaacatgccacaattcttgatatcagtattttatattgaagagaaggacagaaataagacgaatgtttgccaggtgaggcggaggtcgtgacttactccaagtaggtctctatttcgtcccaatgtttagttatcaacatcccgtaatcataccgtcaaaaaaacattcttgacgcgtctttgatcagccttgagcaagacaaaagtacttacgtgagcgttggacatttttgtgtaatttaacgagagcgaacagaggtgatgtggccaggaagaagctcagctgtggaagaagggacgaagatggtcgatgtcggaacacagccggtaaaaatctcattaggggattctccgacgcaaacttgggtttttctgttcgattttcgatcattttctaagtatatttgaagtgatcatcaaacaattacagggagtatcaacggcacaagccatcaccagtgttgaattcggtacagaaactgccatgaggtatataagtaagccggaaagaacataagttcgagataggtatataaaagaacaaaggggcagaagggggctaaaggtagaaagcagagctgggtgaaagctcagaaatcttagataggccagcaggacatctagcgtagtatataatctctgagcaaagtcacaagttcggcctaaaagagaagcatagatagaacagaagacagtcagttttggcacgagatatactactcacaaagggtatcaaactcttacctggcgaaggggttttgaaagatagttttgcctgtggagttcattcgaaagcaaagaaaaagcacatcagacacatctttctattgagttaggaggatgaacaacagacgtacattccagaagaaatacagagcaacttagcactttgctgacctattcgtaagattacaagattaaggtgccaatagatcagctcatattttcaaagcgacaacgaaagtatactcacaatcggcggaaagcccaacgataggtagtctatgactacgacgagatttggattctaacaatcggattcgagcggtggccgagggtccgtcccggaagggcatctagagaggagatttgtgaccagaatcagaatcaaatcagtccgagtgaaaaatcgatgtaagaacggacaaaaacaacatacatgatgatcgaagagtcccaaagaaaaatatccatccggtcgacgttcccattcagttacagcatcgtttccattcacggcggcaacaacaaccaaccccaacctctccaaagtcttacacaacaacttagaagcaaccggattgtccttttaaaaggagagaacaatgtcgatatcagcatcatatcttgaggctggtacgtaggcaaaggtggatatgagaagttggctgacctctgcaatcaagatgtttttggacttgaaaatatcaatttcttcaacagtgaactgatccagcgtcttatgcgggataactgctttcttcacaggtgccgtattggccacattatcgtgcagcagatcgactacgaatttcaggagcttcgctcggcgtataggcttcaggaaaggataggcatcgtccttgggcttgctgttgatgttcgctgccgtagggacaagcaagtagacgatcttcggggcgatcggaagcttttggaccatctttctcacctgcgcaagagaatcctccgcttgactataaacaaaaacgagtgcacaagtcaatggcgagcgatacagtcaacataattatttttttccaaataaagagcttactgatcgaggatgattaatgagaacgactgagatatcaacgctgcttgtgtatcaggcatagaggccgtagtgacgataaaggagccggtcaatgcagacgatatgagagcagtcgtagcagatgatgaagacgagatgagaatggcaggtcgcccgtgatcgcaaagagctgaactaagagcagctcgatcatcaagtgccttcgtgttgaacaagtgttgtatctgttgtcagctttagaggctttgaggaagcagccaatggggccaatagcgatttaaatagggcactcaccttgcgagcctctggcgagtctgagactatcttcgccgggatcgaaaaggaaaatacgcttcctttgttgacttctgactcgacaccgattgtccctcccatcagtttgacgagttgcaaacagatactcaactatttgaagagaaaaccggattgacttattgagtacttgactatacgttctcattgaggaacaccacgtacacctaaaccagttccaccatacactctcgttgtcgatccatccacttgactgaaaggctggaaaagtagaagctgctctgctttggacatgccgatacctgatcgaacagcagaaataattcagtggtcgctttttgaagaatgatgaaccaacaataaacttaccggtgtctgtgacctcaaaacgtaacacaatctcgtcttttcggtggggaacagtactcgattcatcaagagtgcactctagattgacagatccagtatgggtaaactaatgatagagatattatctctgtatcagcatgatcgcttacgtcagaaaaagacataagaatagaagacacccgtactttcaaagcatttcctagcatattcatactgaaataagattaggaaagaaagttaaatttagcaaactgtaggtttttaccgcaaggttaagtagacgtacatgatttgccggattctagaaaaggcataatttgaaagaagaacaggttatttccaagttcgctcacaaacgatatagatcatgccgaaagcagacgcacctcgaaggatcagaaatgatatgcgaaggaaccttcggatcaatgttatatgtcaattcaagacttcgttgagtagcctggtttgattaaattcaaagctaaaaagatgaacaatagttcaggaatatcgacaagaaaactatgatattatttaccaatgtcaataagagctcttgacattcagctatgaggccctctgtttatgtgagaaagtaagccagagaagtataattagttctagtcacctagagaagggtgttcgtgtttcctcggatcacgtacctggagagaaagtgagaagctctagtttgacggcacctgcttctagtttcgaataatccaacaaactatcgatgatctaaaacaagaacgtcaacataagaacttcgagattagtataccgatcatgattctcaagatggaacaagataatgcgataaaggcccacttacctcaagtagcaattcacaactttgtcgggctgttccaacaaattctctctgttccgagtttagagttgtttcgctaagaagacccaataggccgtagaaggaactaaaaggcgtccgaagctcatgggacatagaggccaggaaattggacttgattttggtagcagtcattgcctcttgccttgactttcgagcttcctcgagggctatcatagacaacgatgatatagagtcgatcagccctcaatcaaaatctgagataaaaatgcaagcgaaaccacatacacttcttctgttgatcgatcatccgaatattggcttgtgttgctctatgcagctacacgtacaagtagtaaatggcactatatgagtatatagcgtcgaaggggacgtgaacacaatatacttaccttccggaaaagtaaggcattaccgatcgcgatcgaagcttgtcgcgcgaggatttggagaacattgacattggatggcgtgaaagctttcagatcaggtgtagttaggttgtcgcaatatacagaccacgtagaaggcaagtgagaaagactattcggatagatgggtagtgatgcagatcagagacttaccgttggtctttccagatgttaagtaaatcgcacccaacactaaactcttatgctcaattgccctatcgtggttattatacgatgttgtcagtacattaggatgagaatatataagaacattatatgtctgatgtattcactaacaagcagactaccgattttggatgttggcctggcgctgcttgagttgcagacatgaatcctaagtaaaccaccgaagcagaaatataagcttgagagattaggagacaccgaatgaggaggtttttgacggactgggatcggtagcagcgtttgataagaataccgtctccttagactgtaatacacgtcccatgacggcttgaaataacgggtccgggttttctgatatgaggatgggtcgttcaaagtagacacaatttccaggaagaacaagcttggtggcaattgaaaactggagaaccgagaggaaaagttagtgagtgttgtaagcatcagttgaagtgcgtatacatacttgaccatcttcaagtttgactactatggatgcagtatcagcctgttcacaaccagttcgtcagcttacacagaaccaatgagcaattctctgtgttagaaaataatgattcgccttacaccagagtattctactgtcaactcagttaggctttcctataaatccgcaaacgatcgatgatttcaatatgaaactatgatgtgcactgagataagagaaggcgactcttactagagtagcggaaacattgacatcctgagttagagagaaaaacgggtgttgtcaattaatgatgtgaacgggaacatgagcagtatgaacaaacatacggaagatatgacttgggaagccttaatgatggcagtgagatcgtcggtagtaaggttttcaaagttcgggtgctcttcatccgattccgcagaagggaacgcgttatagaccggtcgttgtggaaccgacactgggcccacagcagtataatcagtctgaaccccgatctagaaatgatgttaaattcaaacaacactgttaaattctatgattttccataaagatacggtgaagagctgcgggcatacttcacttgtgtcagcacacgcgcgagagatgatagtatcggtcatgacgattttgcttgataaataatttgagattccaaaggatccccagtgggtatgccttgcgatagccctgttttgaagccttcgtatcgttgaaatggttaaaacgatgtcaaaattgttcgtagtgataaaaatacgaagattggactcactctgtaccaaattgtctaaaacggacaatatagaaattgataataagtgagtcagaatgttttcagtctgatactaattcagtatatgatcaaaggcaaaatctcacttgactccacttcgcacgaaatgactaccagacaagaacaatgcgtttccctcgtcaagaacccaaccaccatcttgactgatgaataatgagaatcatataagatatcagaaaatcaagtcaggtcactttcgatctcctaccggcacggataaacgctatgaaggaacgtacgcaagtttgacagcttcgtcatagagcctgaacgcatcggaaccattatcaagagaagcaagttcggcttcgaccaaagtgagccaatgcaaaaagttcacagatccggtatcaagccatctaccaatgaatcgctggttttctgcgatctggtctcgatagcgcttctccgtcgctggtggtagagaggttctaagacattcaatcatagccaatgaatgatagtgaagtccagctcgaacatgataatgactagttgacaagactgatcagtgaggtttgattagatcacatagtgacatgagagaaacatactttggattccaatccctatctttccaacataaaaaccctgtttcagccgcagccgcatgccatcctagcgaatatagagcaagcgtctgtgcgtcccatgcgatgtgtcagtatttaacatcttgtgtcttcacaaagtgccaaatgccatcataagaattcaccttgaacgatgcagtccattggttgacctgtggttatgtcagacagaattgagaacaaaaagaaaacattagccttctcgaattcttcagattgagcatgatcttgaagtcaactcacgacttctgctgcgttggcgggataatcagtggcataacaaaaatcttcagagtccagtatagtttctggcgatgtgttgatagtctttccagcaattgctctcatcgtgcctgcaacgcctctaatcaaggtcaccatctcggtttctcctgcccactcgatgacatcggctatagcttcctcgcaaaacagtaaaccatctgagacatgttcggaggaataaagtctggtttcaatataaagtaggacgtgagaatcatgtcaaccattagacaaatgcatgaaaacatcaagcaacactcacttggcggcgagttgatggatgactccgagacaggagtatgtcctgtctcctgcagcgagagaatactggtgatgcaaaacaggaagatgagtatgcatcatggatcaaagagaatttggaataagacctaaaaacgactgaccttagtagattttaagaactaaagatgtccgtatgaacaagaatttatcaagaatcagccatgcatcagggaacatgcaatcgagaagaagagaacctccgagacatacgcgttcatgattagcacgaaggctctctccatcaaagggagcagccaagattccgtaaagcaaagtaactcgtctacgaatcgaatattccaatcatgtcagtttggagaaaagtcggttcgattgtgtggtgcatcaaggagaaaaggcttcaccctttctcggtgttgttcgaccatgtatcggcaagttggagagcgagccttgaaattcctcctgcaaagcggaaggcgtcatggacctcggctatcaattttttgagacaacgttgtaaatgtcagaaagctgcaaatcgattaatccaattagaaaggtcaagatagactgacaggcggttcctccaaaccaggcaaacccaagtgaacttgaggcggtcattccgtgtttcaaagaaagctgcacgatctgttaaagtgttgactcagataagtttcgagtgttctctctctattttgaccgtgagacgcaaagattacgtaccatcaagcctatcacatcgctcaggccgtttctagcccaatacgcagctgtcgcacaatccgacgtaattagatagaaattcagtcagcaaacatgaacatcgtgcaagatttaaagctcaatcagagccattattcatgaggac

SEQ ID NO: 1896 - DNA, 6364 bp, Xanthophyllomyces dendrorhous
catgaggacatactggtgcttgcctccgaaaggatggaagaagcaagttcgattctaggatctgtcgcttttggactggacaatatgttttccatccccgtagccatgaccatactctttgtcaactcatacctgcgagattgaaatcaggagaaggagactttgcaccgttaactattattctgcttgttgtttgattaggaagagaaaaatactgacatctcattgatctcttgttgggagtattgtttgctacatcgaaggattattatcatttgtcagtttcctaggtcttgttcgacttgatcatttcacttacgcgacatggatccccaatataccaagtgctacacacaaaacatcgatcgtaagaaaaagcgtcagtctcaatctgtacatcagcgagatgcttcggacaagagggataattgcccaagatttaccttcaacaaaaagattcaatgcctcttgcaaagcaccacgcatccaaaagcttctcgattccgctcggaatacacgagctctgtctacaggacagatgcatttctcatggagttctttcacaagtactcctgtcatcgtcgagtcacctttccaagtaagaagtctttttgacagagtcatcagttcagagatgtgcttcatcagcccgtgtatccaatgcacatcaggagaaggttgtgactcactctatcaaagatagatacagatcaatcgtattttgatactaaagatgagagataattccagatcgaaatgctgttactatacggacaaggatcatggccgatcgtgttcacaaaaaagttgttaacttacttctgtactccaagagtctggttctaaaagttctttacaggcttgaatatatcgaagagcagtctgccgaaacaagacaggggtttacccatcaactagaactctcaatcgtgatgcgtgcggacgaggatggaggactcacttcatgagcaccctgagcgatcgctatatctccggcagcctgcaagatttttctgtaatgatttcttccatggttctcgactaccaacagtggcacacatttcaatagatgttctgcaatctggaagtaatccgggttagccgacgcgagtaagaggtctgctatcttcagggccatcatctgaacatcgcgaggcacttgttcgagtccaaggttgagagctgcttgtcgatatcgatcgtgcgcaaaggtaacccactacaagggacgaagtatcataaatcatacaaatgatcagagaggaaaaggaagaaaatcagattcataaatataagagagaacaggttggcgatcacgtacttctcgacctctgctaatcaaccaaccctccgcaagtgcaacctggagtccattgatgcttcctcgagcaagtctccctagacggagttcgtcttcagaatcatcactaccagaggtttcctcttgatccatgagcgtgatgatatcttgcggtcggaactatcaaatagagcagtaaatgggcacaaaatacgtcgttggtcaataaagaaagcagaggagaagaaaagaaaaccaaattgattcacctgaccgccaaagaaggaaccccagactagaaatctttgaacatcatggggaagatcattcaggtgttgcagtaagaacgagatgtcattatcatcatcggattgaacgatctgggagaagaaggtggattcgattgtttggatattgaatcgccatatgttgttagtccaatcaaaatagatgtgattatgtcgtttgagcgcgacgagaagatttcgaatggagaatgcgtttcctttagtgtgcctgttttgacggttgcgttagagggtcgctaagacattagagttacattgcaaaacacaagaaacagagaggaaggtgactcgcctatagagcatgttgaccaagggcgtcaatacgttctttaaggatgagattaagggtcaaagaaatcttagtatcgtaaactatgtcatctagccacaacagaatggtgatgatttcgttagagaagcaaggcaaaagatatgatgctaacttcatttgattcgtgcaacgtccctttcaccagtgacataacggatgaagccgagagcggtgagaggtttatataagttgctctggatccattcccaaagatctgtctgacacgggcgacaaaagtctcatcgtctggtcggagggttgtgatgatcagctttacaggcatcgtgtcgacagataatttagggtaaatatgtcagtcggctgttctcacagggaacgagattcagagagcagcttggcaaaagggaactaaccatccggattttagcagaagcgatcgatcgaatcaagcttagcgagggttcatcagcgtagtgtctatcatcgagcaaaaggaaagcataaagttcagccaaatgatcctattggccaggtcgataggacatcattgaaaagatagagaatgcatacaagtcatcgaagaacatcgtgagcacttgggaaagaatcagaagcaggagtgcgaaagaatcagcaaaactagtttccgggaggattccgatacacatacaaagtacactgctcacaatgcatctgagctaatgtagcaatcacattcagacatagtgactgaaaccttgatctgctttcagaactcggcaacggctctgctggagagtgtacttcgaaaccaaagagcgagagaagctccttcaattctgggaccgcgtgctgtttaaagaagatgtatcaaataacattgcccccaacagaaacaacattttcttaggacaaaacatgcaaagaagatacatgaaggacaaaaacggacgaacgaaaagtaactgaatatttgataattgaggacccagccgaagttgaagggcatttacgaacgcatgtaagtcggattggaattctgtgaggagttgcttgaagatcaacgaaagacttgacaaaatagccgagtagggcgatgtctcggtagctatcgggtcaaattgaaacgaaacagaagattatcagatacaaaatctgaacacgtcgagaacaaagctgaccgaaccgtcaaatttggctacaccgtagaatccactacttcggcagactgtttgacttgccagcaccaaagcgctctatcaacgatcaaagacgatcgatatcagccaaaatctcaggtgaagaagagaaagagaacagaggcaactgcagaagagatgacgagaacgaaccttgccgactccagccggcccggtaatgacaatagccctagcggccgccaacctctctttcgcattgccgtgagacctgacattccctcccacaaggccatgtgccaacacatgagcatgtccaagatttgaacttccctgaccggaatgagtggctatggactccgatctctcctgggagcccggtgaatccttcaatgtgccggtaccggtagtctcattaggataaagtgaactgtctagttttagtttgccaaccactccatttccaactcctacactcgttccgcctactccgacagatacgccgacgacgtcgccgctagctgagcctccgatcgaaaatgtggcggaatccatatcgctccctgagtcaaccgtctgggcacctccacctacgaggtaattcgtagtagtggtgggattggagtgagtgacacttcctcctgtggaggaacttggatataagaagttatgggtggcgtaatgatttgtgtgctttaaacgagatgcagttgaggatgagaggtcagtgggcacagaattcgatggaaagaagagagagaaagggagggagatagaagcatacggtagatgcgacgcgtttgatgaccactctcatgatttctaattctttcgacctcccgaactgtatacgatgaagaatcctcatacaacatcagtttggaagaagaagggaagagttgcaacctctgattccgttccagaggaaatagagcttctaacgtaccagtttgttcggcaagacgaattctgaaaatttatcctgactagcgatctcaaaaaatggtaccaactctgctgtctcgtttttcgagttccaaccttcagtcaaccggtgctggcatgttagcagatccgccttcaatccaacgaccgaaagatatctgtcatccggatttttcgacaacaatttgaagatgatggcgctgatgactctagggacgtctggtcgaatctcatgaaccttaggcgggtcatctgcgacgatagatttgaatacttcgaatgagcgacctagaacacagaaaagcgcgcgagtgaagactcttgatcaacagagggaaagggatcacagatacgaagggagagaagagagatgacacgatggataaaccttcgaaagcgacggaaccagtcaagattgagtagaacgtcatccccaggcaatagagatcggttcgatggtctgattgaaactgaactctgcccgtttgttcgggggctagatagttgagcgctctgttcgcgcgtatttatgtatgagttcagatatgtgatgtgtcagatcgatgtatccgaaaatgaagtttcaagatcgcgcgcccgcactcgcttgccatcccaccacgcagaagatccagcaccaagagggaaaggagggaaactgacctgacgatctgttttcgttctttatctcccatcgcttcggaagcgaggaccaacccattcggcccacccattccttccaaagaaattgacctatttccgaaatgtgcccatctgatcgttcctgctgataagttcaagctgagaaacatttgcgagagagtggtgtttcgcgtttgagattcaaggggaaaagacgctaagaggatgagtgaagaagagagcgtactgaaaagcgttcggtcggatctctcgatggatgatgttattactatgaagaagctctacacactgcgtcgcctgaactgcgaacctgttgggagaaagaacaacgaggatttaaggaaatccctggaaagctcgagataccattggacatatgaacgcactctaagaaagaagcaatgtcgatatcgactttccggccttctccgtctctatctacatcctgatctgtaatgattctttccaactcagccatcggcgtgaggtcgcctccgttatcgttgtcatcgtcggcggcggcggcgacggtggcgccatcatcaagatcagtctctatatgatttctcagcccactcatcgttggctgatcttttgtcgtcggtatcatactcatctcctctcttgacatcgggacgtcttcctcttcgactgagccgaccgctccatccgttctcgtgctcggacagagaaagctgtcggtctcgaacgacggaaagtaattgggaagcgtattgacaccaggatgtttaagaatgagcacgcagacatttccctgatccggtggaattacaaaactgttgttgaggtgtcgaggagaggaaagaaagaaagaagaaaagagaaacccaaggatgtcagtacagccatgcgaaagcttctatgaggtaatgctacgcgacagataaaataaggagaatcttacaaatcgatgactctcaagactcggccgaaagcctcgtagttctcactcagttttcctaatatgtgcatctctcgctcgatgatgagcgtaccagaagtgctataagaggcgactttggcaaatacattggacccatcctccagactagtcccgagtgagatcatcgtcctaatgataccgtaggcattgtccatatttcgttttgcgagagcaggataacaaggagagaaattaaagagctatgtcaacacacaggtactctccagcttgaaggcggcaaaggtcatatgtataaaacaaaatgaaaaagaaagtaacagagaagaagactgacgaggaccctacgtctatccatggcactgggctcgcaaacttgtatctcggcacgctgaggaccatccttctactatccgatggatctggccgataatataaattcggcatgaactgttccctcccatgcctacgcttgaatggcttcatccttcccgtttgtgtctagaaaagaaacaggtgaggcaagaaagaacgaaatggaaagaggtggaggatgatagagactagcaagaaaaaagcccggtaaatggagcaaacggatagtagttcgactgcgcataatcgcacgcgtcctatgaattgaagcaggtcaggccaggcgttggaaagccacgcgagaagacatccgttgcgctggtgtcagggatgtgacctgagtgttacacctcggtaaccttcttttggttctgttgtttctcctgcctcggtattccttatgctctctcattacatcaacat

SEQ ID NO: 1897 - DNA, 2314 bp, Xanthophyllomyces dendrorhous
gagcaggagatggttacaacaagacgagggatgatttaaagagaagaaatcaggatggttctgcactcagtccaactttagcccactgaggttcagatagatttaaccctagttgataaaaaaaagatcgaaaagattccgccagaataaccaaattcgacaattcttttttgcttttattattattttatttcaattggaataatagggtgatcgatgtgatgtttccagtgtatgtgtgcgacgaggtcaagcttttaatttggtaagcaaacatatccatagttcattaacccgggtatgcgagaagatccgatacgacctacagagccaacattttcgacatatacgtctgttgaaaagtagcgcacgacaggatgtagtgctatacacacacacacatacatacagacaggttaacgggcaaatcagtgaacaaatgaaatcatgtatgaatctacagatgtccaaagagtgattggacatcaccgaccaggtacctaccgaagcataaagaggactacaaaaggtgaagaaggcgtcgaaaggaaggaaaacatgaacagcagagaggggatgtttagcgggcttgttaactattgacgatctagttcgatcgaagaactgcctcttttccttgacggaagaagtggaccagagcgagaagaaaagaggagtttttaagcggaagaagaaaaagagagagaaaaaagaaacaaatataggtaggttttcacgaccatcatgtagagactggaaatagaaagggagatgaagaagggagagagatagagatagaaatagaaatagagcattccccgagttaccgttgattcaaatagagcaacttggaaacacttgctagatgtcggagctcgggaggaccgttcgagatgatcccatccatggatcgagcctgagttttagcagacaaagaatcaatctattcacatccctgcctatcagtgttgaaggttagatgtaacaagagtaagaatagtcaacaactgtttgactccttgtgttcttttgaaaacggtgattctttgtctagagtaccccatagcttgaagtgctatggccaagacgcgccaagcgattaaaagacacgtgtggataaaacagaaaaaaaaaaaaagaaactatgaatatttgtagtgaggcatgccggaaaaaaatgaaggttcatattatttcacagttaggcgcatgggccccgttctattgacaactatccacacggtcccttctttccccttgtctgtcgttgtgctgtcaccttttccctccttttacgtctccattgacaaccgcatatacccaatttcacccacatagatctgcatagacctccagactcttccggctgaaccctttccgacaacatatatatatatcatgggctcagttcatagacgtcgggcttctgttcatcatcctccaccctcaccggcagagacgatcacgccttcttccctggcaaccagcacatcaccgacaagttatcatcatccttccttggtcaacgtcagacctagaagaggatccaggtacgtctataacagagaccccgacctaggtgaccgttcaaccaacgtcgccgatcgatcgtcagacaacagtcaacaggatctttctggttgggtagtcgacagagagctcgaagaacagtcccatatggagtcgttccatgtagatgagttctcccatatggactcaccatcgtctacgtctagcccctcctcatcctcctcgtcttgggcagacttttcggatagggatccgtccaggcacaccggttctgcttcgttcctgacggtacctgagatcaactcggccggctcgagtcctcaacagcaaccgatatccctgccttcttcttcatctcatctgttcccttcgcctctatctcctacttcgacaacgtcgttcactccttcatcctctagacgaccaccctcgctgtcagtacggatacccagtccgtccgaaccaatcggcacctcggccattgtctctcgaccggcgtcggctcggtcgaaacctcatatgaacagaaatccgtctagcgtgtactatgacactccgatgatgacatcctcgatgccctatgatgatcctgctcaaattggccaaattcagcctcagagccaacaccctcatcctggaaactatcctccctcttccccagacagaaactctatccactcggctacaagcgacattgacctcctacctatccatctagcagcctcgacctcgtctgcctcagtatctcctcctccttccccactgtccaaccggtctctacctc

SEQ ID NO: 1898 - DNA, 3248 bp, Xanthophyllomyces dendrorhous
gtccaaccggtctctacctccttacacgcccagctcccacaagtccgtcaatccgtactttactccttaccttgacctccatccgtccgcctcgggctcgtcacttgcctcctcaacagctggtctcacctctggtccgtatctaaactcctcgagcaccactcccttccattcggcctacgcctctccttacgcaactcccggaatctttccagacagtgtctctcatagcgagtactttccgaacggatcgtacccgccgccctctacttctcaagacggggtggttctggagaaattcaccggagacccttcgttcggtcgccctctcagatctgggcaccctgctactaaagatagcgagcgtccccagtcgtcgttctcccatcagacgcagtctactgggaggtcagccaacagactccaatcagttcctcaaggccaggtcgtcaaggagaaaatttcatccctaatcggaggaacccaggtcggttggaacagatggtggaggaaacaagccagaaagcgaagccgggcgagctcgatgggttatgataccatgggctccgttggttctaccgctagagcttcaggtagaaaaaccagaaggaagacatccaaactggttgcgtttggtagatgggcttggcgctgggtgcccgaacggagggagacctatgtgagtggatcctcatcggcttggtttgaacaggttttcgagatggttgagactgacagtgcattgaacctatctttctacatttggaaatagatccttgcgttcttcttattcatcggctttgcctggtcccttaccatgttcctcatgtggttcctcaatccaggtctgtctcttgttttgttagggtgtctgcaactcgatctctttgatagtagttcttatttcctgttttgtatacagacaaacgggcggtttcctggcatccactgtgtctctcacctcacccgagctaccactcaatctctcatacctcttctttagtcctccaaacgatcccccttccgtcgatcgactcgtctctatcgtcccttcactctggccatccgcgccacactaatcccgtccaacatgctctacttcccaccccactccttaccgcgtcctcgatcgagtcggacgcgcttccaccagtgggcgtgttcgtcggcgtcttctcgaccgacaagagttttgaacgaaggatgctcatcagaagcacctgggcgagcagacatcgaatggagggtaagggtgcccatggactgggcagtgttagggtcagattcatcttgggacgaccgagctggcggttgagagagcaagtcatgatggagatggagagtaagtcgagcagagtcgtccttttcgaatttctttctctttccatctgacctaacctcaatcttattttctttgtgcggtccttatttctctcatcgaaaactctagcatacggagatattgtccttcttgacatcactgaaaatatgaattctgggaagactcaggcgtacttctcctgggcagccgagaacgccatggttccttctatcagtacaatcaatgatgaatacggtctagaggaaaagccaccgaactacattgtcaaggcagacgaggattcgtttgtgatgctcggggagcttgagaaacggttgaggatactcagtggaaaaaagatctattggggttgtaagtcttcttatcagctgtcatgtgtcttgtttcaatcgtttccgtggggctaatgaaaaatgtttttacccaatccaacaaaaaaaaagatctggtcaagaaccaattcatgggcggagaatgctatgcgctctctcttgatctcgtccgctacgtttctacatcgcctgccgtgagagatctgatccacggcgcagaagataagctcgtcgcccggtggatgcatttgcacccagagaaagaatcaattctctgggtatccgatgcctgtttcttctatgatcatcctaaagcaggaacagtttattctcatggcttcctctatccaaacactgtccagcggatccgtgccgatttcctttccttgggtcagactggttcggacgaacggagaacggtggaaggagagtacaacccgacgccaggatttaaccggacagcatcatctttggcttactcatccgtttgcacgttcggccgaccgtatagacccccgttaccgaatctgacccctctggaacgggtggaagctctagtcgaagggtcagaaatgtctctcctctcaccatactcttcttccccaaaaacgtcgcctctttcaccagaaacggtgatgaaacgaagaccgtcgatgaaccaaaggtacctcggcgattgggaagcaggtagatggggccgaggaacggtcgtggttcattacgtcaaaaataatgagtggtttctcgagacggctcttgcctttctgggaaccacagggacggacctaggaggcgtacttggtggaggtcgtggagcgctcggtgcgctcggtgccgacgttgatggtgttggtggtgggggatctagaagatcgggtgcgttggccgcgctgaacgctgagatcaaggtcgacactagcccagatgccaaagagatcgataagaaagacttaggaagagttgatcttgattcagagcccgcggagggtctcctgaacaagatcgtcgagcgaacgaagaatgaagatggagtagggaagggaaagtaagaagattggggaattttttaaaaggaaccggccaatcgtcaagtctcaatcgggaaccatgtcaataggatcgggagggatccaacaagatcggttggaggtatcataggtcgagtcctatgaggtggtaataaaataataataccccttctcgctttttttggaggcagacttgtcaacacccgcgaagggggtttttcataggtttagaatctttttatttattctagatttttggatcggattggtttgcttttcatcgctggatcttttcttctcttcctcctctttcttgcctcttggtcaacatctttttttgtctgcctttgcccctgcctttcttgctcctgccattacatcgtcattattcccctctcaatctaacacaacaacaacaaaagttgcatatggtacataaaaccttgcggcaggagaaaccgggactcgacaacaacaataacaaaaaatcctctcgaattcgtacacgctctgctcacacttatacgacacattatatatgtgcac

SEQ ID NO: 1899 - DNA, 7577 bp, Xanthophyllomyces dendrorhous
catatatacacatcaccaagatttttttttccgtatatcaaggttttttttacctatacatgtttgtctaattctcatttcagtctcgtgtctttttgaagcgacttcggaaagaaagtctcaaccatcaatatgcgaataaggatgttatatgccgtgcgagagggagcaaagacaaggttacatatgtaagtctatgtataagtttgacctggaattgaaatgaacgaagtagacgagtagtaacgacgagagagcccaatgctaacaatgcgaagatagttaaagagaatgataggaagcgatggaagatacgttgcttagattctgtcccatgtgaagttcgaaacgtgacatctggattttcatcatccatcgcgtcaacagaacgagagccaacgttgattggcatgatcagcttcggtctgtgatttacacggcctcaaaaagaaggaacgatgcacttacagatgaccgcaaccagaagcacaagtttgtccatacacttcgtcgacagttgcacctcccggacctaacttcaagcccagccgatctttttccctctctctttctcttcccctgtctctctctgttttgaaaccactcgaattcagatgtccagtacccaacggtgagatgcctctctcactttccccggctccaggatttacgctaaagcttgaaccgaatgaagtggtagctcgacctggggaatcgcctcggacagtcacatacgaaaggttggattggtaagcaggagatgtttctcgagaggcgttttcgattggatccgtttcttcaaacggttgttcaggtggttcggtgttgaagtaacgttgcatgcagtcctgtttcccattcacatcgatgttgtcaagattgatagaaaaagatgtagatatcagaacatgatgagttggctgaaagggaaaaagatatataaacccacggagtgaccaccatgcccgcattcaccacaaacgataagcatccctttcttcacaggaagaccactgccagcgtgccaacccaacgacgcatatacacaatgagagacatcagactcagagcaaaagaacgggagggataaagacaagataggaacgaaagataaccaagaacgaaccagaaaccacattcaactgcccattcttgggactttgcacaccatccgacacctccgccatggccatgaacatcatttccttcatcatcttgataaggtaacgcatgtgaagggtgattcggacaagagagataggtcgttgtgtttgcctacaaaaatgtcgaccaacataggaatgagaatcgaatcggtcgggctataagcttcgacattaggaaggttagagacggtatttacttgagtgagttgtccaagactatagacaccactgaatcgacgtatgtgggcagcttcgacatacagctccatggacatcaatcgatcttcccaagaagaaaaagaatgaaacgtcttcagttatcaacgacaaggaagaagtcagactctgagatgcagacgcaccatgatacgcagtaacaatccgttcagatcttttgacagaaacgagcttgatcacaggactagtgacgataatgatacaagccgccatctgactatctccctatgtgtttctcaattttagagagatcagatgtagatcgataaattagataaagataaaagagaagaagaacggagcctctagactgaccatgttgagaaacgtctcgacccatcgtctcacactctcaatcctctgttggtgcaactccaaaaaccaatgaaagaccaacgccggatcctgaacaccatcatccaaaccacccagtctatttcgctcattccccttcaaatgagcaagtccgtatgtcaaagatgatcgtctatcgtctagctgtacagcatttagcatcggactgttagaaggcgttaaatctgctctttgagatcccgccttggaagcagtcattttcggctttatagatggcggagtgggctcattggtcttgtgattaattggtagatgggcgtttgacgaataagaggaaggtatgggtggtggcggagcagacccattagagggaagtggggcggcaggagatttggtcggcgtagcagttatggtcattgggttggaaatgatagagtcaaatccataaggtccatatggtccgtccgccatgtcatcgtcctctgagctttctccatcatcactatccacagcgctcaccacattaggcatcttggagtcccgtttgagtagattcgggcgatttacatttgccgatggagatggccttcgtgatcccagatgagactgtgtctggatcactggacggtaggtcgagttgaaggatcgccgaccggactgatacactgaagacataacagaaggtggtaacatcgcaccttcactatctgaagacgaggatgaagatgatagagaagaagagtctatatcagatcctgtcccacctcctgattcgcttgggaattcggtatccatattgagcatcgtcaccggaagagtatgatctgatgggcctcctcttgggcttgactcttcttctagtcggacttctctataatctgcgcttggatttcgggaatgcgattgcctaagcctcgaaccggacgggaagtttgttgcgggtaatggcagctctcttgatgggttgccggataatggagaatgactatgagatcttgaccgaggttttaaacgttccacaccgatgagtagcggggattgttggcgggaagaaggtttaagctggccacgcttgataccagctcggatggcggcgtcctcattgaaggataatcgatgagtaccttgaacgggaatcgctttggtatcggcaagtagcgagcccaacatgctccacaccttgtactcgtaagctagattcgcctcaagagcggcctgaacgatacattccaagaagaagaagaaaactgagtcaactttttacgtcagattgaagtaacatgatatgcagatatatagatacctgagcgttctgctcgcagagtttttccggctcagccccatgaattcgatatcgatcagcaatgaattcaaaccgagatttattgaaccctggaatctcttgttccatcaagacttgatgaggctcgaaccggtcgtcccacaatgatttgggttcctttcccagaagagccaaccggccagcaaagtccggaatacttcgataaagataagatgatttaagttagcgaaaggcgatccctttttgacgagagaagaagagagagagaaattctttacgaacgggtcatcgaaaggaatttccccgggttcatgagcatccgccacaaacgtcaggttatttgactggtcccaagcaaccgtggatcggggaatctgatctaatggccgactgtgatacctgatgtcatgttgaactatccctccgttcttgtaggccgcccagagagtaccgtgagtgttccatgcaagttcttgatgttcgaaggcaaagaaagcgttgatcagatttggttcatttaacggtctctcaagaggaatcgatgtgaggaattatgaagaaaaagctcagaacggaccagctactacgccatcgcctccttcgagaatatactttgggacaaactctcgtctgatatcccaaatctgaattgatggatcacctgacggatcttccgtcattgtcgagactgttgcaaaaggcacgacagcaatttcagtatcatggccgggtcgccaaccgagtttcgacactggatgaggcgtccaaagagttcgatatttggctttatgagggtctgcattattgtagatctaagcaacagacgcgtcaagagagatgatgatgtgtgagaagtcgaatgcaaaagaaaagtcaaagccagggaagaagatcatacgaagacctttctgtccaatccaccgctagcaatccaaccaccatcagactttccctcacccagttccccttccctccctgcttctttccaatccaaacacgcgacgccaccgtccccgtgctcagaaaactttctgcccaacattctgttccctttcctccaatccacccagccgattgttccgttttctagaccgagaacgcacgaaagaggattcgtcggacaaacagcaagcgcagttatgggtgacgttaatgggttgagaaacgagtaggatagagtagctcgggaagaagcaggtagtcgaaagtcatatagacgaagaatcgagtcgtgtccagcggtaagaagacagggaggggtgagttgtccgtgaggtgctagtcgaatgcatgatattggccgtcttgtcggatccacattcagagtgcttactgtttaacgttgattcagaggatggaagtcagacgtctggattgaccacgaacaatctcgagaatcaactcgacagatgaatgtatggaactcacggatttttgtcggtgagttgacatcccaacaaaacactccaccctttctggaactcacaaacactcttcccgtctgggaaccactcccccatctacattcgacgatcccacctcctcctgtcgcgtctctcaaaccttgaagtctggtaatctctcttatctcgacccctcctggtcctctacctaagagtggttcgtcttttgagttcttttgttgctgggattcctttttcagacttggagggggcgtgtatgatgcgcgctgagcggtccgaccagtacgagtcggagcggtcaccggggatacattcggagatgggatgaacggcgcgacggacgtagagcctgaagagatactagatcggttatgggatgaggaacgatcggacgctgaggccgaacgggaaggtggtgcacccggcggtgtgcttgggcgggattgcgaagcgtatgacgcattagatagagagaatatcggaggaacgacgtgcggaggtggtgacaagggtggtagcgaagaggggctgctgattgagatgactctgagaactgatagtatccacaaacgagttagtccagataaagtgacgaccaaactagcgaatagccatgtatgtgagggagagagaacgaaagaagagacaaaacgaactatcgtttccggcgacgaccgctcgatcactcccctctggtcccaacgctagtccagccaaaaggtttccaagttctcctccttcgacagctaaaggcctttccctttcttctcccttccacctaggcgctttcttgctttgttctgaactttggtccttgttcagaatgtgaccctttgcgtatctatcggccagcctaggcagaccatgttccatcccggtctcccggtcataagagcctacaacgtccggtgagacagtgtactctggatacatgagataagagtctctagggtcatagagcgttgaggatctggctggtagtgcagaagtatatgtgactggagaagttgaaagagggaaagaagatggtctgggagggctgagagaattggaagagtagaatgcagaggcatttgaagaaggggtagctgatgacgtggatgataggttggacgcatagctgaagcataagtacgtagaatagaatatacattgggcaagatggtgtatgttgagaatccagaattagcaatccagatgattcgagcaggctaggcgagggctgggagccaacttacctggagagtacattgcctagcttgtgcatcgcaaaatattttcgtccgagacacggactgaacagaaactcctatgattcgattgagatctacaagggtacaagagaagggcacaagagaagggcaagagtgatggcaagagcgatggcgatcgtgatggcagcagttatggtgatggtcaaaagaaggtgagaatgttcggagatcgcctcctgttgtcactcagatttgtcctccggccagtcagctctttgtgtcctttgctttccgtcttgccgcttcctttcttgccatggaaacccagatggacgtatcagggagacatgttatggagacaagttcatctcagagtacaaatcgcgtatattcgagcgcccattccttctgcgatcgtgccaatccagagtgtgctttttcaccgcatctatgcctgatatctagcgtttgtgctttccttcttcatcttcttcaccaaataagccgacgattcatgatctgactgcttcgtatactgtcgagttccttctgacagttgacgtttcgagatccagctggttctctcgacaatttcgagggcatggcgaagaagagcttggaacgcgattttgatttcgtcgtcggtcgtgcctctatcgacggttgcagtaaaccaaagaaggacatggccttcatctggcttgacagtcaacttcagtaaagatgctgctaagttagattggtccagggggcttgtgcgagaccggtcggcaacgacggctactttgaatcagatacaaggtcgaatttgagtttaaacttggacatatgaaaacgtcttgtacaaagaatgaaaccaaaccgaacataccggctaagaatcaatctccttccttgttatattccttcattgagacttgactctttgattatgtctctcttgaccctttctccaagcttgctcttctacaatcgtcaggtacccgcttgtgatcaagttttcgtgctcgacaatctctctccacagatcttccactttcccctcttgccaatgaagctgacaatttccggccggaagcttccgtgtcggcgatgaagatgatggcgacgacggtgaagatgtggaatttgatcgggcgaccttgtgaagcgatgtcgaaactgtacccaagagagaggcatcttgagtggtcgatggaaccgtccaaaatactcgtttgacaccatactggagcatcagatgaatacaccgccagcacggttttgcgctcaaacattcgcccaagttgttccaccgaccgacgtacaccgtcgtgttcgagagttttgtgagtgcatcagtgtagcatcgttttcggtgatgatgaaggtgcttgacttgaggcagatgcttcaagttcgctgccgttgagaagcagggagacgatacagagcccttgctatcatcaccttggcctgagtgggacacgacgggaagagtgtaagaaggaaaggcgaacaatggagttcgtgcgttgaagtgaaggcaagatcggagggcggaagcttcggcatgcagcgacaagtttgggatagatgtgggactgattgggccttcatgagtggatctaagttggtgaacgacgttggtgttaccttcagcttcctgctcttctccttctccttttccttctctttgttctcctcatcgcacgaatgccgagaaagaacgaataagagcttacctgatggacatgttcttccctctgccgatgatcctgttgttcttcaccaccaccgctcccaaacggaacgtcatctgagataaagctgcctgttgagcacacgctttaaagaacgcgacatgtctactgttcgacgacatctcctaacgatgcgtttgggtgttgatggttgatggttgatggttgatggttga

SEQ ID NO: 1900 - DNA, 1735 bp, Xanthophyllomyces dendrorhous
tggttgatggttgatggttgatggttgatggttgatggttgatggttgatggttgatggttgtatcgggttgtgagagagcggaaaaaagactacaagttgtgtaaacatcgactacaaaattttgtaatagatatcgttcataatcctaatgtgatgatcggtgactaaccacaaattttgcaatcctcttcttctttcctcgctctccgttctctatcaactcttcccatccatcatctcctttcgttcgctttctttaggttataatatacaggatgaggaagcagttggattcaaggatcccagcgttgatcacaaacaatgtggcttcgaaccataggtcgttctttgttctcgtcggtgacaaaggaagggatcaggtcgtcaacctccacttcttactttcacagaccagagtgtctgcccgacccaatgttctttggtgttacaagaaggacctcggcttcaccaggtatgtgtggtcgtgcatataatatctttgtttttagaaggcgcaagataccccgatttgttaatcctttaacccgcggtttctccacagtcaccgaaagaaacgggaggcaaagatcaagcgagacgtgaagcgaggtatccgagaggctaatgagcaatccccgttcgagctctttgttggagtgacggacatcagatatacctactacaaagattcagccaaaatccttggtcagacattcggtatgcttgttctccaggatttcgaggctgtcactcctaatttgctcgctaggacggtcgagacggtcgagggtggaggaattgttgtgcttcttctgagaactatgagcagtcttcagcagctgtacacaatgtctatggcaagtctctcgcgagcttctctgtcgattcatcgtcaagcctctctctctcgttcaatatgtgctaacccgtctctcgatgttgattgatatacaggacgtccacgctcgataccgaacagcttcccacaacgcgatcaccgctagattcaacgaacgattcatcctttctcttggctcgtgcgacgactgtctcgttctcgacgacgagctgaacgtgttgccgatctcaaaaggaaaggacatcgttcctaacgcagctgccaagggaaagcttggaggaaaggaaggtacggccgagggcagagagttgaggacgttgaaggacagcttggacgagacaaagattgtaggcgacctcgtcaagttaacaaggacggtcgatcaggcaagtgttttcatctttttacaccttggacttgtttgtgtgacataaaaactcaacatatagaatgctttctttacctcgcaaataggccaaagcaattctcaccttcctcgatgccattaccaccaagactctttccactaccgtcaccttgaccgctcctcgaggtcgaggaaagtccgctgcgctcggcctgagcatagccgcctctctcgctcacggatactccaacatctttgttacctcaccctcgcctgaaaacttgaagactttgttcgagttcattttcaaaggactcgatgctcttggttatgaggagcaccaggattacgatattgttcagagcacaaaggccgagtggcagaaagctgtcgtcagggtcaatgtcttcaaaggtcacaggcaaactatccaggtcggtcctcctttctcaatgctttactcgatgcttttttctgtgttctctgcgcgggtgactgatattattt

SEQ ID NO: 1901 - DNA, 6224 bp, Xanthophyllomyces dendrorhous
atattattttgagtgtgtttacagtacattcaacctcaagatgctcacgtgcttggtcaggccgagttgctcattatcgatgaggctgctgctattcccttgccgcttgtgcgaaacctaatcggaccttacctgatcttcatggcctccacaatcaacggatacgaaggaaccggtcgatctctctccctcaagcttgttaaacaacttcgagaggccaccacggcctctggtccttccaactcgtctgccatcgaggacgccaaggcgacgacatctttgaaacccgaaggttcttcgggcgcgactttgactcgatcgctcaaggagatcaagctggaggaacccatcagatactctcacggagacaaggtcgaaaaatggctcaacacgttactttgcttggacgcttcgatcgtgtcgaagcacaacttggtcggttacccccacccatcgaaatgtcagttgtatcacgtttcgagagacactctgttctcattccatccggcttcagagctgttccttcagaggatgatggcgctgtatgtgtcgtcccactacaaaaactcgccgaatgatctccagttgatgagtgatgctcctgcgcatgagttgttcgttctccttcccccgattggagagaacgaaaacaccttaccggaaccgttggtggtcgttcaagttgctatggaaggaaggatctcgaaggaggtcatcatgacctcgctcagtcaaggtcttcgaagtggaggtgatctcatcccttggttgatggctcagcagttccaagacgatgactttgcgatgctctctggagctcgtgtcgttcgaattgccacccacccggattactccggtaaaggatacggtgcccgagcgttagaagaattatccgccttctacagcggagagttgtctaatctggatgaccttcccgagacgaacgaggatgacgtgatggatcgtggattcaacgaggaagccgatctgttgacggagaacgtatccgttcgatcaccaaacaggatgcctcctctccttcaacggttgtccgaacgacgacctcctcagcttgactatatcggtgtttcttacggtctgacttctcaattactccgattctggaagaaggccggttacgtcccgctttatttgaggcagacgcccaacgagttgacaggtgaacactcgtgtgttatgctgaagacattgggtgagggttcaggtgttggaaaagacgaggaaggttggctaggtgcttttgctgctggtatgtctctgctttctttgctcctttgttccaacacgtttctgtcctaaagcgcgttcgttttcttcgaatggggataatcaagatttccgaaagaggttcttgtcgttactgtcatataaattccgagagtttaacgtttccacctcgatgagcatcattgaagccgcctctgccggtgccaagcgggacgagtctcatcgtgagtttcatcgtttggttttgattgacgcttccatgtacccaccttttttctttttttcttttttcttttttttcttccaaatttcagtcctggctcctagcgagcttccgcttcatttgactccgttcgatatcaaacggttggagtcctacgcaaacaacactctcgactaccacgtcatcctcgatctcctacccaccctcgccacgttcttctttgaccgaaagctcgagcgagaactcaccttgagtcctacccaagcaagcattctcctcggtctcggtctccaacggaagagcatcgaggaggtcgctgtggagctaccggctggtggacttcccgtcaaccaggcactagccctgttcatcaagtctattcgaaaactatcgtcgaaccttcagacgcttcagaaaaagtcgatcgagtcgacactcgctcctgaacgatctgctgccgaagttttcaactcaatctcgagctctaccaacggaggaaaagagaaggcaaaaggagcgaccgactggaagcctatcgagatgagtgtggaggatgagctaaaggaggcaggtactgaggaagagaggaaactaagggagatgaaaagagagatgatcaactctcttgatttgaaacagtgcgttcttcttttttctaaaaaaaactttattttccccttgtgttctgcgttctgtctttgcaccatcgcaacttgcctgactgaccaacacagtctccaacccgaaccccgttctccatctctaccctgtttgtccactctgtccatctgcccttccccttccacgtccactcctactcccgccatcatcactacttcggcctccaccgatcttgacgaaacagatacgagatcgactctacggaaacagactggaccgccgcccaagctcacgtagacgctttgacgtctcaagcaaacgagcctgggaaaggtcggtcgttatcgaccgttgtcagtgtgaaatcgacgaatcctgctcctggcgctggctcggctgatggaaaccagaactcgaacggaaagtcaggtggggacaaaaagaggaaggctgatgatatcggtggtgggaagaagaagaagaaggtcggagggaaaaagtagaatcggtctttgtgtgcctctttctcttttttttttctcttgtatttatccatgcgactctttgtctcctgagttgtcttcaactttgtctctcgcatgatgagagcatgagccgaggacatgaaaacaaaacggaagacgatcttcctcattcttattcgaccttccactctttcgggatccctaaacccaacccgtctgtgctacccagaccagctaatgaacctgtggtattatcctcttctcccggcagtaaaagttctgctgcccagatggaaagaaagagcgtgatggatgccctggggttatcacaaaagaaaagaaagagaaaaggataaagaacaaagggatttccataagaaaggatgttagatacaacaggttatacttcagagacgatggtaataaaacagcgtaccatctccactgagcttgggaatgatcaagaagtaacaagtgagtatacaccgcaatcatgatccctcttctatacgacaacaggacgcttgtgattttggccgactgtgaatgcccaagaaggggaggaccagatgagttttgacatgtgagagtgaatgaatgaaaaaaagagcacagaaaaggaaaggttgaaaagaagatataaagggacaaacaggagcttcgtcattttcttttctctctcttctccttctccgacttgcttcctgaccaatactgattttgttctcccttttctctctcctctctgcctcatcatcgactgcaccttctgctggactcggcccaggtgccgaactcgactcgtcttcatcttcgctcggagttaacgatccaatcgatgctgttctgggtgaaggagagtaactcccgatctgtcgacggatgaagaggatgatccgggaggccacgtggagtactgtcagtctgtaaatcagggcgattacttttgtgttttcgtgaaagagtacaatgaatgtcagttgtcttgggaaagaaaatcttggttgaggcagtatgagacagattgacgtacagagtggaagagggagcgtgtcgagcctattcaccctcaaatgacaaggagattgtgtcgtaccaagcccaggtcaggagaagagtaacaaagaaggaagagagagaaaaaaagggcagactaaaagaaagaaaaaaacgaaagtagaataaacgcttcactgacaatccacgaacgacctctccgactccgccgacagagaacctgacgagctctccgaggtcggtgacgtgtcttcctctgccttttctctctttggcacttcctgattcgtatgctcctagtccaatatcttctccagccggtctagaccatccgccttcctcttccaacagccagacgctccaggctacgtaggcgaggacgagcgcggactcgacgacgttcgtccgacgaagtctgaaaccgacgatagtgaggaagagtgtagtacttagaacgatgccgaggaggaacgatggatagggtgacgtggtcggaggaggagggaagctctaccacaaagaaaagacgcgcaacacagagcagaagcgaaagagtcagaaaaaggccgtcaagaaagacagaggacgagacaaactcacggtgaatagactccagatggcgacgacgtaggcgaccgagctgccaacaaggacaccaaaccctctgacctcttccccttcccgctcacccaggtcaatccaattcttgacggctctaccaagcgcctgaatgacgaggagactggcaagtccttcgaggaggacaaatacaggggaggacgatctgaggaaggacgaccagagcgttggtgctgtagatagcaggacggacaaagtcgaggacgccgatggagggtcaagatgaagcttgaatgtgaggatgagaaagagcgagggtaacgggaggagaagctgtttgagtatcggaggtagtcgtgccagtggtgtgttcttgcaagacatcctacaggaagaaacagaaggatgttttttgagcaagggatgagggagagtctgaatctatttgtatgcgctcgggtaagtaagaatctagtgtatactgacgtgagagtagagtagaatatttggtatccggtcaacatgagcgagtacagcaggaaagactcaaggcctggttgagagttggcagaaagggaatggacgatattgagtgggaaggaagtcaacgatactctgagaggacgagagagaacactgaccgagcacatcgagcaccaacggcaggccgatgactacctgggcaaaggcgatgaacctggagaacgaccggagcaggaaggccatctctctggatgccgttgaggttgagtgctggacgatggaagactgatctagctggggagacggaggagatgtcgagcccaggcgggatatatgaatagatggggcttaggtagatgttgcttaaggggtcttatgtgactggcggtttatttgaatatgtgagaattgaccaagacagtcttaagcaatgtttacttaagtatatatgaatgtcatgtatcgctacttatgtgttcatgtataccgggcaattacggcgatttgccttttatttgaatgatgagcaaacaatcaaataagatatacccctactgtggccgtaggggtttcataccatgctccagtgggtacgggtgggatgaacacgcagacacggacagaggggatacacagatatatgcaaacagagcgatcaagactgatagatcacatgtatacagcatgtcaggagtgttgttccatgctttatgccattttctttgagagagtcttgctggcttggttccaacagatggtcgacggatgggctggacccaggttgaagctaccagggttgctcgaccgggtgtggccatgaacgagaagagcgcaagcggtctcaaggaaagcgagagaacactataggatgttgtgaatgaagcacaacacacacacacacacacacacacacatacaaaagaaacagcgtctgattgctgtatccgtccatgttaatggaccgattaggaatcgtttgtaattaaaatgatgaaaaagaggattcgaggtcgacgaccgaaatgagttgaaatgtcaccatcggcagacgacagcctcccagagcaaccatcaaaggatctggtgcattcttctctctctctctttttccctcgagcttcatctctccactcaaagtaggacagatcggtccatctttttggtttcctgtcggtggtctattcaaaatcacacaaaagacagagcgttgatctctatcgcaaggcccatgtcgttccaaacaccgtcagatcgttcgctagaccctttctgccaaccgcctccgtctcagccggtagcctcgtcgtcatcttctcatccggcctttagctatccgtctgcatcgtcttctgctactccgtcgtcgtcgtcctcctcctcgaccgcgttctttcccggcggtctttccaaagagttctttccgtccagaccagaggaggacgcagccggacttcgtatcttgggtactggaatggaaggcagggtgccttatcctgcccaatggagttcagagggtttgtctttctgttcttcacggctttcttgctttctttctttccttctttctc

SEQ ID NO: 1902 - DNA, 10458 bp, Xanthophyllomyces dendrorhous
catatgatgaaaacacccgttctcttcttcaattcttttttttttttccacacatgtctctctctgtctctgacttttcaaatttcgtcaccaggtgcacaagaggacacatgagagccacccattgaatcgaatgcaaatacgcggaaagaccaaaaggatcacacaaccaggaggtcgacgagagaatgttcagactcttgtagatcagcctcgatccattcgaccgccttgtccttccgcttctcgtctcctccactctcttcgctcttttgtcttatcctctctttggtttttatttcgttttcgggaacgatcacagaaccggaggtttaacgtcagatcatggtcgtgcctaaacaaggagaagatgagcgaaacgaagagaggagaacactcagcgcaccctttgacttttccccaaccacccagagggacgaccatcgcgctacaattatctcttgatccacagtcttctgcgaaactgacgatcgatctagcggctgctacaggcgtcggtgctgttctcgccacgtcagagatctcctggtcggtcgcctgagatgaaatcccatctctttttttgtcgatcagcatttcgatggcagaaagcatcaaaggggcgaaggaggaaacaagtcagtactccaggatgtcaacatgtcggttcgcaaagccagatagagtcggaacggacgagatcaagattagataactataatcttggcctaaagagtagagttcaagagtcgatagagtaaatcagaactggattcatatggaaagagaaaagtttcgaatagaacgaaccgtttatcgtccgacttgttatctgcggttcgcctaagaagaaaattcaaacaaatatgaaaaaagacaacatcttcagctcccttgaccaggtaagaagcgaggctaggaagagtggcaacgaaactggtgacaccggtcgatttccatcttccatccccgaatgctctagtgttctccaaaacgcccataaacctagattccccaaatgcatcggcaacgctccccacgttctttcccatctttctcaaccggccgtcttcgactcgggcatccgcatggtgtttttctgtcagcgctcggcacaagccgtctgtgaagaagcgagacaaacgtatcatgagacattgagcctgtaaagcctgtaagcgagatagacacaagaaaagagaccggcactaaccagactttcgggtcaggagaatctttgtatcgcccacgtgagcgatcgtgatgtttaacctctttgcttggaagaaggggctcgatgggttatctagtgaatgaaggagggcgcaggagccggttgatccttggttggctgaagataatgtggtcaagattcgacggtcagccttgaggtcgggtggaaagcaaaacagtcgatcgagtaagcagatataattttcagcacggcatcggaaaagaatttaaatggtgtttactcgaaggtatgctagcgtcagtcgttcggctagcgtcatcaacggtggtgatggtgatgccttgcctgctagcgaatatcgactggacaacaagcctgaggaatcccaggtccagcgtggaaaaaaaaaccctggattatcagcccatgtgttctcctcatcgtcttggtcgaccgagcgtcaagccatgagaagaaagaaacatgcttgatagaagacagacgtacctccattgaaccttcgaaagtatccaccaaggctctgcatatactcaaccactccgttgacatcatcccccttcgtagattccacatagtctgccatgtgttcactcagccaggcgcttacgtccttcccgccatgaccatcgaatattcccaagagagccaactctgaggctgtaggtgatgtaggttcccatcctcttgctccttcgccggtgtcttgaccccaaaactcgacaccttcgccgaggctgctaccgggctgcttccgagatttgcctgtccctccgtccagtcggagagagtatttgagttcttccggtttgatctgaacggccgatgcgagcaaggcatcttcctgatagggtcttgttccacgggattggtatgaaccaaccagtttcggaagtgaatatttgattttgtttcctgggttggacaagtgaatgaagtttggaaagtgagaacgtattatctacatgatgcatgtcatggaaactcctttatcatcttatttcatcacagcataaaaatggctgaggaagatgaagacggacctgcaggcgagacacctctcacataatctgagacagaccgtttggctggctgacccaataagatctcactaaaagacgtctgacgcaataaggttctacgagcttgaattgaaacacatgttggacatgaagctgacaccgaggaaagtggcatgcaaacaaagagagatggagagtcgaggagaaggaagaacaagcaacgagatggggtgtgtctggtagagaaagtgatggttcctcttaatcttcccccaaggcgttctctcccgtttcatctaacgtcatcgtccgtcagaagactttgatggattctttcaaagggagatgcacgagagccaacgacattgtatatcccgttcttttgatcgttcgtctcactgatatcgactagacacccagtcggaaggatctcaacgtttttaagcagccatcagtgtacatctagaccgctacacaccatggtgtttcggtcaacaaaccgcctcggaaataattccaaattctgcctttcgattcgtcaaaaaaacaaaaaaacaaaaagcgcgaactaggactcatgacttgacattcgattcgatctgtatctctcaaacgacatgcacaccaacaacttgacccagacgatgtatgggaagaaggaaaaaaaaatagggtggaacaaaaaaaacttgccaaggcccgtctcgatcaggcgacctccgggttatgagcccggcgcgcttccactgcgctacttggcaggctgacgaccatgaacttttggttgtatataaggatatcatgattctcaccctcatcgtttgcatccagctaataatcaattctagctatacatcattcacaggactcatgggataaacagcatgcctcctttccatcgactctttcctaacctatccctctcccaaaccccttcaccccgctcttcaaactccaacatcagcccgtatttaccctcttgtaggttcgtccattctagccagactccgggtcctatactacccagatgagcttggcctcctccctttcgtgtgggttcaccgaacgcatcgagaacgtctagcgcgttcgtcgtagagctcagaggatggggaagtatttgttgcggtgtagatacgtaggtcgggttccgggatgtcgtctttgtaggtactgacgaacgaggcggtgggttatatatatctatctgggagaggactgaagctccagttggcttgggaggtgtgaacgagagggaaagaccgagggtatgatacgctagatatgttgtgtcggctgtatgcaaacggtcaaagtagccaaataagcagaggatagaccagtctgtgaacaatcaaaggagacgtacgatacacctgaacaactggctcgggcacttcatccagaccagccagtcctgtagccttctgaatgagatccttgatctgagaatcttcaggtatgagtccgagtagcttgaaaaggtctatctctagaaggaaaaggaaagaatattgacaaagaaaggttcgattgccgattaattctcagatacgctcaatatcaaccgactcaatatttccaactgaccagctgatcggagtgtctcgattgaagctgcgctcgagagtaatgatgccatggtggtgatggtggcagttctggtctagaaggtaaaggacacgtaaaggagaaaaaagtagcatgggatcgccttatctaatctgttggtcacgtgatgtgacccatttggtcccggctcgaaaaagtgctttttcttctccttacagtcttcttcttcctgtttttcatcaaagaagataccatcagcacaaagagacaatattgcttcagcgtaataggcgggctgtaataaatatgagcttttcttccgaaacaaaacctgtagtggtctatcttggacctgaaggcacgttttctcatcaagtacgtatgtcctcggacggatacttttctctctttttgtgatggcgagggctgacaaaatgagctcggaaattgcttaggttgctagagatagattcggatcatccgccgaatacaagccgtgtgctacgatctctggttcgtctgtttttcaactctagtaagcatcatcttcatactggccatcattgacgatcttttcttctcctcattcttcctagatcagatgtctataactatcgcccatccgactctcaaacgaccgttcttcatctgattcctctaaaaaactcaacccatggcgctgttagagaaaccctcgagttactttgtgacgagaaaaagctccgacaagatctggcggtcagggaagaattcaagttgtccgtcaaacactgcttgatcgtcgcaaaggggaatgagaacaaggatctgaaggaattcaaatgggtgagaagtcatgagcaggtaagtgatgtttagaattccttgttcttttccggcatctcatgtccgccacgcaagggaaatacacgcagatgctgacgattttgtttaatatcatacggaaacaggcattaggtcaatgtcaaaagttcctatcggacaacatgtccgaagcgagacgactgccaacttcatcgaccgctttagcagcggtctcattactaccaaatttgccttcagatatgtctccggaggatgcgcttgagcaggaggacggcctaggagcggcgatttcttcgagaacggtcgcagaactatatgatggccttgctgtttggaaggaaggtatcgaagataagaagggtcagtccttctttgcgcgctagaaagccaacgcccatctcaccttcttcttgaccactgctgaacatgcgacctgtctgtcttatttcccttaggtaacaccacacactttcttctcctttcgtcaccctcggtgactgtgccagccaaacaaggcccggatgaagacaagccccgacaaaagatgcatcatggtcttctctacttctcttcggtggacaagatgtctaactttggacctttgcaacaaagtgacccagatgtccctgggcctgggccaagaccgattctgatcgaacatttccagaccgaagggtctgatgagatgaggttactggcgatgtttgaagttgggctgatcgataatccgtgggagttgggcgtggtcgaagaggggattagatgccttggaatgtgggagtatgagaatgaagagttggatgggttgatcagaatgtagagttgaggaaaagtagaaacgatctggaagtcgccgtgtatctttttccatgtatctataggtcggttggctcagagaggtagggataggaagagagaagtttgttctctctcactcatgttatagatatcatgtcaaccattgaacagacttttcactcagggcttcctaagtgcgcttgtgtgtgtgtgtgtgtgtgtgtgtgttcgtcgtcttttgactgttgagcggtaaactgtgcaagtttaaagtcggatagggttacgattggaaattggctgaagcatgttgagtgatttgtctatgtgtcttgttcatcctttcctcgtccttcctctcgtttgcttccttgtttagcctcttcgagagtgacgacaacgaggtctcactcaactttgggtcgaccagcgtgttcttctgcctttgatcaccatgtctcaccttatcatgcgaataagtggtgaaagacacattgatgatatacccaagaatgtctcttttgccttcacaccttcacaccttcacaccctcataccttcacaccttcgtttcttctcgttatccattcctcgtcattgaagcctttcggttgtgttgcacctcttaagaaaaccaaatcagcaaacacggaccatgctatctctcagatctaacttgattcattctctacctaccttcgttctcgtcctctctcttctcttcctcatcggttcaacaccggcagtagcatcatcatcaatcgttccagctccaacacaaaccattccggactatgaacctacagtacaatctatgcacagacgaacggaagagcaaccaagaagaatcgtgaaaaagtctacatgcccagtgaccacggcggggccaactagcacattggctactgtatatgtcacacataccaacacggtctataccactgtatcgtcttgggtctaagaggcgtcgacagaacgccgacgaagagcaggaagggttcttcatcaatttcacaaggctgttggctgagcttagtccgttgtaagtctcctcttaagcgtataccttactttgccgatcgatgccgtctactctcaaccaaactcgaagactaacccttgaattcttctcgacgttctgaacagaacacctgccgctctgtaccaaaaaccgattcatctttttagccatgtcccaaactatcttccttaatcattcttatgccccaagttctttctataatgtcttaatccatgtatgtgataccctcaagatgcgttgtctgttcgggaaaagtcgcgcagcaaccagattagataagatcgggaattccccattacctccatctttgattgtgttcctgtgagaaaccccaacgaaaaaacaactgaaacctttaaagagagtttctttctttcctcaatccttcatcagcatttatctcctctctcgtttgttcgtgtattccatctcttttttcccagcacgttgatattcagatgttggtcgacccttatcgctcctccatgcggggttcaatcgttcgttctttcagttttcccatctcatctcattcttgtttttttttctcctcttctttcgacctagctcacccagtttaattttcagcccaccgacagacctaccgttctcgtctactcaggtcctggcgcatctcctatctgtatttctcagacggttcgaactctccgagcgattctctcaccaacatacaccgtagattgcatccttccatctgttctcctctccaccagatggtatacaaactgtgcactcctcatcatgccaggtggcagagatctgccttatcaggctagtctgggtactgaaggaaacgacattatcaagcgtttcgtcagttcaggcggtgcgtatttgggattgtgtgccggaggttattatggtgcggccgagtgtaagttcatggttggagacccagatgaagagattgtcggaccaagagagctggctttctggccgacagcctgctggggacctgtgttcgatgggtttgactactacagcgaacgaggctctaaggtcgtcgccatcgagatggacgatgtcaacagtgtgttgttagaggatggcgactactctggagcaagcgtggcaaggatgtactacaatggaggaggcgctttcgagctcgctccagagcaagccgaaaatgccaagatcatagccaggttctcagatcatcccgacgccccaccagccatcgtgttcaataaagtcgatgacggaaaggtcgtccttattgggtttcatccagagttctctttgttgaacgaaccgcttgcaggattgttggagagactgcctgtttccgaggcacccagtcccgaggatgtctaccaagccgagggagagaggatcaggctgatgaggaacatgatgggtttgctcggtttgaaaacttctacccaaacaaaaagaaacgtattcagacataaattggccggatcatccaacatgagttctcgatcgaattcgccttctcatcaaggatttcctcgagtgctagtctctaatccggatcggtcaatcgacattgcggctgagattgagcagaggttttcttcatcactacctaggcggtcggcacctttgcccagtattgctactgaaaccaaggattcatgtagcccgaccatcctggttgatgccgttgatacattccgtcttcacactctttctcctacaaatactgcggaggcgatacaacccatcttatcttctgcatccgatgatcaatccggaggcgagaatcttgctaaggacatttggatagtgagtgttgacgcggatgagaaacaagatagctcatggaattggcttggatactggaatgagctggaccggttggccgaatggaaagagaacagagagattgacggaatttcaaggatgggagatatcgtcatgggagagaatgaacttatggtgggagatgattggacttggttggaaaagtgcgtattgggaaactgtatctttcttttctcattagataagaactggacgttgatatccatcttagtttgttcttctacctgctcctgtcccttttggtatcactcctcttggtgattttcttcatcctctgatcgactgcatccagaaatccgagatttctgcactctctacctactcccctagtgcatctctccatacctgccctcaaccccacgaccagcatgaaattccctttacgtgcacctacaccaacccttcgattttcactcgttcttaaactccccagctctcttgcgcgaagagtcgtgtttgtacagtacttgatggccttggccctatgcgaggttttggatcctttgagttctcgaaaagaagccgagagcattcttttgggaatcaggtggccaggagacgtggtcagtgctcgaaaaaccgatacggtttaccaaagacagagagtagacaaagtagggggtgtagaggtgacatcaagctatagaagtggagagttcaaggttaaaatcagtgagtctctaatcaatctgcttatgaacaagtgttcgattttgctttgactgggaaagatgctaactccaggcttcacgccaaattcttctagactgtcaacttgatcttgtaccaagcatacctttcctttctctggagcctcatctgatactcccccggatcctgtctcatttttcaactctctggaagactttccttctcccctctcccattcacggcgggttcatctcatttctggacagataccacacccgatggaccgatcgaagcgcattggccacgttgcgttcagctgaccttcttacgtcttattctctccaatcaaatcatggatggggcgcggcttcgcgtggaaaggaagttaaagtacaggcggttgggatctcgttaaacggtggtacactgaggttgagaaagatctctgtgtcaaagggggcagttccggccgatcagcttgcggacttggagttaaacggaacggatggatggagaagagaaggaggaggagaggtgatggatcttcagcctggtggagatacttatgtgagtcaatgctttcgattcaagaccgttgttttgacagatcaaccttgactgatacgaaagttcttctgcaacttcttagacattggtgtttgacgaagaacctcgtcataatttgtagaaatatctagtgcatttttttcctcactcgttttcgtttttctttgtttacttggcttcgcatcccttttctgtacgttctcgatactcatgagagaacgcttagcataacagagtgtatctgcacaatctagatgaacgtacaatagtctctggatgataaagatttacagaatatatatagaaaacacaccaggagaacaaccggcacagacagatcgaaaagtaaaacaaaatgatattaaaagagtttttaaaggaagaaagatcaaaccacatcatcccaaccaccattgctcaatcgataagcagcttcactttcggccacatccggagaatcaaccactttgcagattcctgttttgtacaaaaagcgcaaatcaagagctcaaaactcagatttccattcgttcaggaatggttgcattcgaaagaggatgacttacgttcttcgctgtcacatcaacagcgcatgttcaacatgcgatgacacaaagatcgacatcatggttagaaaacttctcaacagtcagaaccagatttataggaatatatctcacgctcggccttttcggagatgtagcctagtagctgaagcatgtgccagcacatgtcctcccacaggctgttaagtgcgtggtgagagtgaagagacagttaattactgatcatcacgcgtggcattttgagttggaaagaatagattagaaatgggcaattcactttggctgaagatgcactggcgaacataagttgtgcgcctgggtcactctggacttggtctacccatgtttggaaataaaggcgaaaacacgtcagaagaaggctgcgaggtg

SEQ ID NO: 1903 - DNA, 33202 bp, Xanthophyllomyces dendrorhous
gtgagtaagtcataaaacacccatacttgtcatgaggatggcaatgttgaattcctgagtagacaaggagaaaatagtcacacgtttcctggtcagatgttcgtcgcaatgatcttgagaaagatgtacagagactcacttcagagagcttactaagcctagaaagcatctggttcaacttttgttggcgctcgcttagctcccctcgaccagagtagtcctgacggaacaaattgatgatagagtcgatctatgcatcatgagaaaagatcaagaagctcaatacatacattgagacgatcgcgacaaaaagacagcgcagaaagcaaattcgtactatgagcagtttatatgttccgtcgtctccgaatctggtttcaatcgaaaggcttaagtatacatgcacttgatttctcgattttatggtccgagatagagaaaacggacctcaaagccaactcgttgatcaactcaagctgctgctctgaattgtacgctcgggcgtactacagtacgagtcagtagaagtaagtctatgttctaaaaaagaaagtttatttacagtgatatctgcgcaaagaaattgagagcaaggaaacccaaatctgaataaatatatgcggtcaaagtttctctagatatgttgattttacgtactgtcgcaagctagtttcccatctactccagcgcgctcagctatagcctgcatctcgacaatttgatatcagcaagacggaagaagactttgagtctgatgatacacatacataccttaattctatctgctctgaaggtaccttcggtatctaggtaagctgcttctatagaacagatatgttggtaaagagaaaatgtcaggaccgaaacaagcacaagaacatatctcgcacttactgccacctccaccccccatctcgacaggtaattgggtcatcacactgttttattattattttgtttaattgaaatatcagttgtgcagagaggctggtttcaaggcttcagaataagatggggacctattcataccaaagtgtgtgtgccaattgcgctgatgaagagcattttggtaagctaatggaacgagcagaaattagattcttcgaagacttacttttccctgttctgaattcgcctgagacattcaatacaatgttgtatcaggtcagtcttctgtcgtcatagttcatagtcaggagtcgagcctaccatagacctcagtcacagattgagtagaaataccaccacctagcatctatgatcatggtatctcgagcttcagcaggatgtctagcgcaaagtgacaaggtgagataatcgaagatgactcactgcatcgacagctttactgcctgtactgatcatcacagcagattctcttcgagtggaaacttcagttgctgtcatgatagccgatggcttttgtttgaatgtgcgcgcggttgtacacgggacaattgagtcgatgatcagtaccagttacgggtatatgcgcatctgaaaatgtgtttagtcttaccaaaagcttcaacgccacatccttgatagagagttcataaggttcatttgatgtcgttcagcgagaaacaacaatcgaaatagaacatcagacgactcacctttagcttctcaactttagcctccgaaagaccctatacggagtcgatcggattcgaacatcagcttgactcaatgacgaagagaaccaaataaacaatgaagagaacgaaacaaacaacacatactttgatcttcagcatcgttcgtcgtggtgtcatctggacactttgaattgtagtcattccagctgctttgagtttagagatgtcttgggcattgattcccttttcgcatcaatcgaattcaggttagtcaccgataacatgcagtacttcgctacgcatactctagtcaagacactaacatgggctctgtttgagtttcagaacaaagagatgatggaagtatatgcaggttagcgtatagcagaactgtgaaggcgaatgtgaatccactgactgcatgtcatcaatatgggcaaagaaaagttgctccttcagtcgatacaagaaaggaagcccgtcagttcgtgcaatcaattttgggtatgtccagcgagacctacatcgtcttcgttgtcggacatagctagaattttattattattattatcttgagtgggagtggatcgatgatagaaggtgatggcaagaagtaaaagatttatcaaaggctttatatagtgtctgaatttctactgacagaacagaaagcctgacaggttttttttccattgttcacagtctcatcagaagcaccgtcagagaacacactccttcttcggcttgttaggatatgtattaagttttctcaagcatagcaactttcaggccacttttatcttgtataaaagacatcatcagatacagaaaaacagaaaagacttgagagatacagatagaatacaacccatctcaaagtcaaagtccaaggtctttggtcaagactattccataagcctgtcggcgcagaaaaaaggaatcgtcagtttgaattacaaaatcgaggacatgtgaatgcgtgcgacttacaatgttcaacaaacgagcatcaacggcaaatcccttcttatcataatccagaaggacgtcatacaacttggagagctcaaccactctttgaacgatgtgttctccctgaaggtatttttttaaaatgacaaacagcatgagcgcaacattctacatgcatctgcatgaaggtgtacgaacaggttcgagattggcctttgggggctcaatctttccctcaggcaagaaaacatcaatcgtgacgaggtgcatgttggcattggtcatacctatgagattctccaaccgatatgggtagtgattcaataaaagaactagaggtagaagatcggcatatgaaaaagacaaacctgggtcggagacaatcacaggtgaaattgtcctaactttggcctcgcccgcgttttcttctggcttcgcgtcctttttgaacgacttgccgtatccagtctcttcgttcaactctctcaatgcagtcattctgagtatgaatgtcagcagccagaatgtaagaaagtatgttgacttgagtgtacatgcagaatctcgacatacgatgaatcttcgttgggatcgatcaatccggcagggagctcgatgacgatcttgtcgatgggtgggcggctatagaggagaaatacattagaaagcgttaaggatgtatgcttagtgttctataggtagatatgtatgcatactattgctcgatgatcaccgtcgaaagaggccgagaagggtgatgaaggatggcgagcatagcaaccgctggatgacgaaacgaatgtgacctctatgatcagctcccatagagcatcagattcgcctgaaccgttctcactcacagtctactccagattcattcctggtcttccgacaagccatctcccactttcgattgttcccatcctgatcggtatactcgatatgttcaagcttgatgaacttggtatcctccaagtttgcaggcgaggtctttgtgacatgagctttctgagggccggtcgaggacatggtctgatgaaacagttgttgtcgtctgtatgtcaaggtgtttgcctttgaaaggtattgtctagtgcgttgaagagaaagtcgagagaacatgtagatggtctgttctctatttaaaaggagtcgctcgtcctcttccgatccaggaacctcacttacgtcacaaattcaggtacgccggtaagtcgcgtcggaggcacgcgttatgaacacgcgtcgtattacgtaagacacgcgttcactctccaagaaaagaaaccaacgagacgtccaaattgacttctctcacacaaaatccgttcatctcaaacactctgcaagatggaagcgttgtaagtgacaatcagtggtctggtctgagaagaacgacacgaagagggaaaaacagaaggttcttatatataatggattattgttgtacaacagaaagaagcaagcgcttgccaacccactcaattaccctcatcttaatccaaaacctaagcctcatcctcagccccaaccaagcagagctactcccgaagtcatcgagcttcctgactctgaagatgaaggaagaggttatgataggccagtttctgacgatgatgatgatgatgatgtgattgaggttcaacctaagaggatgagtctaaatgagaacgaccggtacgtttgttgctttgaggacccgtctccggagtccatacaaaactcactatatgatgtgtgtatgctaggccaatccctagagcttatactgctagacccactcagcctcaaacttttcgacagactcaacccttccgtccaggccaaccctttcgtccgagccaacctttccgtccggcgaatgtatcggctcctcggcctcaaagtacgaacccgttcttctctcagagaccaaccgcacctacattgtacaacaccgtccgccctgttccggttcatatgcctacatcctctgctcccgctcctgttcctatagcaattccaacaccaagacctttctccagacctccatacggatacatacccaacagaacgccagccgttgtccctacagacatgtttgctcacaagatgtcaatctctgagaccgctcgaaatggagccaccaacgcacggaatgctactaagcctccggtgagaaagggagatgaagaagatgagggtgaggactttgatctggatgacggaaaacgaagagaagatgattgggatgtggtcgatcctagccaagcagacaagcatatgcgagagcttttggagcaagccttgggagatgtccagggagagtttgatgtgagtaattagttactatcttttttgtgctgccaacccttggttgtagaagacaccgacatcgtggctgattgagaatgacaatgatctatatctcttgcaggagaaggactcgatcgtggaaggattcagagagggtatccaactcatgcctcatcaggttcgctcatcatcgaccagctgacagatgagtaagatgacctgtattaattaacatgaccatcactcaaataggttcaaggttgccaatggatgaaatcccgagaatcaggaagaaaatcatttggtattttagccgatgtgagtgcgcgactccgtgggcttcgaccgctcgcacttggttcacatgtttctcatctggcgctctctctctcttttttcgtttcatctaggatatgggactagggaagaccgtacagacattagctcggattgttgatggaaggccgacaaaggcgcatataaaagcgggctataagggagggactctgtgagtgatcattcattaactctagtttcgatggcaaccttatcctatctctgcgcttaatttcttcctctcgaatgaaaaggattatctgtcctctgtaagtcctctcctaattctgactctgcgctcgggtcttcagacactgatgctggaatttttatgcttctcagaccggtaatgaaacagtgggaggatgaggtcaagaaaaagacaagaagcgggttgcttaaggtgacaactcatcagggcgtaaagcgagagacaggtacgaaaaagactctttgctcatcttctgcccataaacaatcacaaagtcaagattagtcatgtcaactgatgcgccgttgttgtaatccgatggcatacgcagacgcggatcttctacagaattttgatgtagtggtatggttttttctcttagcggccactttttcttcactcaagtctactggcattttgatgagaaggcatttttaaccgtccattccaatttgaacagatcaccacgtatgatgtgattcgacaagaatacgacaaatacattgaatcactaattccagccaacgcgcgagattcgtccgactccgattcggatgacttcggaagcagtcttggaaagaagaaaggagcaaaggcaatttccaagaaagcgccgaaagggaaaaaggaagtcgtgccaaagatggcgttgttcaagatcaaatggcatcggattgtgctaggtatgtcgaatgggggtttgcttgtttcgcgatggtggccttcatatctgaattaattggtggcttttgacttttgactcccagatgaggctcagaacataaagaacagaaccactaagacgtctcagggatgtgtagctttacaaggaaagttcagatggtgtcttaccgggtacgttgatccctcaattttgagcgacccttagtcaattgatgaaatcaggatgctcattgttctgtgattgcttatgttatacagaactccaattcaggtgtgtagtcataactgtctaatacaaaagctagatgtggctaatcagtcgttctctatcctctgttctctcccttgaacgttaacgtcagaacaacgttgatgagttatacccgttgttcgctttcctgcgttgtcggccgctagatgattgggacaacttccgagaacaaatctcaaagcccgtcaagaatggtcgaacgaagtatgctatgaggaagttacatgtgagttcgcccaatatcattagttttttaaatgtctcccttccaaagatcacactcttaactctgatgatctttgttcttggtcacattaacttgaaaattcccaggtcatcctcaaagctgtaatgcttcggaggttgaaaacggctgagctgaatggaaaaagaatcctcaatttacctcctcgaaatgtcaatgtagtaacatgccgttttgacgctgatgagcgagcattttatcaggcgttgacagagaggacagcgctgacgttctccaaggttggtcttcttgtgcagatacgttcttgatctttagacaactgaaaagctttctatctggttttgtttatcttagtacatgaaagctggggccgtcatgtcgaattatgtgagttgtattttggtatcaatacaacttgaccgtgtcagaatatgactgattcttttctgtcctttggtcaaaagacttccattctgacgatgttactcaggtgagtttgttgaaggccgtgaacagcaagtatcggctgattcagactcggactttgaatgtcttgatatagattacgtcaaggtagataaaaaaaatgtcttcctgaatgcgtggccgatacttcttagctaacagcatttcgcgttttcagcttgcgatcatcctattctagtcagcgaatcgtttggttcagatcctgatgctgtcgctcctgctagtgatgctaaagaagataaggatgaagcggatgaattggcggatcttcttggaggcctgaccgtcgcaactgcgccttgctccatctgttcgactaagctgttgccaggacaaacagaatactgttcgcctgcttgtcggagtgtggggttaagagcgaaggaagtggcggaagccagggctgcaggtttacctcataccagcgctaagatcagagagattttgaagattttgaagcagacagatgatagaggattgggtgaaaagaccatcagtcagtctagcttgtcgttttattcacatcttgtcattctcacgcacttgaatctaattgactctctttctgaacattcctacgaacagtcttttcccaggtgcgttccgctgggaccaacgtaacaaatgaccattgaacagaacaactggccaattctttttcctttttgtaaacaacagttcaccaagatgcttgacgtgattcaacctttcttaaagtcgaccggtgtcaagtttgtcagatgttagtagaacgagtccgatatcctgcgtcagattacgcgctgatcaattcaaatcggtctacgctgacgaatcttagatgatggaagcatggacaacgtgaagcgagagctttccctgactgccatcaagactgatccttcggtgaaagtcatcctgatttctttcaaagctggtggtgtcggtgagtctggacacgtgtgttttctgttcatagctcctatcgatcctaatgaagatctcgctgtttatactgtccaggtttgaatttgacatgtggtgagtcttcctcttctcgcctacaacaaacatgatcttctattttccagatattgagtcatcactatacaatagcgaacaatgtgatccttaccgacttgtggtggtatgtgctttgctcctctgacaaactactgccaagattgagcatcgaagtaaccctcttatcttgaattttcaggaatccggcgcttgaaggtttgttcatagcttcgggtttttgacgtcgaacgcccgatgtggccttactaatatttcactttatccacgccatttctacacagaacaagcgttcgatagagcccatcggtatgttcacctaccaagttatttagttgccgtttaattaggttcactgaccacctatttgagtctgtatatgacatcaggctaggtcaaaatcgagcggtccatgtacacaagttggtgatagaggaaacagttgaagaccgaatcctgctggtacgtttttctcgcgcttgagtatctgtgctttccctgatctccattttccatcgattcattatgcatcagcttcaagagaaaaaacgagagctggcggctgctgccttatctggtggatcattcaaggccggaaacaaacttaacttggaagatatcatggctctgttcaaagtgagccattctctttcttgattctttcgactctggcatattgtttgtttgaccatcctgaacatatctgtataccttacagccccaaccattcgctgctccagatgttgatagtgatgaagaatagagggtttaattctgattccaatttgttctctatcttgctctgctacgtattcttgcccctacttacccctcataggtgtatatagtatagcttttcttcttttcattgggatcttgagagttcatctagatataatacccagaatttgccctgcagcggaaatggttttgatgtttatcccgaatggagcgcatggaacagttctatccatcatccgagagaaacatacacataccagatactgtgaagaattacactgattatgctatgctcgaaacattaaatctcaggcgttgatgggaagcgatatctgatgagtcaactgagcaagaacatcaaagagtatcaagaaaggactgggaacgtggccttttgataaagttagcccaaacgatgagattttatcatctgtattgaattggccgtttgttcatcggttaggcagatctagagctcagatcgaaattggcgtatcttttacagcggttggttggtcggaatgcgcgcgcaagtgatgagcaaccagagtcttcttaacacgtctcttggacctaatcagctccctgttggcagccctccatgttcggaaatatagctgctggcattcgaactggattctggtgatcattctgctgggattgaatttacttgttaaccctaacaccaacccaaacgaattgtgttctcatcgaggcaagataggtgtattttgtcgcgtcagttcgctttcacccacattctgacctggagagttattgtgaagagagacgaaaggaaagagagagagagagagagagagagaagaaaacgtaataagatccactataaaagaacatctacactcgcccactttgccttccatacatccaacttctacgaccagagcaaaggaaagaggaaaagacctctccccttcgagagccgtcttttttgagcaaaagaaaacaatctactccttggcagctccgtacatcttggccacaccgaccgaagcgttcccagcaagacccttagcgaactcgtcgatctgtctcaagagaagtaacgcgttcaacctcgaaccctccgccgggaccttgaccgttctctttgcctcatcctccggaacaccggaagcgaccaactggtcgaccttggttttctgtctggcgatatctctagcgttgaagagcaacgagttgttctctctctggaactcatcgagcgatcgagaagtctgttcgacagaagtagtgagggaggaagggaagtgaaggttgagggcactaagatgcaaaggagggatcgtgctcgtgggggaggaggtgaaggtgttgttgtcgttagtagcgggagcggtgagggtggacaagtaggcggtcacgagggatgagttggtgattgttatcggaagctcttcgaggaggttcgagaacgtcaatcggttgtcaaccaaactagtgaaggacaggcgggcgaagaaatttatatgatgagctacgtgtgctatataagcagagtgcaagacaaataagaggaaaggagaagaagtaggatctcacgtctgggtatcaagtcggcccttggcggagaagacttcggcgaacgcggcagagaatcggtatgccttgatggacgtcctgccgtgaatggacttggtggggtctagatgagagatggatatatcgtataagaatgacttgttcgcaaaggggaaaagaagaaagacacagagaacaaactaaccatgcaagagaacgactcccttccttccaccaacagattggtagatggccaaagtctcgacgagagaagccttgaagagctgtccgacaggcgaggtgaagtaggcaccgacgaccgagtcggcagcagagatctgcttcaagtttcggaccatctcggtcgagtaggcttgctctgatcgaaggatgaattggtgaatgggtgagtcggaaggggatggtgagtggaatcatgaaatgaaccgcgacgaaaattacaagggtgacaccgttgtcagtgggtctgtcccatcaaagtacacacaccctgcacacacagataaaaagttccagcccatgagaaggactagaataaaagaacaaactaacgggcagccctgttggaggctcgctccttctcctcatcggctcccctctcccaaggcggcgagttaggaagagcaaaagaatccgagacttcgagagttccgttgagatcaagaccaagaaggtgaccggtagtctctgtggtcgggttgtcgaggtactgcttgatgatcttgatgatgactaaaccgtcaagctcgaccgagttgatcgggttgagaccctcgacatcgaggccacctttgagagaggcaggaataccgtcggtcttgttctgcttacccgagctggtgttgttggtggccgaagcggaggcggaagcagaagctgccgaagaggcaggcaagctggccgacagaagcgaagcaagagaaggagcagaggccatggcttaagtgtctatggtcgtcgaatggttgttggttctgatggtgtccaacaaagaaggagacgacttttttttctcggtgtaaccaggaacgtgcccagagcgattgcttacataagcaaatgttacattcggcacgtggtcccgattccttctgtaaccacgtcgtccatctgagacagcgaaaaacccggtgggcgtttcttcatctcgaccaccatctccatctgttccatcatgacattgttcggcttcacgtacatggtgctcaagataggtcagtgggagtgtctctccgtgtgcgtgtttgtgggtgcatggaggttactgcgttactgacgtacgatctcttttgaccacacagtcctcggtctcaccgtcactctagccgtcgtattcgtcggtgcggtctacataggccaaaacaagttgatctatccgtgagtccagtgttctctgcttgttcttttggtgtttgattcatagtagagcatgccatgcattctatcaggaacaaacctgtctaactttatatacgtatggtatatcgacacagatccgcctacccggagggatcaagaacaaaagtcgatcttccgacagagttcgacatgcctttcgaggatgtcgagctcaccgctccagatggcacgaagctcaaggcatatctcatgcttgccaatgccaacgtaaaaactagctccgaggtgagatctttggcgtgtcatcctgaccaagtataccgatcatgctgacttttaccttgttctcatcaaccagtactacaagtcgcgaccgacgatcgtctacttctggtacgtgcatctcaaagaccaaacaaaaactggatgaccccaggctaccattaatagatgttgctcgtgtgtactcagcgacctgatttctttcttgaaactacagcgccaatgctggaaacaccggtcaccgactgcccattgccaaagtcttcgtgttcgttgcgactctcacatcttgacccttctttacaaagaaaacccgaagactgccattctcactctcatcatcttttaactacatcattcttggcgtaatcgaaacatagaaacaacctccgttacaactgcctcatgctatcttacagaggatatggtctcagtgagggcagcgcgaacgagaaaggcatcaagaccgacgctcagaccgctttggactttgttaccaatcacgacggtctcaaagagactccaatcgttcgtgtttctcgcttcactagttgatttaccagtttgcctttatctcgccgaggctgatcattgcattcctcacagatcttttacggccagagtcttggaggagcggttgccatcaatctcgctgccgataatccccatgttgttcgtattttcttgctcatccttctcttaatcgcttctctgccgtcggctgacattggtagttcacctctctacaacccaggtcaaggctcttatcttggagaacacgttcacttccatcccggctttgatcccaagcctcatccctcccttggcttctcttacgttcctcatccatcagacttgggagagctcaggaaagaggatcggagagttacctggagaaatgccaatcttgttcctgagtggaaggaaggatgagatcgttcctaaagaggagatggataaggtttgtctgtattcgttttcataaagcactcatcaagttcagatgctgatatttttatcaatcctttttgacaatctagctctacgcgtcctctttaaaacgaaaactgacaaaggctacgacagccaagacttcgatcaagaagcctgtctcggtgttcaagccgttcgatgccggaactcacagtacgtctcaatcatctcgcttgaatatatttacgatcttcaatcgcttattgtaatgcatatttcccaccgattgactcgaaaagacgacaccgtcggccagaaggactactttatgcacttccagaagtttgtagaggagcacactgggaggtctactcgataagattatcttatagcacctaaaaggattgtatctgggtttagaagtcgcttttctcatggctcttgtgttctataaaaattaaaatgatgttgctactttggtcgtccatgtggtttgtggaggaaattatgacgtgtgaatatcggccatgttctaaaatagatggagacgcaaacatcaccatctccctctctataagaacccttccgataaccatacgttacctttaatcaaacatcctttcatataagaataatgtccctccctcctcttcccttctttatcagagcccaccagacggccaaggagttcgccgaaaaagaagcgatcttcgatcctagaatacacagatcgattacgtataccgaattattgaaagatgtatcagcttttaaagatgttttgctgaagaatgttccagagaagtacgtttgaattcgatcagcatgacaatggtatgaaccagtcacttacaacatacactgggcttgtggatgcgttagggatttgaaagaagcccgagtcgctggattactccctaacggatatgcctgggttgtggctcaatgggcaacttgggtcggttctttgtccttttttatcatctccttggaactctttcaatcatctttaacagactttcgtcttgcctcatatcatgattttaatcatgtaggcggccggagggatctttgtaccactgctccatacgttgcctattccagaaatggaatatatcatcaagaaatcgagatcggagaggctgatctgctcggatgatcttaggaccaaagcggaagagttggctaaagcggtttcgtaagtgactatcaatctctcagggcaacagaactcagcacagtctttaatcagatcacgcatccagtctaccagtcgacccgttctttttacctctcgatcctcagttatcctcctctcccgatcttccccagatcgatgagactctattcgatcaaaacaggaaggcattcatgttgttcacgtctggatcaactggatttcctaagggcgtacctatttctcataaatcattgggaagccaatgcgaaagtatgagcgttgtttggggctggacgagagacgatcgagttttagatgtcgtcagtccttttatcttggactcctcaccctcaaagctcgaaaaatgatatatactgataattcttggaatttcgcttgatttttgatcaaactcagcttccgatgcatcacatccatggagttgtcaatcttctcctaacagcgctttggaatggagcgacctgtgaattcatggagagattcgaagctggcgctgtaagctctgatttcaaattatcttgttgtcctctttgatcaagccgatttctcatgcatatcttcttcaacatttgtgataggtatggaacagatggatgtctgctgcagagccacagctgacgatctttagcgctgttcccaccgtaagtctgagtatctcaaattgtcctcaatcgctcgctctctcgtcggcctgccttacactgaatttttgttctttgaagatatactcgaaccttcttcaagcattccaaagattttcctcggaggaagctcgacgcgatgcaagaaaagcatgcgagaggttcagattgatgatctctgggagcgcgcctttgcctggtaggctgaagaatgattgggagaatgtttgtggcggcggaagattacttgaaaggttcgttcgctttgttcccggtatcggagagacctgtctgtgtagttcatctctaatggactgtttgcatggttcggacactggtgcatcggcgaaaacagatatggcatgacggaaacgggcatgatcctctcatgcgggttggatccggattccagggtcgatgtacttttgtttttcttctcctgtacagaaagatttagtatgaggagatttctaaccctaccgtttgaactacacttgtctgtataccatgtggcctgatgggatcatacaggggcacgtgggatacccaatgccgggggtccaagtcaagctgttttacgaaccggaagatagcgaagaaagtgaaggcaagggggaactgacagactttggaataaaagttggaaccaaaggcgaaatctgggtcagaggggacaacatatttgatggtaagccttcatttctcatcaatatcatcaggatcaaatgggaagtgacgctgaatgtggagttgactctgtgatctagggtactgggaggatcctgcaacgacggctaaagagttttcaaccgatgaaagcggtcaacgatggttcaaagttcgtctgtcttttctattcctttcttcttctcacgtcgttctcttgcttgtcagaagaacggtgattaaatctttcaatgaatcatttttcatatagacgggcgatgtaggaattctagagtcaactaaagaaggtggtttcagagtattaggaagatcctcggtcgatataatcaaagtacatttctatgtttaatctgttctgctagagaagcgagagtaatgacttggacattggtatcgattttgaagtccggcggagagaaggtctcggctctcgaagtggaaagagcaatcctgaacttagctgataaatccgtcaaggactgtgccgtcgttggtgtgcccgatcagaagtggggggaggccgttggcgctgttgtcgttctggcttcgactgatgctggagacagatgggatgtcaaagaactaagggagaaattgagaagtcaagtatgtcttttcaagctggttagacttttgagatggagagaggagatgattgtggaacgttaatctatcaatcttggggttgtgttttctggtcgattgaataaagcttgcggcttttaagctgcctcaaaaactaaagatctatccggacacgatcccacggaatgcaatgggaaaagtcggttcttctttttggggtttccccttcgtttctattgtcgactcatcaacaatctctgattttgatacgataggttaacaagaaagagctcgttaaaactgcgttccctgaagaaactggctcggcagccagatgatcgaacatcctgcgggggagaaagaagctgagcttgtagatggaccttgatggtgggacaaagtatagatcgtttgtaacatttgatgagatggactttgcgtctttgcacaaacaatccttcaatcgcgctcttcgatttgacaagatatgtcggagtgaaatcatgtgaagagaatgaggtcttggtaccattttagatatttcaagttgacttctcttttttgtccttcttgtccttcttctctttcttctctttcttggccttcttctctccgttttcgctctctgtatcttccagctttctcttcttctccttcttctccttcttctctttcttttctttcttctcctttgtaatctcggcatctagggcagaaggctcaggcgcgacaggagccggtgtcgaaggggtctctggagcttgtgatcgttaccaaaagtgaaaagcagatcgaattgaacgaatcaaagagtgagaacagttgagtttttgttcacttacaagggagcgatattgagtacatgaactaaatcaattggattgacgtaccggtggaggcttcctcactcaatttctccttcttttccttcttctccttcttctccttcttttctttcttctctttcttctctttcttctcctttacagcctcctcagatttggcaacttctactacgggctcagccaccttctccgctttcggcgccggaacaggctcgggcgcgagagcaggagcaggagcagcggcagcctgttcagcagcggctttcttagctgcaaaagctgcaaaattggcagcgtaaggatcctttgctttctccttctttgcctgtttaattcatccataatcaaaccgatatcaaagcaaacattagcgcaacggaggggaataagaattgatcaaccgaaatcggcgcgagaggattataccatcaagctggggatcaggttgacactaaaggatggatgatgactgaccttcttagcaggacctttgtagagcgtcctttcgtacttttcagcctcagatatgcacgtagtatgagacctatagcatcagataggaaccgtgttagactttagtcaatcacatcgcctgaagacactaacgcctttgaaaaagggaaagaagtaagagacccacttccactccgagccatttcggaaggttttcgaacagtcgaggcaggtaaacggagcataacaccttgagtggtgctgatctatcaaaagtcacgtagattcacaaggaaagcagtgtcgagatttccaggtgaccatatcgaaaataaaaatacgctcaaatcagcatactctgatcaaggcggtaagtttctacatagcacgctcaccaagctttggcttcttgaccacgtcggagcagctaagtggtccataaagttgatgaaattgagtaacaaattacgtatgatatcacagattatgtgaaggaaatccaacctacctgtcacattggaaggagaccatgttgaatatgtgtatgtgtgaacagaggttaaacagcaaggtaaacgagaacggccgaactctcaaaaataatgtggagggaagattagctagtctatcacacagccttcatgaaacacgtgatttagcgtcacaaacatgtccaaacgcgcctgctcacgcgtcgacgcgtctgttctttgaatatgacgcgtttgtgttatcctcgttcgtccaggtatccaacttgatacccagcatactcatcctccttgctgccctcagccaacacacacacatacacacatacacacatacacatatacacacacggaagaaggcaaggagccgatcaaagaaacatacttttggaaaagattccaatatgccttcttcctcgctacggccgtctacgaaaatcaataaaagccagacccctgcacgaaccaaagagaagagcacgactgaacctgaccagaagagtgagtgatcttgctatagaaccatctcatttcatcagactgatcgtgccaatgatgattttcctcatcccatgcttactccgattcaggaatatcggtgcatcgtcgctcgagctctggagtgacatccaagaaatctgttgatcagatgacaacttctagtccccattctacccacaaggataatccttctctcgctaaaggtgttgttgggaagagtcttgcaccaatctcttcccgagtaagacggatgactactcgatcttctatcaagtctcttcaatctcaaccatcagatagcacgtcactgtcctcaccatccgctaatcaacaagatacccacgccgaggcttctcctactttgatatcagaggaagaatcagctacaatggccctgatagcgtccacaatcccgaaagcatccactactttacctagtagaaaaagcaatataccgatatcgaggccagcatcaactgcttcgctctttgccaatccatcttcacgtgctcccgcgtttgctcatagacgatcaatctcccttgccttcgcttctcctccctcatctgctcttgaacagtctgatgactcgtccccgccttcactaggcccgcctatgactacaacacctaggtcacttagacgatctgtatcatcctcctttgattctccctcaaatctggtgatatctactccatccgacccgacaccagatatatcatcgtctccttccagagtgaccgccattccaaagatctcaatgacaccatcaccaattaaaatatctcgtcctgtggtcaggtctttggtgcccaaaacctcctcttcttcttctggtcgaccgtccacagtgtctggctcgctcgctttcttagctgtacaaaacgattctagtcgctccacacctcgaaaccaatcgatacctatccttaaaaaaggtcatcgaccttctctctcaacctcgactgttccgtccaaatcagctaattccctgggtagaaagagacccgactcggtgtccatcactgtcacatccacctccctcaacaacaaatcagccaacacgcctcactctgtctcatctcctggaaaactctctggacgatcagaaaaggcagatctcaagcgcacgcccattaaggaggtcaattcagaggattcgatggatgaaatcagtgtttcaagcccagttgttgaaaaagtttcggtcgtggagaagacgagaagggtcatacccaaaagtccgttaaaggagatgacagaagacggggtcgattgctcaccgtaggtctcttgatcgctctgttatgtctgctgtttcggttacactgacattctgtctaatcgtagacttcatcatacagaccgcccgtttccatctctctatccgcctaatcaatcgtcttcttctcaaatgctcaaaaaccttctcactccatccgcgaccccttatggatcccgtgttcgacctcgacctctcgtcgctcgaaactctctggttcatttcgattcgatggcccaatcgtttgctcttgaagatgaaggtgattctcttctacatctccctgaagatgggccgaatttgagttttccggatctgagtggcccagacctagaatcacctccaggatctctcaagaggaaggcaagaatgaggccgtctctagtagcaccgacgaaagcaaaagaacacgccaaactcgtttctcttcaggataggctggacgagagcctactagctcaaactgcgctgagcgaactgttggaaagagagattggtaaagttcgagagctggaagagcatttggccgaacgacagatcgaagaagatttgttgaaagctagtcctgtcaagcctagcgctcccacattctcacggcctttccttggaaaacctatgacagaggtagaagcggtggtggtgcaagagaacgacttgaggctcaagaccgaggttacgcgattgaaaatcgagcttgaatcatcaacagactgtatcgaacatttacaaacgggtctctccgaattaacagaacaactgacatctgcccatggagatattgattcgcttcaacacgacttgatttcgatacaatcaaagaactcaaaacttgaagcggataacgtttcaagggaggcagagttggaagcacaacagattgccagcaccgtggagggtaggaagaaggcaagcaaagcttggtccgaggtaaaaatgagggcgatgggagagttggaagatttgaagggcgagagagatttattggcgatacttgaaacttctattagactgttggaacgtgaagtcaggagcggacggacaatctgatcgttttttcttgattttggggtttctttctcttcgttacttatatattggtactcttatattcggtccagcgagtgacggcgttcgcaagggagtgatctatcctcgtaagagtcgaccaagatgtttgatgatatatgttcctatatttttttgaaaggctcgctgattcgtcgcgtcctctcctgccgtcatgccgcctaagggatgttcatagcttaactgtcagaccaaacttgaatttcaaatcgaagatgaaacactctacaattgattgtgcgagagaatcgaaaaacaaagtatagcaaagaataagttgaagaataagaagatgtatggaacgctttgaagaacaactgggcatcgactgacatcagagaagaatatactcgatcaaatgagcagaacagctccgaactgaccaggtatggcaacggctgtgacacatacaacacattgaagcagtgaaaggaagcgaagcaaaaaaaaacacagctaaagcgaccagagcaagtgatatgttaagcaggtagacagaatatcccattaattcgagaaggcacggaggtactaaagggctcaatgatgtcgataatatataaggaaagggaaagaagcgtgataaagcccatcgacctgaacagtctgatgtttacgaagaaggcccaagtctagaaatttgagtttgctcaaaccgcgatgtcgtaaatgtatccttggccagaaacaggtgtggtactctacatcatttttcaccggccaaatacgtctgtggaactctgaatgaatagacaaagacaaaagctatcagatcaaagcttgtgaacctcagtgaagagcgattgttcataagagaaagaaagaatgacactacagcatatgtcgaaagtgaaggatgaatgattggtatgtgagagtaatgatctcaatcaacaccgtcaggttctcgtgatcaattcaataagctcaacatgcgctgatcaatattagttggtagtgaacgaccagattgatagctgcagcatcaaagcctatatcatggttaaacgatccaaggtgaagattatggtcatacttgaacggatgaatttgaacagttgtgatatcaatcaaacagtgtaaataagatgcagtggcacaggtagaggaggtgagtaactagaaacaccaggagcaacataaatctgatttctagacgtgatgctccgagactgaagaaacattgatggcgtcaaagaagaagaagtgggtactatactttatgataacttttctcttcaattgttttccctccttccaaatagccgcaagagatttatcaaggaccaagaagtaaggagacacgacgaacgagaactctgatcagggttcgtatcctctgagcacccccttcaaggcaatttctggcccggcccggagtctgagatcaggccgaattgccgaattgccgaattgccaaattgccgagtcgccggattgccggtgagagcaggatcggctgtaaccacctctggtaaccacatccgtccggccaccgacgcgtaggggacgcgacagaaacgcgtttgatttcctctcactcttgttatccttccttcgacacccttgatctccttctttcttcagcaaatacgatgtcatccattcctgctccaaagagagcatcatctaggagatcgctcacaacaagacttccttcccatgatgggccttctgaaccgctggctgttaggatgcctggtggtaagggcaaaggtcgggcggcaagtataggtccggccgagtttgcatctagaggcatagagagaaagccgttgagtccaaagaaacttgcaagaagagctctagtgagtgaagatttgactttgtatatctacttgaacatcgcttttggcttgtgggaagctatcattgctcgtcggatactcgaggcgtccttcatgacgagtgcaatcaaaacagaccagctggtacaagagataactgaaatctagttggtgtattgtccgcgtttttcttccttcctgatcatgcaatccatcactatctatgcaggtcccaagaaagagtatcttgaagccatacaatcctgaagagactcagaattatacccaaggggctgtggtcaatcaagaggcagatgaggacgaagatgatgacgacgaggacgagaacgagacccagtttcggaatatgcctggagaatcgacgacaatgagaatattgagaagggtttcttttgccgcccatgctcacgttaggcaagctctcctccacgttattttgtgacaaaaagtcataagcagatgcaaaagccggctatcactaacgacaagaatgatatgtgtctgaattcttaggatgtttgagacggcccatgccaacacactttcgcagtcccaatcatcgacgacatcctccgtaggctctcttcctccttcgtctcctgttttgtcttcctccaacgtgttcgatgaacctgcacaaacacccactccggcatcttcctcgacccgccgtcgatcatcgcttaaccatcaatcggcaacggccgctgaacaacgaccccctcttaggcgatcccgacgaagctcgattgctgactttggatcggatggcagtgcggatatgagtatggaggaagaagatggggacactacagactttttcggtcctccaaccactattcactcctctctctttgacgagctgccagaatcgtctcttctcggtcaagccgaattagacttcacccaagtccatggagcgatccttccttctcatacctctggacaaatacaatcgaatctaccagaccctttgtccccttctgcttccacattgtcccctccttcatctcctgatcgaatgccgaacgaaggagaagaacagacgcttgactttacagtcgccactggaggaatcatccctgctcatgcccctgaatttgcaatcgaaggcagaggaagcgtaggatacagaatggaggaaggtgagggcgaaaggctcgatgcctggtctcaatcccgagaaaacgacgcggcaaaggagagggaaaacgaaaacgttatgaatctggagcaagaccaagaccatagagacgatatggaactgacgagtgtcgtcggaggtatctttgaaaacacttctcaggaggacgagaccaacacaggcagatcttccgaggctgaagaagaaggcggagaaatggatgagaccgtcgcgtttggtggattgctcaatccccatccggctttcataaacgaagccgaggaagctgatgaagagttcgaaatggacgagacccttccactgggtggcgtccttgcaccgacaaatgactcttatagccaggaaaatggagatgaagacgaagggattgaaatagaagaaacggctgctctcggaggagttttgacgccccgatttctcgacgagcaagacgccgaggacgagaattcaacgcaaagatttgatcagggcacagatgatatcgatttcactgtcgcccagggagaaatcttcgaaccctcagccgacccatcttcctcatccttcgagcctgtattaccttccttccagcctgtacttgctaagtctcctatgaagtctatttcttcgataggccctacccgaccgagggaaagtgctctgacccgaccaacgttatcttcaacactcaaatctaaacccaatttgtttgactcaccagagaaaccgacaggcgcttcaccgactaaaaaacgagccttgcccatattcacgaatggcggattggacaagggaggattgaaaagacgagctagccatattgatggagcaaaggtctttgggaacttcggcgaaaaccaagagggaattcagaggggagcaaagagaagagcttcgagcggaacaaccggcaaagaattttctcctccatcggccggggcttcccagacaaatgatgtatttgggatgaacaatttggtagctgcacccaaaaatgcggccaggccagcacccgccgatacattcccaatcgagactaccccggaggaaacatcagattacgtagtagaggagatcatcgaacggagcgaagagaacccaccctcgcccagaaagacatcagtagctaaaccaacaaaaagaccggtcaatcttttcgagctttctccaacttctttatcttctgaaggactgtcagtgaatgtgtttgatggaaccgacactccgttacttccttcggttccactatcagcatcctactcgacttcgcctgccatcgaagcttcggtgttccctctttcttcacaaaccgatgaaggaccgtcttctgaattgcctttgcgacctactcagaagtacgagttggacatcttcaactctccacctaaagcgattgaatctgctcttcagccctcgatcttcgaatctctacagactcttttgccgtcatcgtcaaccgagcagacggtaacatcagaagctgccgtcacagcaaaaacatccagccaagccgatgctgtctcgccagtgaacttccagccggtgataaatacgcctcggaaacgcataggaagacctagtttggcagctgctactctcaaaggaaaaggaacggaagaaacctctggtgttccgaacattgtgagtctttttggtcattattctaatatgcccgccccttcgcgtgtgattaattctcaaacacgaacgccgctgtatatctaatatcacaggaacctactccggagattgctgctccgcaagtgtcactcactcagtttttggagttgaccaacttgaactggcgagaaaagatgagtgccggcaagcgacggtcgacgatcaggccaggagagatgcttggcatccatcgcttcaatgccgattctacctctcgcagcagtggttcgtcttctgatttccccttaaggtataaactagagattgtcggactgattcatagaagagaaatcgtaatcatctctagcaaacggcgaatacctgactatggattacgccaaccacgtgttgaatttgccttatctgatcgtatatcaatgggtgagctttatccagtttgcacgggatagaatgaccccactcacttttcttgatttgcttcaccatgtgacgtctttttaggcttgtaatcatttgaaagactcaacttcacagtcccaaaagaatgttcaagtgttggacgaggaagcatcagcccgaaatccagtacttttcagcgagtacctagaggcagatgatcaggagaaagtcttgattgaggtttgtgtggctctacgtgttcagccttggctaaacaataacacggctgacattgtatccatcaatacatttccaacgttttacagggtcaacttaaatatctcaagatgtttgctcagcacacagtaaagaacaaatggagagaatggaggatggatctcgtggatgaattgaaagcgtctcatgaggaggatctttctcagttatctcaagtaagtctcggattccattgtgttgatctatagtcttactgtttcaattatgttgatcctttttcctcttcttaggatcggactcggctccaggagatcaaaaaatcgtttcatgaaaacgtgtctttggtagatcttcaagctagacatgcagcgctcaaagctcaactggctgaagagaaagcaaaggtcgatgaagtcttagcgtgtgatcctgaagtcctttctcatcgtagagctgaggttaaagagcagaagtaagagtatattcggatacatcccaaagaatatacaagagacacatacttaatcgctttttttttactttcatgaactttcgtcattttacagagctcaaattaattccctaaaagccgacttgactgacagtagtaacgtcttgcttagcttgagagctaaagcaactgctcttgaaaatcagaaagaagcttgcctcaaggccattaattatgcagccgaatatttttcaggttcaaacgtttcttctgccgagaaagcattcaaacttaaaggtgaagctacatcctaaattctttcgcgtcattactagcgaacagagctgatgctgctctcgttcatggggtctttttctaacaatagatgaattcgataagattgaatcattgcactcgatacgtcttaccagccggtttcccgaccgacttacctttgtcatccttggtgatctggaactgtccctcgcctgtcaagatgaacgaccattaacgacgggtgcatccctctgtttgattcctgatgagcggaggccaagtcgtcgaaattcagtcctcacacatcatctgttcgagctcgtgaagacatctttcgaaggaacaaagttcacaaaagcttctcaggtattctgatcttttgactgcttttgatcgttgctatccatcactgaatttgtttccttctcttcttgcgcgcgaatggtatttctcttctgatagctctttcagcatgtataccagctttggagctcatctatccggatagcacaagaattcagcctcatctcaacccgatacccaatagtgtacacttattccgccgaatcctcgatagaaaaagccgaagtgaccatgctcgtaccgtctgccaaagccaaagccaaagtgacattcacaattgctcctcagttgttgctgaattggccttcgaacataaaaaccttgatcgttgatgttgaggtctgctacggtcagggcgttcagtaagtttgatcgtttgatttgccctctgttgtgtatttcagctgatttcgccattcctttcttttttcttgccttttctttcaatcaagacgaagttcactcaacaagacgatccagaaccgtctctcgatggcaactcaggagacaccgacggggatccttgtcgatgcctgtttagaggcggtggctagttacgaccaccaacaatgatatttcctaactaaccttcaatccttgatgaatgtagatgatcaattaaacatgacttgccttcaattattcttccgtttcgttcgtcattagtttcttctttgaatttatttcgttccattttgacttttttatacccctttacgagactcgtatatacgttccacaatttatgattttaatggagttgttcttcccctgtatatgcctatcgtgatagcaaaagaaaacagacaagaacaaagggccattcaataaatgatacatctttcctaaaagtcattgcctcaagcctttctcttcttgggagctgatgaacgagacaaccattgtatagaagaagtgtagcaaaggaaacacgattagttcctttcagtagcaactcgcactgtgcgttgtttcgaaacttaaaatcgctcaccagattttggtttgccattatcagcagctgcggtcgtagcctttctcttgccacctgttgtcgtggataacgccagaggcatcccacgatggtcatatctggccgagaaggaaggtcgtgctgtgacatgatctgggcaaaaccattctggttcttcaggaatggccgttaatggaggcgtaagacagctaggatggaaggctcgttcacacttgaatcgagagccaaagaagcaattcgtttgatgagtctctgcctaaatgtcgaatcgagacagatgaacggtgagttcgaaatgactcacaaagtcacaagctaaaggctccaaagcgcctggactgtcgtttttgcgacaaatagcacacttcgggattcattcggatagagatctatcagcattcctacatttagagacctctctactctattttcagtagacatgtatcaacaaacaaagacctcacaggttcgtcctccaacccttcgatgagcgggtgtcgtggcaactctgagaacgcatccgaaggctcagcaaggaatacactgaaaagtttttggtcagatgctatagtaaagttatcaagggtaactatcgatgaaaaagacctacgtagtataagccgagcatgccgcgcttcattcgagaaggacaaattgaagatcgccgttctgtcagtcaagacgttcttagatgttcaaagatgaatagccaaagaaagatagaggacaagttactaaactcgagaatcttaatgccgtccaaggtgaaattctttgccggtctggtcatcgactttggctgaccttctccgacggcaagctctccgtgctggatggcctgcccccacccgatagtgatcatctcgtccgttcccgctggtttctcaggattagcagacagagcaaagaacgcagagcttccagcgcatactttagtaactttgcattgcatcatgtcggacatgaatcggaacgtcgtgtctgtattagcgtatatttgcgagaaagacagtcagttgtgaaacaaagaattcttatctagagagaaggagagatcagaaaaggaatgacatacaaggagcacctgaagacccttctcctgtagttttccaccgaccagccacgaggagcatcgactgattgtcaatgaccatctaagtttatagataaagattaatatagagactgtttcaatagctggaagattcgatgtcttttgctgatcaacgaaaacgaaccgaactggcaggcccacaggcgatggactttgctctaaggatgaccttttcctgagcaaactgaatggatcatcaacgtatacagaagtcagagaaaattcagattcggtcatctaaaaggcatccttcagtatgaaacctgatattgccttacctgtggaacaacaacaggcaaaagttgatctttttgatgaccgagtcccagtcgacagtagccattatatccccacacatagacgaatctgcaattccagaagaacatgtgtggtcaagttgtcgaggagcagtatagtgatatcgtcagctcatcgggtctacgaaagcatatttacgcatatgagaataatccgacgaacccttctgagtccaatgcaagagcttttgttgtctcgcgaatatgccaaaaatcagacgaattaggatcatgattcgatcctatgttaaaccaagcaggcaagacatacaatgcgaatttccactggcgatttgaacaatcttcttgtcatctagcgccttgataagctctgatgcaacccaagaaagtacctcagctgcgtcagatctcgtttattgcattcacatccagacaagcgtatagaagaagatgtgtttacgaactaggctcccaagaaacctcgaatccgtttttgccagaagagataatgtgctctccggtcttcccatgtcccaattggccctattgatatatgcgtttttgagtgatatcagagaaaatacgaccatgaagattcaacccgactctagtgaatcgacaagaccacgcaagtttcggtagtacttacaaactctgcagaaccgaactatgatctcaaagtcatcagtaagagaaaaatgttgtttaagcgcaccgctggatgtcagtatccccatttaattgttccaagctttcagaagctgagtcgtcggtatcatcaagtcagttgactgaccgaatagactgtcaaccgaaacattcatataacccatgccatccgatcagccatcaagattgcacacttgatcgtaccacttgaccataacaagaccttgtcaatatacttgactcacctttcccttcttcatccaataagagtgagaaattaactccggctgacccgtcgacgatcttttttgaaccccagggacctttgattctggtgaagtttttaatcatggaagacgaagacgacaagccgcactgttgttctcaagtttccatcagtcatgacatgagatatcacatcagcctttatatctacagacacaaagagaacaagccgaagggacagtcgaaaagagagacgaacttggcctaatttgtcttcaccagacacccaggcatctccttccgaatcaatcaagatcgataaacctctcccaacaacacccttcacgaactttgccttcttcttcgcgccgaccatatctggggagatcattttcggtctcgtttccgacacgaactctgctacatgaggcatgcaactctcgaaagatggaagatcctctacgtcgaatgccagaccgaccccacgcggtcgaaagactgaaggtgaggtcggatcagcttgaggagatccaagggcagaaggtgagtttctgccgaagaggtgggcatgaccgatggtatcaatacaaataaagtggctgccggatggagaagaatgaacggattggacttgaacgttgcagagagatcgaaggatgtggggacccatcaaattgggtctgaatttaccataaaaaaaggagagaaacaccaagaatgagaaacaccaagaatcagtttaacctagcccccataagggacgtgtgtttgtcgacagaaaagagagaaatatggcggaaacagaaggacgaggggaacgcaccgaagatcgatctttccttccttccttccgagcgacggcctgatgataccatgccattccagtaaggaaacaaacgacaagaacgggaatgagagtgtttcaacagaaatcagtcgcgtgcgtttggacgagaggacgcgatggagagcgggaccggaccggtctgacgacgaaagcaaacactcttgccatccgtggtccaccagtaatcatatcatggttgatacttatcagatcttagaggagacaattacataccagtctgtaccacctgcgatcaagactgatatacgcgatttaaagagaaaaaacgaattataagaacaacggcgactatgatttaaaatgagtgtgtttattcttgaggtcaacacacaagaccgatgaactcggaaacgaacctctgccaaatttggcctgttcggaagacgagacagatgtcatttgtctgtaggttgcacgagtgatggaactgctggttgaatgaaggatggacgatgtagagattttattgaacgaagatctcaagatgtggagtcgggcggaggagaaaaagaggcggcgaggaaaatgacattctctactttcttttctcgttttcttttgtcctttcttttgctacgatatgtccttgttctctcatcgtttcccaggttttcttttgatcatacgttggccatgcccgacaaaggaaacactctccatctttcagtctacaaggccaaatacagtgttggagaagaaaaagaagcttgagggaggataataaggcgcaaggcacatagtgaacaaagacgggtgatcaagaagagaaagggtactatgaacaagaaacgaggacacaagatcagcgacgagctagttgaatgactggaaagaaaagaagagaaggaaaatcgggatataaaagcacttacttcaaacgaagcgggtggatctctctccggcccatcctcgtcattcactcccgaagaagcggcaacagcaggagcagaagtcgctgcagcgcccatcgcgacatgaccaccagagactgtggctcccggtccaggagcgatttggtccaaagaagcttccagctcaatgaaatccttctcagccttcttctcctcatctgagcagttcgcattctcatacaccatcaaaatacccgcacctccccggccgatcttgatcgcacccttcttaccaccagcctgagcggaagacgtagaggaaggatcggatcgaacaggtagatatcgattcgtgagcgggaagtagatggatgaggcctgggcgggcgtcactcgagtcatgttctccagtgtctcagatgtcggctcagacttcttcttcgatgcaggagcagttgtagccgtgttcgtggctgcagactcgtcaataggaacagcgtcgtccatcttagcgtcagcatcaggagccgcctcttctgtcttctcatcctaaaaaaatcgttgagacagaaacagagttggttcagatgggaatccttttcattggttctatgcattacagagttgacttacagtctccatagctgtatccttgtcatcagcggcctctgtcttctttttctcaatggctcgtgcattagccttggcagttgaggagagtacagcggtggcgatcggcttggcaacctccttcgtctcgatgaccgtgggggcagggtacgcgtacaacgacggctttgctctggaggtgaaaccaagcttgggaatcttgagatccttatccaaaccaataacggccgtgggcgtgaaacctaaactcaagcagtgagctaatgggaaccagtaccagaattggcagaacagagccatcccgacgacggctcccatgttcaagcttccactcttggagagtaaactgatcgtgacgttccttccaccggcgtcgatgataccctggccaagagcagctccaaacttggccatcgaatcttcatgcttatcggtgatcaccgaagcaaacgtctttcgaaccgaggcgaccttggggttctgcgcctcagtctgttgaatg

SEQ ID NO: 1904 - DNA, 10798 bp, Xanthophyllomyces dendrorhous
agcgaaacgagagcaccttgtcgaacaaagtcgacgggatctttggaaagaggttccaagagctcgactgcctcctacacagggtgacaaaaaatgagtccagacaaacaagaagtcagccaatgattgactgaagaaaggacacttcttcaagaatgaacaaacctccaatccagttccagcacaagccactccgagagccaatgccgcgccctgtctgacatgagggttgtagctctcactcagcagctggacaatccttggtacctgagtcgggtttcgacacaaaatgaatccaagggcggtaacggcggctcgacgaacgtcgtctgacacatctgaaacggcgacatccaacaccttacggattgccttattattcgacgttccagcgtaagccatggcgattgtgtagatacctccatatcgaagaatggcatcctacgtcgcgaattcgaaaagaaatcccgattaggtcttcgttgcttttggagtcaaacgtggaaagaacgacaacgcttaccttttctgcgaccaatcgctcaatcacttcgtctgcttcctcctccttgttgtagtacaagaaagcggttccaatcgccaaacccctgatgatcttttcgtgttgggtctcgtgagcgtactggatcatttcatcataagccttgcttgaggccgttccgagcatgaccagacccatggcataaccggaagcttctccggcgacagccgagtcttggaacaaagtctctcgaagctgatcgtaaatctctattttcatcccaacacgaaatttgacaagatgccaggttagatagtctgacgggttgttatctcactattgcaacaaacgagtgcgaaccttcgttgccactggccattccggcgactcccaaccccagagccgctccatgctgaacaacctcctctcctcctgcctctcccaactttttcctcaagtaagagccgactgtctctccgttctctccagttttgttggtcgttcccctgcccgagttgatcaaacccaacgcaaacaaacttcctccttcagaatattcctttccggctcctccagctccggcaccagccgatccaggtaggtaaggtcccaaaatcgtcatacccttggaaaggttacccttgtggataacacccaaggcggccgtagcagtaaatttggaccaattagaggctcggcctaaccagtcaaggtttcttcgaaggaatgtgtcggaagtcgttcccgccgacatgaacgaatgagagagcgtcaaggcagagtgatacattgatgaacgcgaggaatcaaaggcctctttcgtcttctggatgatgagtaagtcagcgtggttgtttttatacaggaaatcaaggtagtaccggatggttttctccccagaaaggatagatcgcaagttggtgatgactatgtgttcgttctacggacactcaacatgcaatgtaggtggtcagcgttggtccctcctctagaggttggtactaaaggacgacaactaacctccgatttaacttctccacagactccagtgccaacctcgcccaaaaactcttgagttgccccatcggccagatcgaatgcaacctggtaggcacccaactgatttttttcgtcgtcttctcccttggccacgatggacttgataagctcggttgacaaactaggctggttgagcaagatgtgaatttgagtgatagatgcgtaatcgaccgcatcggcttctccagaagacgacgaggatggggacagagggaaaagctcgagaagcaacctcaagacctcttgcttgaactccttgccccatcctttgacctccttctttcccttcttgcccttggtagatccggaggacgaattagacgaagagccgacaatttctagcacccatcggagaattgatccatccttcccactcttctcccagatcgttcggacaacatctagtcgacgggactcaagtgcaattccgagcgattgtcgccactcttgttgatcgagagagacagatagaacagacagcacaagggtctctaaacgagggtcgatcgtgctctggctagtactagatgaaggatcggaaaaggcactaggagggagaagagatcgttgttgaatgtatgtatctatactcttggctttaaaagtcaagacaccacatcaagcaacagtcagtttgcggaagattagttgaacaaagatgatccagactcaacatcgacttactcagaacaacctccacatagccttccccgcctgtcaagccacttccttgaatcagctttctttcagcctcgaaccgatctccggcagctaaagcaaacgaaagagcttcgtcgtaagctccaagatggtagtatactttggaggctaggagagcggctagcgatctagaggaggccgaaagctcggaagattcggatagagtttcactgaatattaccgatcaattgtgtatacgttcgtatcagtgccattgattaaagagttggtcagaggccccaaatttgcacaaatcttgagaagaactaaacacacattgaaacaacttcttcactgatttctggccagaactggtcgatcacctcgttcaagttctccagagcgtacgtttggagttcaggggaatcttgttcggagagcagagccaggagaccagctggaagcaggaccaaaggcgagaacgtatcaagatcaaacacacgatcagcaaataaattctcttctcaggcttggctcgaaacatggatgaactgatcaggggggaaagcttaaatgtaaaaacatgaaaagaggtttgatcgattatcgaggaaagagtgtgatgggaaaaatcctgtgatcaagattgccactcgtctctgcaaggatcaatattcgagttctatcgagacattcctcgcttcttagtttacactaagatcgctcagcctccctgcttaagcatctcgcccctcatctttgacagtccttacgaataagatgaaggagcctcgttgggctcttcttcggaaagagaggtagagaaaaactcaccagcagagctaggcttgacagacacaggcatttgtcagggacttgaagatcaaaataagcttagtcgacgtcctcgtatatgtttattctagaaagatagttcttgagttgaaaagactgaagtaaagggttgtatagtctggccgtgatggatgaatgcagaagttcaagatgatagcaaggagtgaaggaggtgatgtcgtggaggctaagcgtgttgcgtgcgtggagactgatgtgagactcgtccaagcctgactgaagcctgacgtcgaatcacatatcacctctttattcatgtatcggttggatcatactggccttcttcgacatccatttcagacatcgaagacgggagatataatacgtgtaaaagacgcatggagataggtaggaagatacaaaatgttttgaatagaagcacaggaagagaagaggatgataacgagaatacgaaagatataagaaaaagatccacagatacaacatcatctctaatctatgcagtctcctgatctaaagcctcgtatctaacagcagacttttgagcgcctcgtctagtgaatgaaagccaacccttcgaatttgccggtccaggcgagcttgttcgagagccgggtctagagtttggtctagagttcgagtatccagacggtgtctgaaagcccgatccagagtcacctgattctgaatctgagtccgaatcaggatcgtccatttctgaggaaagatattttgaagatgacgttgtgagtttatcgatctcttgaaagaggaggaacgagaagctgtaaatcgatggaacgtaccatcgccaaatagctcgttcatgttttccactgttcataacgaagaattgcgcgaaacatcagcactcttgaacaaaaagttagaagagcaaataccaactcacaaggtactccacatgtttctggatacactgtgaggtggaaggttgagaacaagtcagtacacaatcgaccgagatgagggaacgaggaataattgagcttacagaagtacacgactacaaaggaacagatacagaagaacgcatgcacaggataaagtctccaagcctgatgttgtgtcaatagtcaaaagcaagaggtcgagcgatcagcacactgtcgttacgtacatatagcaatatgagacttacaataagatcctgtagaaccggcgtcgcttctccaataatgaagttaaagaacctgatgcaaatatgggaattagttctccagtctttttttctttttgaaaacgatgcaataagacttaggtacataccaattctaaaacatacgttgttgttcacgtcagttgagacaagacagaggcaatggactaagaagaaaataaacagactgctggctgaaagaacgcgtgcaactaaccgtagcagtagagatcgacacgcccttggctcggaacgccaaaggcatgacttcaattcaaacacgcacagaaacgccagctgtatcaatattcagcctacgcaaatgaaaaaaggaggctaaacatactctcgggtggatagagccaaggcaatggaccccaactcgctccaaaggctgcattgaagatgatgacacagacgaccacagcgttggctgttttgattgccccaaaaaacaacgcgttggctgtttagtctcctcgcaacgggagctaatgaggagtcggagaggcaagaacgaaatatgacgcacgagtgaatgccagatcaaggtacataaagtagccgactcctgttaatgccaaagacatctatatattgattggttaaaaggagggataagctttaaggtcgtcgaatgaaacttccgtatcgcgagaccactggagaaaggtgagacgtacaacgacagctcccgagagcaatataggccttcttcccattcgatccaccaaataccatctgttgaccatccagttgaagacaagtcagtatcggcttgttgaggtccaatgataaagaagcaggacaaacgttggaatcgtagaaagaacgtagatgattccattgatacccgtcatgagaatagcatctctgccgatccaaccggcctctacatcggttgaacgagagtaagacatagagccatatcagtgatactttgtcatgtagccgagagaattgagtgttataaaagtctcacgctcaaaaaccagaggagcgtaatacgagacctgatttactcagttcgttcaccaatcaaagccccacaagaatgctgataagcctaactgatatcaataggtttgaacgagatcacaaatacgaacgacgttgatgccgttcagctgagcaaacatctgagacgaagcagcgatgagcacccgacctcggtaacgtctccacaaagccttgtacgatttgtcgttgattgctttctaaaaagcacgaagcacagaacatgaaactagtcagtcagttgcagtctttctctacaaacatgtgtcgcgcttgactcacatcagcagtaacaacgtctctaacaccttcgtactcctctctgacttctatgtcgtcttccattttgcctctgagcgcagcgatcactttgatcccttcatcgtctcgaccaacagcgatcaaatgccgaggagactctgggatgacaagggaaccaagggcaaggatgactccgatgatactgtgaatttgtggggaaaggaagggttgagctgtggctcattaagatcaagcatgaatagttgtgatcatgttaccattctgattttgcaagaaaaagcaagtttaaagggatgagtcttgattcaaacgtgaacgttatgagcgttggtacgtgacgaaagtggacaacgtacgaatggaaagaggaattcgccaggacagatccgacttgactaatgtttgaattagaaacattacatccggcggtatgagtgtagaagcaagaaatctgcttggtcaatagtggggaactcacggaatgatgcgaagtaatcaatccactgtatatgaccagtaaaatccaagattacatttcatgagtttctcagtcaaatgacttgaacgacacaaacgattaaagagagcgactgacgacactagacgcgtatccaacaatctaataaacatcacattggtattagcttctctgttctattggcgactttaatacagaagacgacgtacattgcctgtaaattccacgcagcctaagagccctcggttatgggctggtgagacctcagcctgataacaaggtacaatcatactgttttgacggaagaaaagacctcagaattcgagtcggttcgccattaggatctgataaatagcgaacagccactgacgatagcattcccacgccaaatcctgaaactagtctgccgacgatcatagagttgaaaccagttgtgaacgtctgtaacgctcctccgatgacgactaccatcatcggaggtgtgtgagcgatatcagtacacgtcaacattttggcgtttcattgtttgagaacgaacgaacagatgaatgaccctaaaccaatggtaaaagttcgacctttgatatcggccagtttaccagcaatcaacgatgtcactgtaacccatttgaccgtatatgagtagccatccttccattgtggtacaggctcaatcgttacaaaaggacagaattactcaccaaacgcgccctgttcatatgcagcatacaaggtcgccccgtacagcagaggatgtcagagacatgtcactggtcgagtagtttagaacaacttcagcaaatgatggaacgaacgatctctaaaacagacaccattgttccaatcttgaccggatcagggttctgaaagtaggcttggctgaattaacaagatttctcaatagtggcatgagaaaccagaggcatgcagcgtaggaaaagaggatgatgcaaggaatgaggaaatcatgaaggatagctcacaagtatggacccgttctattttgagcaaagaagagcaagagagtttagcaagtgctgtatcgctatgagggaagaaaagagagcatacatgatcccggacatgactctgttaatgagtaagttcaggcaaagtgtttcgttcgtctggtcagtccaatatgtctgagaacgtttagaaaacaagaacagaaatattgcctagaaactctacagacccttgatcgtatctataagttgtccaagattatcatgtacgtacagccgcacattgtgagcatcgagaccgacgagagaaacaaagcacacggcaaacaagatggtgaacagattagccaccttatctaactacgctaaatcaccaaccaggctgacaccaaactagaaaactaaagactgacccaaacaaaaacacacccagactagcaaatgtgctgactccgtagagcaatcccttcccgccaaatactccagtggattttccctcatttgccatcagttggtccatatcgtcattaggttgttcctgattgacatcgttgtccgaaggattatgtttgtttagaggtctttgaacctccatcgtttgccgcgtatttttccgatatgaaccgtgtcgaccctgtcgtctgtttcttcgtctgttttgcagctccaagatccaattggctcgatccagacgtattcttacggtcttgcttcggatgatctaacgggattgagatggatgggatggatgagagaatgagggaatgagtggagtcggctgagggcggatggttacgcagatggtttcggttgcaagctcgctgactaagcaatcgaacacggacgtcccagcgaaatccgcatacttttcattggccctacgacttctaacatcacccacgacaaactctcactttttcccatccagttcctcttgtgagtgtatgttttgttggcgtcaagaccagcatcggaccaaagacagcatctgattatctctctctacgtatcattgttttgtttcgtgcggaatatcgttgttttaaccggtcgggattggtttcgttgaacgtcaaaaaaaaacgataatcttctttttcactgccgcctctcgttcgcccgatccaccgtctttttccttgcctttcttttccactcagcaccctcacactcaattaatcaatatgcctttgatctggggacctttgggagtttcgtacgttgagcttctttgttgtctttctcctgtggtctggatggtcattgggcaaaggtggatgccgatacgtaccgcagggttctaatctgatgctcctttattatcctttttccctccttgtctgatctcttcctcttctgaaatttcttcaactatccgatctgatggatgacccgtacaatggacaaatccactttgattcaataacctattgcaaacggatcccttcatctttcgatcgactttcatatactccttatacttcttatatcccccttccaccgcccttcgatcatgtctttgcctcaaaacaaatctagggcttacgatttcatcgccgctcgacctcgacttctcgccgctcttaagcccattgccaacatctgggtctaccaggccggatacaggcagcttggactccgatacgacgacatcatcgagcacgagaacatggatgtccagaaggtatgccaccatcgatcaatcgatgtcctttctgctttgtatcttcttgtacttgatctcaccctgtgcttttcatctcttccacatctcattcacaggctcttggtcgactgactgcccgagagggttacgatcgagtttaccgacttcgacgagcgatccagcaggagatcatccaccgagaccttcccgagagcgagtggaccaagcctgaggatgtaagttttctctctatatctctgtttccactcagttcaactcaaaagagatacagaatgtggtttcgatatttgtattgatgttgtcattctttgaaaatttcgtttcaccacaggacatccgatacttgactcctcacattaagaacattgttgccgagaagaaggagcgagctgcttgggacaacttgactgtcaagaagtcggcttaagcatctttcatgagtttccttttctttatttctcgtctttttcttcagtctaaacccgtagtgtcgtatcttttctttttcctctctttcgcgttcaagaaattggatgaaacattaaagaagagacacgaacgagaacatgaggttcgcgttatcgatatggggaaacgagagggtagaatcgaatgccgttttctctttgtagaaatcctcctttaaagcagttgtcttttcaggcgaaaggtaacgtaacgtttggcgatggtgaattagaactagaatcaggatttcagcgagtagattgaaacaagaaagcgatttgatctccgagtgctcgtggagaatgcacatttttctccacgacacgcctgataaaggaacatttcgagacaggtagagataaataacaagtcgaaagagaaaccttttgatcaaagctcttgtaagatgttttgtgattgcatcttgccagtatcggcgctctcacaagcactttttagtgaaccaacaagaatctatccaaacaatcatatctctttctctccctcaatttgattccacagaactccatccaacccgaccaatctgatacctagtctatcgcatcccaactctcgcgccaatgtcctaaccgcttctccatctttcttgatctcttcctccgtagctgactctgatacgatcgggtctgtagagatttcctccaacttcggaaacgcttgccgtaatctatcttgaatttttgtgtcagccaggaaatcctgaggtctgggaaaagagtcttgaggttcaagtccaggttcagttgttatccacaaagaagtcactgttggatgacactcttgagcgagaacaagagaggccagggtgcttggtatggacatccggtaagcgttagaaagagtgcgggtgaatagtcggaagagatcgatggaaggtgtcgtcaacgagagctctcgaacggtgagcgatagttcagtcaaaaggactcgaagatgatcgaacatggggacggccgataggtctatcgtcggggacacaggtgattctgggtcactgatctcgataaatgttagaccttcgagtgaagaaagatcgaatatcgttcggagggagaacaagagtcgagtgacggattgccaaccgtcagattctgccgaaaggacctcaaggttccgaatggaaatccttcgttcccagtcggtgaagcatagaacttcctcctccagccctctgagatccgctccaatttgagcttcatcctccttctctcccttctctgcatctgcctcataatcgtcgtcgccgaatcctggcgtatactccaatccaattgatatctgtaaattgggaaagtagtcctcccggtcgcctacaagatcatagcaattcgaaggaagagaaatgtgttttaccaaagaaccaaacgagggtttgctatctatcgctccgaagaagttgtcgatgtcgacagccatgaggtcgatatcagagtaaagaagtggggtaatcatgttctgtgcaaaaggcagcgatagtcagttcttattacaagcagagaggcctcaggtaaacgaagaagaacacaaataagagagagagcagacgaacccaccattccctagagacgagactgaattttgctaaatcttggtacactgcccgctgcctctcctccttggtcgacggatcgtctcgataagt

SEQ ID NO: 1905 - DNA, 994 bp, Xanthophyllomyces dendrorhous
tgatgatgatgatgatgatgatggtgatggtgatgatggtgatgatgttgtcgtgtttggtgttggattagtgatggaagatgtagatgcgctaggagcggtgttgacgttgaattcttttttgactggaatggagaacgacagagatgtcagccggcgtttacgaaagagagcgggtcgtactgcatggggaaacccaacgctcaaagacagagtggaagaaaggacgaacgttgatcccatgctctctgttctcttgcttcttgttgctgttggaggtccaccagggcggaacgttcaacgaccgaaccgaacgacaaataaacaagcaaacaaacaaacaaagagtcaagtgctaagtggcaagtacttgtgaggcatgacctccgaagggaagtcaaaggaaaggaaaggaaaggactcgtgcttacctcgacagaatcggttccaccgaaccatctctgcaggaacggtttggcgttcaactcttgttgttccctcttgatccgttggtccatcgtttcggcgtagtccttctgggccttccgttctctcaggccggcgaggacgaggactctgtcgacgtcgacgtcgtccttcccggccttcagctcgcccaccaggctttctaacgctcggatctgtctgtccgccttggcgagctcgagggtggatcgcttccgtttgtcgtacgaccagctggcgatcgaggacgcaaacagccaagggatcaagatcgaccggacttgtttcagtcgttgtccgatcgagggacctttgagagagccggacgatggtaggacgcctctcgggatatagatgaatggtagtttcgacgcttgagacatgctggctcgtctccgggggggcaggaggggttcttacttcttcagacaagagtggaggaaagggaaagcagggtcgaacgatttcaaagaccaagtcaaagatgagcttggggtcgtagtctcaagaaaagagagagagagagaga

SEQ ID NO: 1906 - DNA, 458 bp, Xanthophyllomyces dendrorhous
aagaaaagagagagagagagagaaggatagtgtacttacgggtcctcgtctgacgatcagatgaaacacataaacatcctaccattagcgatgatgcgatagagaaagatagtgcgtaaaagtctcacccagaggtttcatgaatgtaattgccgctcattgtgattctgtcgttcgatcccgtggtgtaaatcgcccagtaatgctttccgttgcagctgaatgtcgacatgaccaattggtgatcgaaaggaacggaagaggtagatttgttgttagtctttgaacaacagacgtagcattgaggtttaccaagcgagagcacatacgttgcagaccaggatgtccgaccgtcaagctcgctgttagtgagggcaactcgtttattggcgccaacacctgcaacgaacatctgtctgccgaccaatgagacctatattgataggattatccagata

SEQ ID NO: 1907 - DNA, 5530 bp, Xanthophyllomyces dendrorhous
atccagatacgcatgacatgttgcatcaatacgtgattgtaatatttgttgagagttctcaagagatggctgtgtccattccaatcatcaaacagagaattgataggacaaaggggtttacgtaccttgacgtggtcaacccagacgttgtcgcttccatcaagcgtgatcccatcacctccccaaatatattgagggttgagtgtgtggatatgaacattcctatagtagagaaagagcagtcgatggtgagcatctatcagcaaacacaatctaccatgattgacagatcatccaaaaacgtactgaataatgacgttttgagcacctattgtgttgaagtaatatatcagaagacatggatatcaagaatgagtcattgagctcggaaatatgttccaacaattgcacatgattttttccgaacttaccagccaactatatcaagagaaagcaggagtcatatcgatgagatttccatgatagttcacgcttttatttgggaaagaaagactgatccacgtaccctgagcccttttcccttgaaggaggcgttggcgccgactccgaccaaagacttgttggatccctgagaaaaagcgttgtaatggtcttgctgagtgatctttctcacatcatagactttcgttcctgttaatgaagaagaaacgagaagaacgaaccactttgatcgggttcaacgcggcattgtcgtaagtaacatcaacagtggtcactcctggtccggcgtttccgttcgtgcaccttacaaaagtgtacagataccaaatcgaggtacagaagtaagatacattcagccgggtcatccgaattgatcaactcgagtagctcggacttcaaagatgtactgaccagttagccaggttgatggcatcttgtccgcccgcgccagggcaagtatctatacgtttccttccgtgtcagaaagttctatcatgatgaagttgacgcgagctagagatctccttactcgagtctggccggcatcccttagcggtagtagttccttcggttctgattagtaggaaacacagagaaattagtagataacttgacaccgtgagaaaaagtatctggtgcacgactcacccgataaagttctgctcagagttgatcaagatgacccgaggactaaaacacctcgaccgtttgataaagtgcaacatgagattccgaagatgaaggtttgttgagctttcaaggttagtgatcttttcttacgtgctgtcctgtagccattgaactagctgatctcggcttgagggataggccggggcagcactccctcctccagtcgtaccggtctgaaccaaggagaagtctgttaggagtatcgaaccccacgagaagctcgcgcagaacatccactcacagcaaatccgggagcggacccggttactccagtactatgacacatgttgttgatatcaagcgcaagatgatttagctgtctgtcagcgatagacgataatcagaggcacatatacaaggagaaacctacacagcgcgagcttggatgttgtccatccgagctggaccggcaagaacggtcgtggctgagatgagtgaggtcaagacagagacggtagaaaaaatcattgagcaagtatcgacgatgagtgggaggttgaaggaaagatttgatttactcgtatcaactcttgagcccgttttctttctcttttatatctcgtgcattcagttctgtttgaagagtgtgcttggcttttctcacagtcaaacatgctctgcatattgtacggattaacatagtcccataaggttgcgtccactcgaaggaatttgaaatctcctccgaacgaaccagtagagctgatgactggtcaggcgctttggggagtttgacaataaatatggactatagacggacatagagggatgtctgtcggataaaaaatcgattgtcgcgtgtcattggggaagaggaagaaacccaccctccggaccggcattcacatgaggagaagcttgtgaggaaagatgatagacatcggatggtcaacctaaagacaccgatgcgagtggtagttgacatccaatcccgcgtgagttgatctaaaagagaagttgcacgtggtacatcggtgaacgaccatgagtctgggacagggatgtcaatgaagcggaagcggagacggcaatgaaagtagaaataaacacaaaaacaggaatactgaaagtaattaatcaggaggatgaggtcgtttcatttgtatagccgttaaagttatgcatacgttgattaagtgaagatcagcaaacatttctaaattgataaggttcttagatcagttgacattctcttggaggatcttctgtttaatcgtcagtgtcattagcatttctccgaatgtcttgcgctaaatgtgaactgtttcgcctcctgatgagcgtgtgagagacaacatgatggtgatacttgcaaacaacatggagggtatcacggatataatgttagggttatttctggtcacatgacacgccaagtaaggattacctgcgacctgcttctctcccaacagtgttagtagcaaacgacaacccgaccatgccttcacctgaagaggcttcgagcttaacttctcctcctcctccttcagtgttgactgaaacttcctcaacagatccgtcttcagttcccgcttcattcgcagacttgggactggtcgactcgctctgtgaatcatgttctgcccttggcttcaaagcgccaaccgaaattcagaagcagtccattccgctagctctacaggggaaggatcttattggactggctcagacaggctctggaaagacagctgcattttcactaccaatccttcaagcctggctgaaggatcctaaaccgatgtttgctttggtgttggcacctactcggttagttcggtcggacttttgaagctcagacagagcactactcatgtctggtcattattctttggtaccatctgaatacagagagttggcccatcaaatagcaaacgacatcgaaaatttgggtaaagctcagaacgtcaaggcagctgtgatcctaggaggagaacctatgatgactcaggcgattgctcttgccaagggtccccactttatagtagctacaccgggaagattggtcgaccatattgagtctactaccgggtttgtcaagagctcggctgggagaccctcgctacaggatgtcaagtatctggtgtgttcttgcgcgctcatgtccgtgtctgtatgtttgctcatcatggcatctcgcttactattgtttccctatatatttataggtccttgacgaagccgacagagtgagtgccattgagagtcggtcatgcttcccaccttgaatatcgctaagcctgttcatgttggtacagctcctcgacatggactttggaccgtcgatcaccgagatcctgaaacacattcctagaaaacgtcagacgttcctcttctcggctacaaagaccgtcaaagtggatgctttgaagcgagcgagtttaagcaacccggtctcggtcaatgttgtcgccaagtatgtcaaaaggctgtctcgaattcaattgtccttcgactggtagaaagataagatcttaagtctggatctgatcgttttctctcctatctcaaaactcgaaaaggtactcgaccccggctacgctgcgtcagcaatatgtatcttccccagcgacggaaaaagacgttcacttggtatatctggcatcccaattcccagacgaatcaaccatcatcttcactacaaaagtgacagaggctcaacgattgacgttcatgttaaaggaacttggattccctgttgtgtctctgcacggtcagatggctcaaccagatagagaggttgctctaaagtcattcaaaaaggggaggaaacgcatattgatagctactgatctcgccggacggtccgttgtgtcctttttctttcggtctttcttcttgaaccttctctgtaacactgacagcctgccttgacgttcgatcgttccacgtataaacagaggactagatatgacgaccgccgtggacctcgtcatcaacttttccctaccgcaaacacccaacgattacattcacagagtaggccgaactgcccgagcgggtcgtacaggccgatcgattaccgtgttgacagagtttgatatccaagacttgaaatcgatcgagtcggctacgggtgttcgaatggacgagttcaaggtcgacgaaccaacggtcggcttgcttaaggagcgagtaggcgaggcctctaggatctcggccagagagatgagagagttagaaaagaagaattcgagaggaaagagaaagagaatggacgggaaagggaaggatgaggctgatagggatgatgatgtcaagcaggcagggatcccaacgagggtaagcggtgttgggaaaaagacaaagagatgatctcaaagatgattgtgtgtaacttttcttgaacacaatgatgaagatcgcatagaatatcacagagggcggtctcatccaaaagatataatataggcaaacacaacgatgataatgattagtaattaaagagtatggtctcagagaacgtagtgaacaaatgatatagcgatgattgtaagcgaagatattttagagcatgggcggaagagataggtaacgattgtaacacagaaaaggagacaaaacaaacatcttcaagggaagcgatatcccatggagaaaggtgacaactactcttttgtatcttctaacaactcgacgtgatctctctctgcaggcgctaactccagactctccctcggagcttccagctctagggcgttctgcaactgcattaccctcccaacgcccaggcctccagaaagagtaccctctcctggggaaaccatgccagtagactggaatgaaccaatagccctggatgaagatgcacccgaatgactccgttctctagtcgataaccttcccggcgccagcaatggctgaggcgggatgtttgagcccgaggtcgaagttgaccctgatctggtagctctagtttgcccatactcaaactcgcccgacggggtcaacaacggcggtccaagtctgacctgtcctccttcgatggtaacattttcctgtcctgatgatccaagataactgtcggtaacgctcgctctagaatttgctcgaggtcggttggctcgttgggcacgacctcccattccacctagagagtataatgatactgtctcgctagcattcgtcatcgccctcggtctagtaggtcccaaggtcattggtgaagacgtcggaggttgctgaccgaaaggtgaaccgtggatagatgacggggaacgagctttgcgaggcggtgtcaccggtgggacggtgagaagagaggtgttcgctgtgaaacttggtcttcgacgacggtctcccatcgagggagaacctggggtgagtatcgttgaggtctcgtttggagcatcaatcggtgggctcggaagtgggatgaggt

SEQ ID NO: 1908 - DNA, 1490 bp, Xanthophyllomyces dendrorhous
gggatgaggtggtgttctgcctgggaaccgagggcaagaatagcgatcaccggattagtgataactccaagaatcaacgcgtacaccaacttgatgacctaaagtacaaaaaaaaaggaactcggaagcataagtatttacttgtctgccaacatccagacaggtacgacgacaacaacgacgacaataacaacaagtgaaagaataaggaccgacctgaggagcccacttattcccgaggttcccgtttccatatattggtcccagaataagcaccgccagacaccaaagcgggaagccaaagaatataccaatccccaagccttggacagctgtccaaatcaaccgtttaagccatgttcgaacaggtgcccgttcgagaagaatattattttccgatccttcgaatatgaatctgatcagcatcaaccagtagtactttaatcccttcttccttccgtccaaggcttgcccagaggaggccatcgctgaagataaggctttctcttgatttgaaggatcatccggatttagcctccggttgaacaacgtagccgggtctggaaggtgagacacatgagggtacacgaatggcagaggcgcgattgcactcgaatgaagatccgtatgaacgagtgtcgatgtgatgatcatcttgaggatagtaagcgtgcgcatgtgcatgtgtggaagtagaaaaaggtgattaaaaaagacctagccagatggcttggtagatgaaagagggagaatgaaagaaagaggagacatacagaaacagctgtttgaatcaaacaagtgacacccagatcacctgctatcgtgttctctttgaacaccctatatcgagatgcgcgttagtagaagagcagaagggaggcttcaggggagaagaggagaaagtacgaaccacatccggacagtactctgacttgaatacactgacaaccccaaacccaatccatcaatccaaacatgtccacataaacaatgaacggatctctgtcaggaaccagaaagaccaaagcaggaagcaatgaacagcagagaacaagatatacgactcacttgcgtacgctgagcacatccaatatccaaggtgagagaaaaagacgggcatagttgttagtcatactgtccgcttgcgtccatcctcgtctgttctctttgaccgggcaaccccagagccgaaactattgaacgcaacccacaacaacggaaaggaacgaagaggaaaaaaaaaccagaaaaaactacgaaccaattccaaagttagcacctccatcgatgatccccgccaacaaacactgtgggacgatcaaataagcccattgcttcctgtttaatggaagcgggaatggaaagaatatcgaagccattcctctgttccttgctttcttctttcttggtcggcttgttggtcgtttcctggtctagttccttgctcctggatatccgtcgagtctctaatactttcctcagctctatgt

SEQ ID NO: 1909 - DNA, 25899 bp, Xanthophyllomyces dendrorhous
  misc_feature (24184)..(24193): n is a, c, g, or t
gctctatgttgatcgtcgtcgtcgtcagctttggggtggatgaacggacggactgactgagtcaaggaatttgttgattaacttgacgatccccacttggcttacgtcatacgtctctttgcctcgcctttacgtgtccgtctcagtctctttatgccgtagatcatgtgcgtgtatactagacgaccaacatccgacaacatatcagataaacagtcagatcgaagtagaccacgatggatttcttttccgttgcgctttgccgaggacgagaggatctcacagataagacaagacaagacaacaagaggaactcgacagtcgaaaagaaccgagacagcctccaactgtcctttaagatttatctttttaaaatatcgagctgagagaacgaaaatgagaaaaagagagaaagagagagagaaagagagagagaaagacggcagtgatagcgtaggagtggaaccggacaacaggaaattttcgttttggttttgttggtgaatatatttgaaggcgatcgatttggttcattccggtccggtcgagttggtcggggtttaaactcgaagtttagcaagaggaggtaataaatataaagacggaaagaggaaagagaaaaagagtagtgatacagctttaaggaggaggtggagaaggaaggaggaaggcgatggaggaagcagggcagacacacaaacacacactggcgaagagaaatagaaggcgaggccaagggccactagaagaagagtcaaagggaagggaacaacacgaatgaaagggtggaaggtgacagaacacatagaaactcgactactcatcctcctcctcatcttcatcctcactatccgactctccatactcattcctgagccattcctcggcgatgacatactctcctctgactttctcgtacgccttttcgagcaacttgactcgtttctcctcagcagccaaagcttcttccttcgcagcttccaagatctcgagttgctctggtgtgagctctgcggaatcttcgtcgaattttggagatgacgtcgtggacttgtccaatcgtgatgccctaggaggaagaaggaacgaacggataaataaccaacaacggtaccaatctgagatcaaagaacggaaacatccaaaagatcattttggacacctacttgacagctttgtagacatcttttgcctgcagttggatcgtctcaaaaagggaagaaactctagcgacaccaagtgctgctgaagatcctttcaggaagtgagcaacttgggaaacagtaagataatcctttgtttttctaaggtagcaaaggcatagggaaagaagatagaaataggatgacaggaaacgcgagtcagagacagaagtcttgggtaagaggaggggaagaaggtaggagggcactcacaagctgtcacccatctcgtcaagcttttccgggacctgttcgaagtacgtccagacgatacccctggagaactctcgttcgtcttcgtcgtcgtccatctcttgaagttgattaaaagtctccatgtctgggaagaaggaaaggggaatgagatcgagagcttatgtagaaaagaaaggaacggaagcgagatcgtaccgatgaccggagttttatcctgtattggtggattttcgtagttgagaagaaaatatgatgatgagtcagtcaaaatgaacaagtagagcacagataagaagtgaaggcaggagagggagagagaaagagagagagaaaacggctgggagagaaagcagtcgagaggagtatgtgaactacattgaggcgaggagaataaagatcttcgatctgaagatcaaagaaatgcgacaaaatgtgccaaacgaagatcgaagctggtgcgtgatgatctggtgaagtatgagatcagagagagagcagatggcataaaagaccaggaagcaagagaggtagtccaggggaagagaccaaaagacatcatgttgattgtctaacccgatctgctcattcgttctctccgtctctgttcgtaccgttttccctcttttttccctgtgtaaataaatgaactcttccaattttctatttctcctttacaataccagggtccggactcgaatcaagggaacaaaaggataggagagagaccgggagaataggacaaattgagaagagaaaaacaagaagaaaagacaagactaacaactttagtaacctcgtcatcgacctggtcttcagagatgggagccgacgaaggggacggcttcggttccgtggtgttagaggagctcatcaaagattgtgggtttgggtagtagtggtgttgtagttgatggttgcttggatcgaacttgaacagggacgaaagctatgactccagagtcggatcgggtgaagggaagaaaaagaggagtggaggcgtgtatgcaagagaaaaaaagacgagggagggatgaaaaaaaggagggaccgaagggaggcaaggaaaaaagaagaacaggcgatggaatggaaagagagtttccttttttctgttggtcaaacgagttggttccagacgaagactgagagacagactgggatggaatagagaggaaaggaatggaaaggcagacaaagaggagaagtcgttgcttggagttcgttcgttcctcgatccgggattggcagggagaaggttcagagggcgagagggcagagagagggaccaggaacaaggcaccaggcacatggctttgtaaccataccgtaacctgccgggtacgtcataatcgaatatcccgccagccacgtgcgcagctgagaagtctccaagtaattatgtgcgtacgtcagctgtaaacaaagttccacgagggttatcatattggacacaacaaagtgctactgaggtatcactcatggcgtgtgatagtcatcttgtattatgtttcctaaagcgtgttcgctatatgatgtcgttgtctgagaacgctgtttatgagtcacacttatgtgtgctatgtaagctcgctacttgtatcgcctctgacgcttttcattaacgccgtccatgatacctctgtgagatcgtccttatcccatgcgtcctgtgccatagtctagagatcagaagcttgaggccgcttggcagcaaagaaataacacagtcttatttcgtcgagatcaatccccagaagtttaatttacctccgatagtcgacggtcaaatcaatcggcaacacaagatttcaaaactgactgagtaagactcgtgaagtctctgagttatttggtcattgaatgaattcgtttgagctatgatcgtgtctgtatgctcaaaacatcagatcagaatcttgatctactaccagtcacaaaggatgtgaatgaagaaatgatatcagtaattccagaggaatcaaacagaggagctattaagtatcagatgagaagtgacggcgctcatattcaagtatttgccaacatcttcggatgtgtgcattcgcatatatgcctactgcctatctgcctatcgcctatggggtggacggttctccatcatgttgaccatgaaattatcatttgcttgtatcttagcccaacgaagctattcatagatgcccaggacctattgcctatcccttatggtaagttttgtagagcttcttatgcggacatgtgtctatatggccagtcatgacgacaccgttacatatcactgcctgcatgtctatagtgtatgaagctgaactttatagctcgtactgttcgccttcgatacatcctactgcttatcgaccatagatcgttactcactacccctgtacctattgtaaatacatctgtgtgtcatcacgtacaggcttgagatgctatcacctcttacctctcttgaaatgcctgtcctggttcatgttcctgagctacacgtgttgggttcggcgaacagattggttagtcaacgatgcaagggtagtcacgataaactcggtagtcaccgccgagatcgtttgggacgttcgttgcaactcggtcacctccttcgcccttgcatcttacttgcttctttcttgctcctaccgctctttcttgcgcaggctctctctcctccttttgatcgacagggaagcagacacccatctgttcctccccctaattccctcttactccttcctctcctctcactcttcatgaatcctttacttggactcctcttagctttctggatcctagcaatacaagccctcgcccaggtgtcttcgttatcctcgtctgcctctgtatcacctactctttcctcatctgcattttcatctgtttcttccttgacctctcctacaactcctacctcttcatcgtcctatctgtctgcatcttcttctgcctcaccagtcatcccatcgttcaccgctagcgctctcccctcagccacgaattccactcttcttccccagtccatcaggctagatgtaccatacggatttgcaggcgccgctcttattattaccggagctgggctctgtgtgctaggagaaggaaatagatggcaagtttctctttgttcgacgatctgctcagataaatcgcctctaaagccaacccaatttgccttccttctcaggacctccctctttcttgctccgttctatgccggtgcacttgtgacagtgacgatcctccttcactatgctctcccgcccaccacacagagtccaccgagagaattgatccgaggagtgtttgtcctcatcgccgcgctcgtcggtatcatcgctggcgcggccggtgtggtttcgttcaataagtcaaagtttgccattccccctatcggaggtttctctttcggctggtttctcatggccaccaaacaaggaggtctcaccggtcagagtctcctatggcgatgggtattgatcgcaagtgtgtccatctttgccaattcttatcgctcttgatttgcatagttatcgcatgcttatggatatatctcgttacttcataggcatctcggtgggtttcctggtgataggcatgctcgaaagattttaccgcccagcggtcattgttactaccgcctggtaagcccgtttgattttatattgtagtctgatattatcttcttgactgtttgagacaactagagctgaaagaattgatggtggtccgtcattccattctcttcctggccctttataaggcttggagcaagcgctttcgtgagacaatttcattctgttgcaccgagattctatctagacagatgaagctctgactcaatttcgagtgatctctcctcctattcatcttctctctttctcgtgccttgtatctcggacaggtgctgggacttgactgtttcacgagagctggattgaaggagttctatatctacaatctaggatatcgcaagtccccctcttcattcaatcaacatattgaacttcttgcaaggagtacgcaagcacatgctgaaatttccttgtcttctcgcaggatccatattcacgtcagagatatcggattccatcaatgccgggtttcagtttactcagttgatgcagatcgaactggccttgattggcattctcgctttcctagggtaaagtctttttgtcggcctttcacttcgtctactcctacacctattgatgcttatagattgaaagcctgttttcgaccctcacagagcggttcttcaatccaagttgtgcgcacgcctgggaaaggttgacgccaacgccaaggatagacgacgacgggcgaccgaggacgagaatgaggacgaaatcagaaagtctgtacatgctcaacaactggctcgatgggaggccgctcatggatctactgtcgatgctggtgtcagcgctacgagggcaggccttgaacggaaccaatctgtcttatccagcgagaaataccagggttcttcagttttcgacaagactgccttcgattatgtgcctacgttaagcctgacgtcctccaaaacaaaccctgcccctatgacaatggcgacggcgactgcaaacacaggagagatgatcgagacaaaaacggatcaaccttggaggaagtcaactcaagactcggagtctcaggggttaaaaggacaggccgagttggacgagaaacgaagggagcagctatcactcgaaattaggaccgtcagaagatctatagaagctcttaagacaaacacagtttcctccttgttcccgtattctccctcccacttcgaccggccgaactcactctcactcttgtccgactgtcactcatcttacagtcgagcttttggtcattcgccttccgtaccgggaggcagtccgagaactgaatgggaagcttatctagccaacagacagatccaccggccgttatactctccatcgaactcaagcctaaattctaataaagaccagacaccttcgtgcgctccccagccgaaagaacggcgaaagatgaattggacagctgaggattcgaaagaactcctgaaagatcgcgcgggtgaagttaggaaatctccaagagaggcgcaagaccggttgtctctgacgaggacctcaactttacttagctcgggtcccagatcgacccctctcaatgatgctgctcgcaacatcggcagcttacgggagatgaatagggcggagcttcaggctagacatcaagcaaagatacgagcgttgcagtcccctgtgggtgagttgtttgcaagcttggaggccagaaaccagtgggaatcaaaacgtcaagaggaaagagagctgatgaagaaacgagagaccgagtcgagagataaggaaaacgcaaagagggaaaagatgattgagctggaggtctggagagagggcgtgcgagtggagctgtgagtgaggcttcctaaaagtgaacgaggactgacttagcgatctttctctgagttctactatcaattctatattgatcttatcattatcatcttgcttgtaagctatctcgtctcataacataacatcgtatcgtatcgtatcatatcgttttggctcttttctaccaggcctctgtctgaagcatagtctttgacttcagcatactctctttcttttcaattcgatcaacatactttcttcttcggtcatctcagatacttagacattaattatactatcaattattactggacaaaccattcactattcttatgtaccgggtttatcccgctcttctctgcttgtatcctttccgatcacatgtctttgatgcagtcatgttcgtcaactttgctccgtggaaatagtccggggtagaggaaagacgaaacggaagaaattgcctatcttatcggtcgatcaatttcaccgataaacaacagaaccgcagtaacttctcatagataaatcattcaaccattgccgcttgtgtttgtggcgttcccggcgacgtctcattacctctcgagggtttcgttcaccttaacgaatctgagaatgtctgaggttcgtagaaactgatgattaaagaagaaaatacaacaggagcagcaaaagcggcactaggctgaaggacagcctgaggtttctttgtattcgtgaacatagtccagttctctttcgtctttctgtcctacctcgttacccacatcatataccgaacctgacacactgtgcaacccataacaacacgaaacttcagcagacccatccgtgtcctgttcgagaaagaccacacccaaacacatcagtcagagagaagagaaggaacatcagatgaagcaaccgttctcattaacacatcctctactcttcctaagcctgggagtctctcaacttgcttcccaggtgaaggggcttacagcttccgaatggaggaccaggagtatatatcaggtaatccattgcgttctatgttgtcttcttacttgaaaatagaataaaattagatgctgagaacctatgaatcatgaaaagatggaaacgtgtccaagagttggtcatcaactgatatatatatatattgactgactgcttctcatttggaatgatggacaatagcttatgacggatagatttgccctggggaatggctccacaccggcatgcaacacagctgcccaagttttctgtggaggcgatctccagggaatcagttgagtctatcttgtttttctcgatgagtccttgccttccttgtcgatcaaaagaagtatactaatggatggtgactgggttggtgctcatagtcgacgaattagattatatccaagggatggggttcgatgcagtttggatttctccggtttccgctcaaatcttagacgatactattgtaggacaagcttatcatgggttcgttcaactcgcctctttcagattcctcttttgtcattctttgaaggtctttttcagagactgatgatgtaaattccttgttcgcccttctttttctcttctggggaaacaaacctgctgggtgtacaggtattgggcatctgatttaacaagtgcgtgtgatggtcgcatcgaagaaaaatagcgctgcataccacctctccacacagaccatgctgaactttcttctttctcctatttatccattctcaagagctgggcccatctccaacggccttacaagcactctcttctgcccttcatgaccgatcaatggcactcatgctggacgtcgttgttaatcatgtcgcctttgcgctagccgtttcgacctctcagttcgacccggctgtaggacagtcctccactggagagatggatggagtctatggacctttcgatctaccgacggattaccatatgttagcttgtaccattgaagatggaaaccagacgagtgtagaacagtgctggttagaacctaccgtaagacctttcttctttcttctttctttcacattttctttggagcagaatagtaagctgatgaatattcctaattctctgaaccactcgcaggggtcggtcatcacacccgatctcaatacatcatctagcaaaattcaaaatgcgttatacaccaatgtgagaaacatcgttcagacatacgccatcgacggaattaggatcgacgcagctatgcacgtagaaaaaccattcttgaaagggtttgagaccaacgcaggagtgttttgtatgggagaggtcttgaacggaggtgtgtcttcttctcatctcctacatgtcatccatagattcatgccttcaacatgtttatcacaattgcaacacatctctttctgggaaaaattccaaaagatcctctctatgtcaacgactaccaggcgtccgctctctcttctaccctcaactatccaatgtattttactctcacgtacgtttcccttcgcccttttttcctattctgagtcctcctggacgcactcggaaactcacccactcctcaatggccccgcgccttttcgttatacctagccaagcgttctctgatacgtcaggttcaatgctcaatctcgccaacatgatatccacaatctcgtactggttcgatgattcgacggtcttgggaggctttgcttctaatcatgacagtcagtctgacatgattgctcctctcattctcctctttgtacgaagctttcagtgtgaacgagctcgaaatcttttatactgaatctctggctatgcgtttgtctatccagtgccgagaccaaggagcatgacaacggatgatgcagtttgttctattttctttgatcacaaaaggaaaagtaaggtccttggtcaatgactgatccatgcttgtgtcaatcttatgcatgactaaatttatacagcttttgaagaatatgttcacgtattcattcgtggccgatggaattccgatctggtatgggtcttcctcttctggtcttttccctactttgtcagtcgacaacaacatgtccttacaacaaatctccgttcattggttgacccatgcaggtactacggcgatgagcaaaatgcgagcggaggctctgatccatccaaccgagaggccttgtggaccttgggtgacgaaccttacgatgtttgtcctctctatctactctttctcccaattgattaattcttgttgtttgaaacatggcactcaacaaaagttgtcttgcaaccaacagacgtcttctacactgtacgattacgtgacaaggatgaatgcagttcgaaaagccgcgttcgtcctttcaacttctcttctcacttggttgtggtctttaagtctagctaacatccttatataaaccgcaacgctggtcttcatttggtacatatagtgctggggcttcgctaacgttctacacgaccaaagcctccgttctcattcagacaacccactctattgccatctccaaatatcctctactctctgtccttaccaatcaaggatccgctcagtcaggaacagagagtctaacgatccagacggcttatcagccagaatcaatggtggtcgatgtcttaagttgttcgtgttggatatccattcttctttcttcttttcttgtgaagatactctgtagtgatggtagtgctgatgtatcatcttgtcttcgggtgcgattgataggtgtgctttcgcaagttgattcttcaggctctctgactgttcatatcaattatgggcaacctcaagtgcgttcttcttctcccctctgagcagatgaaggaagaaaaagatattaatcgtcgtttcttttcattgtcattatcgccatctaccgatgggcattcacaaacaaacaaacaaacaggtcttcatgcctctgacatcaatcgctctggacccgccattttgcgcagacgtagctagctatctgacgtgtcaggacagaattgcttctcgagcatggagagggggagtataagtttgacaatcaagagccctataatttgcttcgtctaaatgtatccattcgttctaaaatatctcttatctttctcctcgcctttcctctcatttgcttcttccttgtcagttcttgcgctctactcttctccctacgttctttcttcgctctgctacctcccctcgtatttttccatcctttgtgtttttatctctctcagtatacctgcttctaacctcacctcgaccaaaccagttttgatcggagcgactatattcctactctcgttcgaactctttattctgatcttgcttttcacctttcgtttcggtccttgtttcgcagagttctcatcgagtatctctatatgctaccttcgctctcatgattaaagcattcattgtatgtgttttcggttgactcctcttgaaccagtgtttgtcaactcccgtcgtctaccagtaatcgatttcgatttcgacaagaagaaagaggagaggaagaaatcatgaataaatctcgaaacgacgagcaagagggtagatcctgtttgaatttttttactaaaaaaaaatcacggaaggagaatcaccatacagaacggaatggcggaacaagaacgaaatatagattaagattcggaggtattcaaatggaatgaacagttggtacatataaacaagatcgaaagcaaagcaaacgccaaggcgcatataaatataagcccaaaagacagagggaaacgaagaaaccacggggaaaaaaaattaattatagtaggcaataggtcgcatcctcccctcgaaacccgcttcctccttttgaaacaggatcaaagcctttgagcggaagaggtgacctagtggactatttgatgggcatcggtctcgtagtctcccaagtagggcgtcctacccggactatacgaataatccttgatcagatcatcgaatgatagacccatgcccatccctgtttcagaggagacggatgtcattgtggatgcttgacctgaagacatggcgtgtgaacatctagatgatatggatgatggggtagatgcatctgtatgaactgtagatgcttgagggtgtaagtttgaattaggctgtcaagttcagtttttgtttttgtttttgtttttgtttttgtttcgaaaaggaaagaacaagagaaatgttatcaatcagtcgtgtgtaacaagatgacctgcagaagaaggacggatagacatcagacttcaaatatgttcaactcacgacatctggcttgcaatttacatctacactgagtcttgctcccgcttgagcttcttcgaaaattgcgtccaacatattcgcctgcctgtttgctacaggaaccttctttcccatttggtgtagagccgagctgcaaaagagaagtagtaaagttgatgagcatcaaacaagaaaagcaatagaaagaatactatggctccatcaaattgacattgaaagacgtaccggaagacattgatctcctgactgagtatactcgcagccttttcatcgtctgcagatttccggacctggtagaatctcgcaaaaattcgacctccaataaaccaacaatgagcgattgttggatcaagagtagtcaaactgagaatgagaaaaaagaaactcggtcggtcagttatgtcgaatagaataaaacgaacgagaagggatgggacaaagacaaaggcgtactcgaaagtcgttgccgctaatttgaacaaaatagagagcattcctcgagctgcggccaacaccagagcagatgtaggttccgacatgttttctatgctgtttattgggaaaacagacggcaggttttatgatggagaggttcaggtttggccgttaccaagctgcgttgaaagatcaagtcctacttactcaagatgatattctgataaagagatgagcgccagatagccaagattgtgcactatatcggacaatcaatacacggtcagtacacttggactcaggagtacttaacaggaagaggagaggacaacagacatacctagaatggtatccttacagaccgagccattcgccttgacgggttccctgaactcctttggcaaggtggtcatgaaacccatgacgttcgcattgagcgtctgaaactttgggttattcctaggattttgtacgatcggtccgttttcgttcgaatcagaaccctctacgtaacgtaattctcgacgattaaaatgtttgactcgagcaaggagaacgagggctttgatagacaagatgaacgcgctagaagggaaagtgagaataaagtatcaggaaaggtctattagacccggactgactttgataagactctcgaagatgatcgaagaaaaagtacttactctgtgaattgaggcgggtggttgatgaacaagtcttctgacgcgagagtttgagggttctccacatcgacctgattgaccgcaagaagaaagaagaacgatggagaggtaggagttaacatcaacactgaaagttactgaaaaggacaccaaagtacataccccagccaggtattcatcggttcgaatggggagtgaaccagtgatatcttcctctgcgatcgtacaagcccaatcagacgaggtcattctagaaaagagattcacagaaagagattatgagtctgtaaaaggcaatcacagaccaagataacgaagaaggcaaacaagtagtccgacagatgttactcacgcagctcgatcagccgcgaaggcaaaccagaatattcggtttctcatctccctctcggtatgatccaccggctgaggcagcaaaccaggtttcatctccaagcgagggtttagtttgctagtcgagatacccaatcccagcggagggatgaacctggctgctaaggcggaggtgatccagtaaggcatccacctggccgtcgcatagttgaacgagctgagaatcaccgccgtctgcatcgcttccagcaatctcacaccttgaagcatatcaatgtcgagctgttccttggcccaagtagcatgcctgccttcgaatgtatttggatcgagcggatctttgtacttcgccataggacaaaaattatgccattcttcgctaggacgttcaatctcggcgatgccggagaacatggcagcagagcaacagattgcatgaagagtcgcggtcgaaggaaaggaagagtgggtgggtggataggtatcgaatgcgaacataaagcgagcctggaggacgattatgcgaatagaatcaaaacgatcaatgtcaggcgttgagagatgagatctgactcacagatgttgaacagttcaaacaagacttgaaggaaaaagacgaactttgtgtagagcgcctgagataggaacttttgcaaagaacgtttctatcaaggttcgcatcaccgacggatcaggcaagcggcgtggatatcccgggtagacgatattccttaagaacgcctcgttactatccatagggatttcttccataggactgtttgtcatcggatccgaaaagaactttcgatgttccttccttggttcctgtagacattcgttgttcgcagattctgaggtcatgagtggcatgtcgaatgaaaagtctgcttccggggatgacgaaggtaagataccgtccaccatgggtgagagacctttgttcgagtcgagcgatgacgtatgaggaacatctcgaatgtttgacgtcgtcggggaggaacactgatatgtcggcgggaagacgttggggacggacgaggggaatgccgagaaggaaggattgaaagttccggatgatgaatagtccatcgaatgcatcgttgagtcccactccaagccggatgaatttatttgagccggatgagggattccggggacaccattggaagaagacgacaccgacgacgtagaggggggtgctccctgagaaaagtaggctaaggagggttgatagaacgggtgctcgatagccgagggtgagggcacttctgcccgggacggtgattcatccaaactttccatccgatgctgttgaaggtggtaagccgaggagggagagatttccagggatggaacggtgcttgtcgacgacgagattgataaagcaggagagtctgattgggacgctgacggaacgacagccggagcaggcatcacaccttcgctcccgtaccatgaggatgaaccgaaagtcatggcgacgagtcctttcgcagcaggaggtgaaggtttgatcggttgggcttttggtgaaacagatctttggagttgtgctttgagtaactcattctccagaactctcatccgagcctccatcgctcgtagcttctcctgctcgttctccaccccatttgctcccgaagagatggagggttctgcagaggttgggactgccgaatgaccttcgattgtatcggatacctcggatgagaacgaatcctttttattttgaaaattcgagaccagttctgaagctgcacggttagaagaagacgaccctgaagtcttatcatcgtcccaggtacaggaggggtactctggtcgacctggagtgtccattgggatgagacgatgtgttttcatacaagccgcgcagtgaggtttaacggcatctaaaagtcattcgtaagatgtatagagttatcggcgtgagcgtttctgagattgatacgagcatgtggacagatttcaaatacttaccacactgatagacattttatgtgaacaggagaaaaagaacgagtcaagtgggtcaatggttagtttcagttgatagatgatgattattaatcattcgacccgttagcttcaacaacctagaaaccttcgaaagaagcccatccgtccgtgtcgtctaggtgtacatatctctgtgtgcgtgtctgaacccgtttccaacgatgtggcatgtctttcttaatccttctttgctcctcacagcaaatgacaccaaagacagggagaaaggtagggaagaatggactggtttttcgttgggacgcgcttcgtcagcgcgctctcatgcacgttttctcggctccgttttggctgataagaatgggagttgactcgattgacgcgtgcatccaaccgacttgcttcacggccacccggattgttgaaagcccaaactggaagtggatatgtgcgacaagggaagaacgacacaggacaacccttttatggaacgtgaagtggtatgagaaaaaaaagacaaaccttaagtttcttctttcgacattgatggcaagctgcccctcgcttgactggtggtcgaagtggttgacctctagctgtcgttcctattggcctgtttgacgccaaggccgaatgcattgaggagatgttctttggcatgtacggcaacgatctcctagggcgatgggatggtacacagaggtggatacgagtgtctgggggtgtgtgacgatggaggtcaagatgttagctgccgctctcccgtcgtcttgctggaagcgaaccggatcaaggattcgtccgggcatctctctcgatgcccggacgagacatttgaatcagattgcacagcattgaaagggctggtgtcagggatgtgacctgagtgttacacctcggtaaccttcttttggttctgttgtttctcctgcctcggtattccttatgctctctcattacatcaacatgcaggtatatagtctggtagcgcaggtacttctagcaccttctatgatctgttctcttatgcataatcgttggagtctaaggatgatatataagacgggtccccctttgccacccatagcatagtctaccaagtctgaatcctttgtcattccttggttccctagtactcttgttccattgttgtatcaaccttattcatacgatttccctgccttgcgctctcgtcacagtcaccaagctagagagcctgaacttccttcttgccagccctattccctgcctggtcacattcttgtaaccttcccgttaccctctgaatgtcaggaatacgggttaagtatcacgtgttctcttacgtgggttacccctacaggctattcgttccctccatcccttatgcctcttcgcccattttccatcatgctctagtttgcatggttcatgcttcatctttttagttctcgtgatctcgagcctctctaggctcgtcatatgtatatctttagtggcagaccaaatgcgcgaggggtcctgatataaaacggggacgccctcgcgccttcttggataagagttttcctcaagctgagattcttgttgaaacctcttatccaaagtatattgttaatagtttggtctgcttcagatatattaatcgccagagcctaagtgtcaccccgcgaaccaagtgattacacttggttaccttcttaacaaccgagccttacactgaacccggaccctgacagctggagtgtggtagatgacacgtgatcagtagtcacgtgtacgcttttataagtcacgtgcttcaacctgttcctctcgtttcgttctagttgcttgcgatataatttttttctttatttttttctcttttctagactctcagatcctgggttatgttcgtgaacagacatggtataatgatcatacaaagcaggcttccttcttgacacactcaaagcacaacacacccgtagcctggctgagttccacaaacgtagcgaacagataaacagcgtcagtcccagtgcgttcaaacagacacaaacgaacgacaatgttgcagattgagtaggtaggtaggtttcagtggacatgagtcaaaactccgcatgtacagactccccgctagggagcccgataggaagaacgaaggtaacagttgatcgagttctcatcactagacgtattcagggttgcttgtcggattatgtgaacggtgggacggaaagcaaaggaaaaaaagcacaatggctaaccacaaagtaaaaacaaactcagactaacctgtcgatgtgccgtctctccagtgacctgagcacgtccaaggacaaccgagcacatccaaggacgacagcccaggacaagagacggtgaggggtttgaagcagatgcgatgcgagaagagagaaattgaggaatttataggaatattcatcatgaccttaggtagattcttgatatgtatatttgataaaaaatttgattctttttcatttcgtcgcctctcctactttccctggctctttcttctctttccacaacaagcccccgccttctttcgtctttctctcgtcgcagtcctctcactcactctactctactctactccaaagccgatcgatcaaaaatgggaggtggtaacgtacgtggtcttcgttttaatttcgacttctaatcgttgggtctggcgtgtgggatatcagcttgtttccgaccaatcccttctcttcctatatgtttgctcttgggcagcaacgtgtccttcatatagaaatctccttcggtttctctcacacacgatggccatagaacgcacagagagcaaacaacaaatctgacggctgtgtttcttcacgctcactctcgcttaactttcacaacttacaggctcagaagacggctatggcccgggagaagaacgcgaagaagaacgctggacctgccggttccaccctgaaggtatgtgtgtttccatccgacttctctccagtcagccatgtcggctatttgtatgtggctcctcagctactttgaagtagcgtttaaaacctgaagctgcttctctcattcaacgagacacgtcaggcaaagaagcatatcttatcaagaaggaaattcatgttactaattgatcgttggtcgttgtctctttttattcttgcaacagtccaaggctgccgcccagaccatcgtctgccaggtctgccgaagtactttccagtcggttcgttccctctgccctgttctttctactcttcttctttcatacggaacaaagtcgagcaacagtatattatctaacaagcttgctaaaatctccgtccaaacagacctccaagctacctcagcttcttgagcacgcttcgaacaagcacaacaagaccgttgctgattgcttccctggatcagcatgattctcgaaagatcatgtcctttctttttctttgttttgctctcttctccttcttaatcatccatatatgaccttcaaccccttcttttttacttccttcttcactttaatcttgggcgtttagcgggcaattgagggggtaatagagggtataggtgtaccaaaggtgttgtctgctgctttcattgttgttgtcgtgatttttgctttgcttgtttgctgttttggttcaaaatttggaaataaggaattttcccgcaaattttaagaaaagttcttacgcacagagtgataccacgagaaagagaaaagagaagaacgatttaaagagtttctctcaaagtattgcatccgtgcgcactttcttcccacacagatcgactcaaatgcttcccaacccgaccaactctttggcctgagccaacaccacactcgcccttctctccgccctttccgcacccttcctcgccacgtcccggagatactcttcgccaccttccagcccgttctgcatcaaccggtcgagctcggacctgatcggcccgatcctggactcgaccgcgtcggcgacctcgagcttgaaatccttcatcgacatgttcccgtacccgccggcgatctccgccggtgagacctcgttcgtgggcgtgctctgacaggccgctaggatcgtcagcaggttcgacacccccggtcggcacaccgggtcgaatgtgatcccagggagggagtctgtgatggctgaacggagcttggattggatcatgctcgacgaatccgttaggtggatccgggacgaagcgtgcggagcggatttcgacattttctccgaagcgttccggagggagaggatccgtttcgatggggctgttttattgttgtttttgagattgaaaaaaaaggaaatatatatatacacaaacacccatcagcaagaaacacataggagggaacaaatcaagcacagcggcggaaagtcgtactgatgagcgcctggggagcagggaagaaaggcttgttcttgggactgaaccgatggttgaatgtatccgcgatctccctcgccagctctaaatgttgctgttggtcttctcccaccgggatcatcgtcgctctgaatcgagagaaagggaaagggtggaaagaatgcaagttcagcttcaattacgcaggttcgggaagagcgaaactgcagagtttagacgtacttgtagagcaagatatcagccgcctgtaagacaggataggcaaacaacccgagatgaaggtccgtttccgagattgattcctcgtccgccgagttcttaaacgtcgcgatctttgactgtatcaatgcaatcgtacagacgatcagaagggtcaactcgatgagcgacggtatcttatgttttcagagcgaggcgaggaggagagagagatctatgcgggtgggattaccttccaggtcgtcatgtttttgagcttgttcaccggggtgatacagttcaagatccaagctaattccgcatgttgaggtacctaaagagctcaaccagaggccaacgtttagagaaagaaggaagacatcaactcttgcgtcactctcaaggtataaaaaggcaagacaagcgaaacgaaccatatcctggaagtagagacaacttcgctcgacatcaatcccacaagccaaaagagtcgccagcatctctctcctaccttcgaccagtttgactggatccttcggcagggtgatcgcatgaagtcctaccaatgagtagtagatttctgtggaaagaggagcggtcgactggatgttgacccaggtcgagagtgcgcctaggtagtttcccagctacaaaacagttccacgaatcagagaaaataagacaagacaaaaacaaaataaggcatgcacaagaaaccatggaaaaacatcatgctcggagggaaaaagagaaaggaaggaagggtaggcgcacatggatctgaccggaaggttggatacctgaaaagatgacttctggatgtttgtgatctcgtttcctcagctttttgagcaatggctgatcgcttccttgattagctgtcgacggcgaagacgaaaacgatggcgatggcgatggtgatgatgatgacgttgacgaggaggaggaggaggatggacgagtcgaacccgacggacaagaacgtcggttcagagcgggaagtgatcgaagagtcgagaggcggccagccgtctgatagaccactggtcgaacgggaaacatctttggatataatctgcctggaggaacaggacaggctgaggagctttggacaagacgcagaggtgaacgagtctctcggagagaagacgaaggaaagcgagataaatcaaccggacggacggacggacggacgagagaagaaaaaacgaaatgtgttggaaattcgctcgctcgaaactctcaatctgtgtgcgcaaaaagaaagagagaaacaaataaaagaaaatgaaaaagacgatgagacaaaattctcttctccgttttaaatcatctatctcttttcaatgtactttcttgtttgtagaagaaccaaagatagagacaaggaaagaggattgaaaattgaaaattgataacgcttctcgaatttttcatggtcaaaggaaaagaacaatccatattgatacaactgtagatacatcaagcaaaatccttttatcgtcgaggggacttaaggcagaaacacccaaacagtccctgtgatcatgaaggcgagggaacccaagaacaacgtccggtcgagcaagagactcgatctgctctgcttcaacaacgtcgagtgagccaagagagggatgatgacactgattaaggattgacagaacgctggacgagggatagaaagatgcatggcacatggaaaacagttaggatgtgcgttcaaaaggtcgagagagacaggaggatggatgaggaacaagaagaagaaaaaagaggaggacaaacatcctaggaaggcgacgacccggacgtaatctctcgccgctatggacgcgcccacgcagagtgctgtgagtccgacccgtgccaacacaacgccaccgatcgtcttccacgttctggactgtctcttcctgatgctagctgccgaggcactgggctcgatggatgaagaagggggcgaagactcggaagcaggcttcgggtggttggataccacaggcatggtagaagtcggagataagattttagggacaggaatgggaggatataaacgcaaggcgttttccaaagtgatattcaactttgagagataaagaaagaacgaaaacccaacgcacacagatgagtacacacatacatacatacatagaaaagaaggatggaaaccaataaggatgagaagcgtaccggtctagtaagaagaggaaatttgaagagtggggtcaccgcgatcaaccaaagagtggcctgtatgatccatggaggaagccgattgatggtggataaatttctagtgatctaagggtggacgtgtgtgtcgattgctctcagtgagcaaaaccggatgagaggaaaagagagaaagagagagagagaaaaaggaaaaagaagagagtggattctgttggaaaaaaaaaaccagaagagcgtacctctccagagacatctcttcctaaagtccagtagccgatcgctccgaccacggcatagccgagacatgcggcgccgagggagagatctaacacccgtccgaattgggcgggccctttcatgtccctcaccagatgagggataatcgcatggataccaaaggcagagaggacgatgcccgaggactggaagatctttgcggtaggaagcagagagagctgggggagaggagacggttgaggcaaagagagaaagagggtgagagcaagggtgacgaagagaaggattgcggagatgagcgacatgacggagctaagggagagtacagagatgggggtgaacagagttggaaagaggacgatgcctccgatgatcttgagctggttggaagaaagtctgctatgcaggactatctcgagcgtgtcgcccatgagaatcaacaacgacatgctcaacacaaagagctcgagacaaaacctgtttgaaatggtcggtcaggcacgcggatgacagtgatggaaatcgacgacagaagcttacaggatcctggtggttgctatggctttcgggccgaacgcttttctggcgatgtcggcgtatgatcggagtgttggatcactgagtgtgatggcagccagatgccgagcgctatttgtgatttgtaggtatggatgtgagcgagaaagaggggaatggtaagcatggtgagcatggtgggagagcatcagaggagacgggcccacagatacgcacgttcttcgtaagaccagtccccagccgatgagcaaggtgaatgctccgatccagccggcttgagaaaaggcgtagggcatggccagcaggctgacgcctaccatgacagagacggtaccgacgacggcctgggcgaaggtggctttgcctctgggtccgatgcctctggaggatcttctgcgcggaggtcgacggcccaacgctcgggacgaatctgacgggttagaatccaagaatgctggcgaagtagaagacgccgggtgggcaggagcgggtgagttgttatggggagagaccgaagaggtcgttcgtgggatggactttcgaggaagagaggattggatctgttgagagatcaggagaggagttcgctcggagggatcgtttgaggacagggtggtcggtgtgggcttgttgctgtttgaggagggagaagagggagggaaggggtcggagaaaaagccgtagctacctcgtctgttgtcgtttctgggcatgggtgttcgatctcggccgctcgagtaatcgtcgatagagacgacttcttctggggacatttcgtcgaggccctccatctcccctaccgagggtgagctttggacggggcgctggtggtccgaacgggaacttttccggcgggactttctgttcggtggaatggaggatgtggattgggttatgggggattgatctatctgttggttatcgtcatgatggtcgttttcgtcgtcgtcagtggagttgtaagaaccttcttcgtcgttggatgcgtaggaccaattgtcgtcctggctggacaggccgtctgtgtagacgggctctgctctttctgtatctctgtagttgagaaacgagggtgatgaggggctgtgtgtgtgtgtgtgtgtgtgnnnnnnnnnntgtgtatttgatcgtggttttcagaagatggaggacaagagaaaggcagaagggaaaggcaagataaggataggtgagattcggaatggatccatcagtcggccagtgatgatgaagacaagagacaagagacaagagactaacagattgctgccgtagaagagttgacctcttgcgtctgtagatgagcatggagagcgagagatgccagatgaaagctgagtgagtggacgagattctttcagagcacacacaccacatcacacaacacaaacccgacctacaactaaagagaatgtctagactggtagggaccgcgcctgtcgacgtctgctgggagggtcgatgggactgatggggttgctggtgaccatgctggttctgtgtgggcaaggggtgtatcctgaccggaggtgtggcctttgggtaagggttcgacatcggtgtgggtgtgggtgcgtgcctgtgcctggggaggatgccagctgggagtaacgatacagatagcccaggagatgttgatgaggtcgatctctctctcttcctcttgaggactgtgttgttctgatctttccttgctggtggtggtgatggtgatggggacagagatggtgatgctgatgctgatgctgctgatgctgatgctccttcttcttcttcttgtttcctttgggctctcgtcgtttcttctacgttggcaaagaagagaaaaaacgagttgccccgtcgaccggcttatcagtgtggagcccctggtgccttggttacagctcgctgataagccctggccctcccacggcgggagggagccgggtgggccggctgggctgggctaggataggagctgtggttacagaactcggttatcgttcgaccctggttcctcgttcgtggttccctcgccagtgccctggtgccttggtgcatccccccggtatcataaccattcacttgctcacccactcacgcccgtcccttgttccttcctcttctctccggccatcagctttgtgtgcatccagcttggatcctgaccgtccatccaagctgggtatcgaacgtgtcgcacttggtctctctatctctctttgattacactcagcaaattcaaatggacatctaatttccattctgtcgcatccatattgcatttatatgccatctctattgcatctctattgtgttgctgtcgtgtctctcaagattgcaaatctatcccatttcaatctatcccacttttcttcattgtccttctcgctgttatcctgctttcggattctctttattactttctgtcaaactctgttttcattactttctttcaaacgctccttgttcgcgctctctctctcgacgcctgcgcatggcgatgcttcatgaagaagagaacgcctccgggaaacattcgaggctccctgcaatacacctagacaaaaacaaacacataaacaagggctccattggttgtaaccaactgaagcactgtacgtaaccaagcatacgtctcaagccatcccctcttttctattcactcacaacgttgctcgttttctttgtcgattacatttactcgctctctcataatcgtctgcatgcaattcgtatcggtcattcatcgttctggaacaaaacaaaaaaagagcgaggcaaaaaggaaagataaagtgaagaggaaaaagaacaaaggcaaaaaaaaaaaaaaaaaa

SEQ ID NO: 1910 - DNA, 18636 bp, Xanthophyllomyces dendrorhous
aaaaaaaaaaaaaaaaaagtaatgcacgagagctactatcaagttaaatccactggttttcaggataaagctagcgattctctcctttataggtactctccgactcctattcaatgacttccaatttgatgagagctagaggaagcgataagctgaatatgaaagcgatgcacaacaaggtcagtctaaatctgtatacgtatgtgtgtgtacaacaaaagcaaattccaaggatctactcacgaaggtgtcgtagagaaaagaagaaaatgacataaagcccaaacccaagattttcttaagtgggcaagaaccggtgggccaaccctaactaacgccacattttacccagtatatcacgtgcacaccagtcaccgcctgcaaccctttgcttctcccctccgctcatacttcttacagtcgctcgctaattcactcgctcacatcaatccatacaagctcacatcacagatgagagtgctgtttggcagaggttccgtcttcttagccccaatcacacggcgcgctttccgttcgtccctgcctgcttccatctcggatcaacaaccccagcaacatctgtccaacccggcacattcgcccatcccacggccatcaagattggaaagaaagcaggcaaagccaaaaccgttccatccgtacagcgcaaggatcggaagttatgaggaagacgtcctcaaaatcgagccgggtcagcccgaagaggtcagagagatcatgaagaaactctggctggacccgttcggttcgtccgacctgttttgtttggtctctcgagttcagcccacgggactcgactgtcggcaagaaagaaagctgactacatcaccaacccgtccatcgatctgttctccttgatccagcaaggttggtagcgggcccgacatcattatgttgcgcgaccggtactcactttccaaccagttcgtgatcgtcttcctgtctctttctcttctttcttataagagtaccatcagcccgcgcatacacactcacactcacccggcctgtttgcttgcttgtaaatgacatcaggcatgatcattgaccttcgggtggccttggataatccatcagataaatatctaactccctcggtcgaatctcatcctcctatcgaacggcggactaaacaagacatcagcccggaaggatcaaccaaacccagagaacggctatggttggtaccggacaagattcttcatccggactacactgcttccaacccgatcgtagaggatgtagatctcaaggaacctgtcccgccagggatggtttgtagtgagctgacagcttcgcgttatttgagtaagttttctggttttcctcttctttgctttgcttcacttgggggttttgtctctctctctttctcgtacacgcccgctcacacccacagttgactcaatctttctcctcgctttgccctctatcatcacccataggcggaatcagacacagtaaacggacgctactcgttgacctgcctcattcattaccacccttacccatcatccctcgttcccctgattcaacagaaaccttgtctctttcccaagaagtaaacgaacccacagaggaagccactcccgacgagacatcacccgacgatgctctcataaatgacccctcatccaatacagcaaacacgacctccttctcggccagtccaatccaagtgtcagccgacctgctcgaccagataacccaccaactcgcactccggatccaacaagaattagagatcctatgcgcccatgtgcaggcttgtccttcgttggccggcagacgcgtcctcagaccggtcgacgaccacgaaagagactcgatgagagatggcgactggctggacccggcgtttatcccgaatgcaaacgaacaaggggtgttcggggaacgagtgatcgcagtattggatctcggaatccgaaaaggcgaagaagaacccggtggattcctccggtcggtaattcctccaagaccgacggtcgaccgaacaccccacaaatgggacaaacggccgagacagaagaaatcaccggtcgtctcgacgctgaccggtcgaacggggaaaaacgttgttccgcctcgatcaccccgggtgctttcccctctgatcaaaagtttacaaccaccgttacccacccaatccctctcgtcctccggcggcgaaactgacgactaccgaacgaacccaggacgaccgctcgaaaagtcgacgctctctccaaaggacgtgccggtgtatccgctggatcttctcttcccagaccctcaagaccaagcccacctgtcgtcccgtctggaacacctcgtccacctgtcgactgtcggtaaactcccttgctcggcatccgctgggatgaaacctccccggccgttagtcccctcggtcgaaccaaagacctacgcgctcctacttcacccctctctcctcggcccatacggcgtcgacaccttccccctcttcagagcgctctggcgactcaggctctggagagacgactgcgcaggctgggacgacgatagcagggagaaactctgggaaagtctcgccggctccttggagtccgcagaagagaggaaggcgaggaaggaaaaggaggaggccgaggctttcaagatcaagatgaacaagcagttcgggttgaacctttgagcgaggcgggcgataaaaagacatattcaatccagcctgacgtgttctctttattttatctctgcttcgcccatcagcgtgtcgttttgctcgagacttcgtcgagtttactatataagtccatcatccatcttttcctcttttttttcttggttcaaacaaaaaaaaatcatcgagctgggcaaatagagtagacaagaggatggggacgaaaatcagaataaatgtaaaagaagagatcgaaaagaaaatcatatgtatacaaaaaaattgatataatgcaaagaagaaggaggagaacgagaaaagacaagataaagccaaaggagggggcagcgtctaggtaggaaagacaccaggcaaatgataaaagagaaataatgcagatcgatcccgcttacgaaactccggcgacgagcctcctggtttcctgtggtgtgaaatgaagaatcacagaaaggaccctgaccagattcgcgcgcatctctttatgttcgagaaattgtagaattacatttcggaggtactgaattgtttgatttgaatttaaaaacaaagaaaagaaaagttcgttgtcagtaagaaatgaaggaaaaatcatgttgttctgaatagcacacgagacagacctccaagttgacctcctcttcctcctgctggttgggctctcctttcttcttctttttagcctgctcttccccacctcctgtttctccttctatcgatcccccctcgtccgcgacaactttcgaaggcgtcgggggacgagattcgttgccgtccagagagtatcgactgacgcttccgtttgattgatgagaccagtaacccacccccgggtttcgctgtttctccaagagaaaggcggatgattgaacttttcgaagctcatccttcaatgtctgtagtgtcacaggaaatgacagtagaagtagaagcaaacgagattagattttgtgatagaagtaactttagggacaagagcacatcgaagagaacagacataccctgttcgtttgacgcaacgcttgaatttgagccttggaatcgttcaaagacgagtacaatgactcgaccttggtagtaaagtctttaatctcttcacgagcgctcgcctgatcgttagaacacaaggagcaaaaggtcaatttctcttctttagtttcaatacaaacgaaatcttcaaacagagaagaaaaataactacaaacctcttcttccataatcttgcccactttatccccgatctcctttcctcttcgcttctctctacccagctcggcgccaagttcatcgacaacccgctccaactctccgaccttttcgtctcgtccccttctacctctgacagcctcctcgtactcccgctcctttgcttccaacactcctctcagcctgtcgacctctgcgctccgttcttgaacgtttcggctccattcttcctccgtctctgctctagaggcttccagccgatgaagctgggacctgagatccgacaacttggactcgtaggaactcgtcagcgatgtgatctgtctctgaagatcaagtagcgatgccccggatcctcgacgacttcccgctggcgtgggaagcacagaaaccttctctccgtttccgatggaaagcccaggaatagaaaatgacgaggaggacacgtggagctcatcctcgagcaacgctatcttatcagaaccctcccgaagtcggaactcgagatcgttaagcttcgagagagactcgagggcctgagaagacgttttctccaactcggcctgtcgctcttgaagttggctgaacaaggacgacttttcttcggtcagcgttccgttcatctcttccagagatgaaatccgacttttgagggtttgaactttcttggcatgattggcctgtaaagttcagtgaaggaaagacatgatggtacgcatgatcagaacatcaatcgtaccaacaactcagaagtagacaagacactcacatcagcggtgatagccttgagctcgccttcttccttccgacttttactgtctctctcaaatccttctctcaggctcttgacttcgctttcgaacttttccctcaacgtcctgacgtccttctccctctcctgctttcctctctcgaccgccaacttccatctatctaactctttctttgcctcggtctcagcttttgtgatcgccagtttcagttcctccttccccgagttgagctcctccttgtccttgtcagccttgacaagcttttgacggacggttttaagaagtgagatcgccttcagtcgcttttcttcctcctccttgcatgtcgtctgagacgtggaaagttcggtctgagtcgttcgatgagtggcctgaagagtagtgtgggagactttcaacgtagaaagctccgagcgaagagattcgatcagattggattgcgatgtggactccatgctatgtgtgtctcgaagttcctccgtccgagattcttggactgggagacatgagcaaagattgtgagaatgagaaaacattgtaaaaaaaaacagtaggcaaatcgaaagctcacgttttacaagatcattcacccttcggatttctgacatgctcatctgtcatgttgtagagcagagtctaaggtcaacactgaacgcgagtacgaggcagacaagcaatctgatttggacagacctcaacttttgtcgagagatttcgtaaatgatcctctagagcttcagaatcatccatgttctctaagggtgtcatctcttgtaagaccttgttgacctttgaggcgttcgactttagttctagatgacaaaatcaattgtttaagacttgagagtttgcggcgggttgaaaatgatatgacgctcgagagactcactattgagctctgcctcgagattctcgactttattctttaaggacaccttctctagatcgtcttgtactggaagcttctcaaccgcatccttctctccagttggtgcctcaaccacctccggttgagattgaccttggtctcggccgatattgtcttcggattcaatagcgagtgtcgtcggttccgggacctcttgtgtcacctcagttccgtctccgttgtcatcacctggtttgatttctgactgtccgatcttctcttctgttaaatcctcttgcacagcaccctcttggccattcagccaagcttgctcttcgatatctggcaacggaagcacgacgtccttgggagaagcaggcagaggaattttctttggatccgtcacctggggtacagcttctggggtgttttctgaggaagaagagagaatgacttgtttgagtgaactcgtagccgtcgacccaagcgaggtcgaggggaagaatgtcgatgcttgggggttcaacgatcgtcctcggccttctgcgctttcgtccaacgcagaggatgacgttgatgaagagatggcggctagctcttggggagcagcagatgaagaaggcggcttggatgttgaccgacggaaagacgagaacgagggaagtgaatggggtatacttatagtcggaagatggaaactgctgctctgagaatgggacgctgggttcgcggtggatgtagcgaaggcagtaggagccgcagctggttcagtcgacgaagaagacgtagcttcatccttcgaagccggatcggaggaagacgcctctggttctgacgatccagatgaggactgcgttggctgagcagacgtccgcttcgacggaggggtagaactcgaaggcgaggatggagctgaaggcgacggaggagtcgagttgggcgaggcagccgtcgctgcagctttcgccaacctctcggataatgataacccacccataccgatagaagctgaggaactctgtttgccgagctgtttgatatagatgaaagaaaggaaaagaagaagagagagaacgaaaagatctgcctggtcgagaatgatgatggtgatggttggagaaagaaaagaacacctctcccgtcgtcacctccatctccatctctaaacattcatcctccatcagtcgtctctgttcaagcccttgccgttctcgatcgcgcacgagatggctctcaggctttctcagaggatcctgcctaaacctacggcctgtccttgcgccatcacatacaacgcgttttcttacctccttgtccctacgttctcgtctctcctcgtgctttctccagagactctggacgtcctctacactttaccgtttgctcttggatttcctgggttgaataccatcaggcagggcattggatcgttagcagtcgaagcacctggatcccaagagtccaagggaatcatcgccgtttcaaagggaaggcgtgttgtcgtgttcaagccggcctcagagaagctaggatggaaggttcattcgaccatgtattcctcaggaggaggcatcatcgaaggcatggcctaccaacatggtaagccacggcactgtcgatctgaccgtccgttctaatgatgatacactcaaccgtcttgttctttcttgtctgtctttacgcgagtcaggaaagctattcatcgcctcgaagggtagcttggctctctggacgactgatatggacgaccctttggggatatggacgaggatttgggaagagaagtgggtacaccttcctccagtatatcgagcagtccagacagaacgttctgttcgtgagcattatcaactgatctctttggacgttgcttgacagatcatggtatgacctcggccctctaaacaaagtctctttctcgcccgatgggaagtttgccatcgttcattatgtggtatgtgaccctgagccgtatgcaacgaccgactgttcttactgatcagccatccaatctaatccaacggcttagcacgatcaacaaattcgaatcatcactctctctcctgcttcctcttcctcattggaaagcggtcctgttcatcgaaaccaatatgtgaatttcgttcgagggatacaagacttctggtggagggatcgatcagagtatgtgattcacatatatttctttcgcccaccgatctagttgctgaactactcatattatcgtgctcttcatccctctcgtggccagtgatcagactcccgtcttatacgttcagtctagtccctcaaccatccacgttctaacacccatgttggacacatcatatcatttccagcacctcagcactgtctcccctccttcaacaacaagttccacagcgttatacccaatttcttctcgaagtctgcagaagtgcgctcagatcgcgctcgacaacaatgaaaatcgcgatgaggccggcgtgataatgttgaaggaagtcgccaacggttctatagcagatatcttcgttggcattccaggcgacgagtttgattcaggatcaagctctcaggaaattcaggtctgggcagttggcggtctggagaaaaagcaaccttcgttgttgaaggtgttccagctcgcttgtaatccttctgtgaactcacctccaagtactttgcctgtccttgcaagatacgccatggaagatgggactaccaacattaggagaatcatcactcttccgcactcctcgacatcctcttcttccgctttgctccttgtgacgtacgactgggatcagccacttgtcatgtccgttcttgaaccgaatttgatatgttctccttcttcctccaaccagtcatctccatcgtccacagccaatcgaatcattcaccctcttcccaatcgacaagatcctggtggaggcctagaccaaactatcgagagactcatacgaactcccaacggtcgagggctattgagcgttggagagaggggagaggtggccgcatggggcctgagcatatcaactgatcagaatgataaaagaaaaggaaaaggaaaaggaaaggaagtttggaagatgcgatcgaagtgggtcgacgaagacgacgatcctacagaagagacttcgttcgaggacggcaagtctgaggacgaacgtgaaggatctcaagacgatgttctctatgcattgtttgctagaggtcggtctctcatcacctatgttcctcatacacagcgactctcaatccggactctccgatctgctacgtgctctatccctagcaaacctcactatctaactgttgaaggcgcccagaagggagaacgaatgactacgttattagcattctcggacattgatgatggtgtttcaggaaaaggggaaatgagcattgggttcatcatattggggaacaaggccggacgattttgggtatggaggatagatcaggatggcagcaataccttgatctcttcggctacgatacctttcgactcctctttcttaactgctccgccgagcgacggaaaccatccgacgcagccgcatccaaagtttattcttcctgtcgacccgatgggttggcactcatcaattgttgactggaagatgaaagcactgttgcaagatgttatcgttgtcgtatcacaagacggagacctgagcttttggaggccccatctggactttggtgcaccgatcgagagagatggatgggaggtcgaggaaactgacgaagatggaggggcaaagggcgagtggttccggacagggttagtcaagacaggtagaaagggattgagtaaggcaaggtgcagctcgaggaaaaagactgctatgggtaagttcattcattctcccttcgtgtctgatataggtatatacgctgatttttctcttgcctcgccccacctcgatcgtcgtgtcaaaaactgccatccggatcagtttccgaggcagaaggtggtcggtatgagctctcgatatgggattctaagtcatctgatttcgcatccggcttagaatactcgacattcttctcgtaagtgcctctccatctatttctaccaattgttcttgacaaaatgtgctcacacgctgttcttgacacttgatgatatccagagaggacgacccagtttttgatttggattggacgactacacctgacttgcagtcagtcctcgccatcggatttgccacgaaagttattcttctttgcgaacaaagagtatcatacgtggatggtgatggatcctactgggccgcgttcagtaccatcaatcttgctccgtttgttctcttccccaacttggccttcattgattttggaaagaagtaactgaaactcaattttcatcattgctgaattcaactccgtatgatagattgacgcctgaacccataggtgattcaatatggctttcggatggatcgtttgctgttggagcaggcaaccaattattcgtctacagtcgattctttgagcctccatcaaagagaggaaacaacgaggttgaattaatcacagggttatccagagacgtgttcgagtttgttgctttgcagaacggaccgttagtggactatcaccctcagttgttgcttcaatgcctcctttggagtaagttattatgtccacgtcatggacactcctcattttctgcgtgacataaactttcaactcatgtttactctcaaacaacttgtgtatcaccaaaacagacaaagtcgagcttgtcaagagaattctcgtccaactgcatgaaacgattgaggatgctctcttcaaaggagaagattcaatctcctgggcaacattggcgccttccgagttctcagagaaggccacgtttgggagcaaatctcaatcaactgtcaaggttggtcatcttccctcacaaagcaaatcgtatggcatctatgaatccaactgatcatacatggtgctcttcaatttctatggtcgaaaagactaacgaaggctcaaagtatacatctttgtttgacgataccgtttccattcatgagtcagctctacttgccattattccaatcatcgacacaagcgcagaagagctgattatttgtcttttacgttttgtagggacgaaggaaagacattcacgcgctccttgatgggtcgacttatcgagcacttggaaggatcattccagatcggtcttaccagacacgaaagagatcatatgatcacattggtgcagacggttatcgaggtatgctcattgttgttcatctgaaaacattcttagcttctgtatccacccgtagagtttttatctgatgttgttctacgattggctaatatataggtggacgaacagcagcgtgcgctggatgtaaatggtcttcgatatctgatatctatccgtttccacgtcaactggaagtatcgactatcgacgatcgactctcgaccaacaacgccacctatccggactgttgctatccagaaacccgctgcttctgattccacgccacatcatcaccatcatcgaagcctttctttcagaaacatcgtttgggcatctcagagtcagagtcaagagatcttattggcagctgcgacggaagctttaggcggcaagatgtattggaatgatgcgaaagcgcttggagtgtttctctggatccgttctaaggaaactttggtcagtggaatagcgggattctttctcatgacctcagtggccgatgtgtttaacgatttcttgctttcccttttttccttctttttcttttctctcctttaacgtctttccttgatcagcgttcccaatttgaagttatcgcgcgaaatgaattcatgcgaggcgaagatcgagatccgacgacatgctcactattctactttgcgctccggaaaagcaaactcgtacaaggactctggaaacaagcagcctggcatccggagcaaaagatgatgctcaagtttctggggaacaacttcgatgaacccagatggaagacggcggctttgaagaatgcatttgcgttgatggcgaagcaacggcatggtaagtgcctcggaagactaatttctcctgccacatgatctgcgcgtgcaacactaatgggaaatattctcttgatattggggattgatcgaacagcatacgcggccgcttttttcctactaggagacagtcttaaggatgcggtgaacgtttgtataaaacaactagatgatttccaactggccgttaccttagcccgaattatggaagacggaaacgacggacctgtgcttcgaaccatcttatccaagacgatcgttcccaaggcattcaaaggaggtcatcgatggttgggcacttgggcattctggatgcttaacaaacgagatcttgccgttcggatcttgatcgttcgttgtcctctttttttccttttctgtcattctcttttgatctttgatacgtttactcaaatggattctcatacttggatttcctgcatgaagactcctttacaagacctccaagcgagcatccgaacagagtacgatataccagaggtcggcggctcagagaacgatgacccgagcttggctttgttgttctcccagatcagactttcaactttgcagaccgtgaaaggactgagcgagattccagaacggacggagtttaattttgtgttacacaacgcttgggttttcacccggatgggtacgtcgtttaccgcatcctctctaagttcttatcgactgcttgctcaattcacttactctttgggtgcgttcgacctttcgcccgttcaggctgccatgtcctgtcactctctcttctgcagtcatgggagttcccacctcctagtctcacactttcatccagatccactccatccatgacgccgacgcttcccagaagtcctgccgaaaatgcatttttcactcaacttcgtccgtcctcaagctcgaattcagtcacgggtccaggggcgatcggctctacttcgttcgatccaaccaccggaccggacttttccttttcttcgttctctttcgaccctccgtcttcgaccgcaacttctcttccgccagcgccggcggaaaaagcgctgatccctcgtcgaccacaagtatcgagggacatgacatcgagaagacggtcttcgttccttctctcgggtgcaggtccgggaacaggctcgaggggaggatccgttttgggtatgatgacgatcgatatggatcttccacctacccctcgggccagttcgcctgttggagtcagtgagagggacgtaagagaaaacggggttcacgaaggaagaagctcgaacgcgaacgggcacgagcacgaactgaatgagaacagagatgaagaaaaggacggaaagcaggaggagacaggaggagaagaagaaggtcagactaaagggaacgaagtgagaaagactgggctgggtaatctgatgaaagctgcaaagctagattcctcacagggcgggatggatttcgacatgggcgcttttgggttctgatgttgtctcgtcttggcgtgttcgcatgtattcctgattcgatgttcatttgtattcagaaatgtgttccttttttccaattctgggcaattcaaagaatacagggaaagaccacatgtatatatgtatggaaaagtgtgtagaaatggaaggagtccttctgttcttcttgatttttttgatatccttcgatcggatctgtatctttattctccgacgattccgtactgcctggcaagttttcctctgatggactgatcgaatggcgagtactgatcgaacggcttggagaccggcctttgaagtgttcgttcctttggctgctcgtccgggtccatctgttcggatagcaccttgatatctcctactctcagtctggtgaacctttgtttcgacctgacttcctttttgtatccttttcgtctcttggtctttaggacggtttccatcggtccggttgtgtgttccagcacggtcaacgagcattcgactccagtcaaccggtttccttccgtagctttcaacgcgaaatccctcgagccgacttcaaacacccttgtgagtttgatgacggatcctagttcgggcgtggtctccaatcgagggaccgtcaagatttctgtgggatgaaggaggtacttttgggcgtagactttggcgacaatgtatttttctggttgagagttgagcagcgtgactgccgagtgaggcgtggtcggttggatgtggtgggacggggccggaggaactagcgagcggggttgagagctctcgagaccgtaatcagatggcccgtggttgacgttttggaacgaacgagctggagttccgacaaccaaaggagctgaaagtattgtgtacggcacagattgaaagccagagccaaagcagggatgcaggatgcagtatacaggaggttgtagagggttgagagaaagagaagagaaaaaagcaacgaacaaaaccagaaaggttaggccacgacgatcaccaggagggttcaacccattgagtgcaaggagtaaaacagagacagaaacataccggcagactgcctaagaagcgatctccttgctagagagaacattagatttgtttaaagatgtgttggtgaacgtctttgattgatgggacggaaagaaagaaggaaaacgaggtagaaggtgagcgggcgaacgggcgagcgagcgagactagagaattttggaaaaagagattagggaatttccacaatctactacgaacgccgcgactagaaaacacggcaagacaatacaaaatctcggcacaatttctaatcagccgctgtagtctttcctagtgatctcgtcatggccgcttcttccacgtctttcttcatcacctccatccatcgatcatcagcatcttgaacagcatacagtccagggcaggcgtgtagcatatagcatacttcgatcttatagcatatatccatcatgagacaggcaggcagaagagttctcatccgtccttcgttccgtccgatcgcccttcgaccatcactcgttcgttagctttcctttctttttttttcccttcttgctctctcccagcatcgtccttctactcggacccaagtctgatatgaagcgaactccggttgcgtgcgcccaaacagatcctttcatcaaatcaatcgctcccgccgttcgatccaatctcgtactcatcccgttcattctccctccgatctctcttcgtctcacgagacgcttctgagcccggcacgacgacgaacacctcgtccaccacttctgatcccaccaccagctccgatgtgtccgagcagtcccagagctcgctcagtctacccgaaagaatccaggagctagtatcagccaacagaggttcctcagaagatgctgagagcgtgatcagagtgttcaagcaggcgatcgaacgtgaaggcatggatgatagtactaggaaggaaggtgccaagctgatcgtcgataactgggaaaagctcggaggttgggtatgttttgctctcttcgtccttctcttcttcctatcccgtctgttctctcccttctcatcgcttaccacccgttccgttgttgctcatgccacataaacgataggatcccacccggaagctgtttcaccatccctcggccttcccactctacatgtcctcccttctggcactttctcaatctgactcgatcccaaaggcgctccgaataagagaagatcttctcctgcggaacacatctccctcgacgacttcttctttcgcgggttattcgccttacgcgtccaatccgtcttctagttctggctccgccaattcgtgggacgatgctgccggatctccggcagccgcagccggagttgcaagcacagcaagcggaactagcgcaagcccgctaggaggttcaggaaaagaaccggtccatgttgtcgttgactctcaggctagagatcaatcgtggagaggcactcggcctctctggtttgccgtcggtacagcaatcaagtggtttggttcgtctcgtctctcttcatatgcttttttgatctgaagtttctttcctcaagtttacccctctgactgaaattttggcacaattttccatcccgcatacaaacaggctttgctaccattgccgtgcttatcatggagcaagcaggcatggtcaaactaggtccatccgtcaacgagtttgaggcttccaagcaggaaggcggcaaaattattaagtttgtagatgtcaagggtgtcgacgaggcaaaagatgaattgagagagatcgtcgagttcctcaaggatcctgaaaagttctcgactctcggaggacggcttcctaaaggtgtccttcttaccggaccgccaggaacaggaaagaccatgttggcaaaggcggtagcaggcgaggcgggcgtaccgttcttctttgcgtctggtagtgagtttgaggaaaagtcagtgatcggtttcgtttgtctttttcctttgtaccggttcaaaggaccgacttgaaggcgagggctgataattcatttgtccatatgtgtgtatgtgcgcacattcgtaacgcgtccttccctctcgatcttattttacagattcgtcggagtaggtgccaagcgaattagagaactctttgccaccgccaaaaagaagagtccagctatcatctttatcgatgagttggattctgttggtggaaaacgaagttccaaagaccaggtccgttatgttcctcatcttcgctctctcgcggtcctgacttcctggcgcgtctaaacgtcttgtgtttcttcgtttgcaacattatttgatgtgcaccaaatggcaatcaggccgcattgaagcaaacagtcaaccagcttctcaccgagctcgacggcttccaggcatctacaggtatcattgtcatcgctgctacaaactttccccagtctctcgatccggcacttgtcagacctggtcgattcgatcgacatgtcgctgttcctctacctggtcagtcagttctcactggtctttggcttgctctagttttgaccctaaacaaaacggatttatttcctcgatgctcaacgcgctttcgattttttgtgatagatgtgagaggaagagtagagatcctccagcactacgtaaaggacattattgctgatcccgaagtggacccttcgacgatcgctcgaggaacgcccggaatgtctggtacgttcttcgattttttaccacgagtatctatcggagaaactacacattaaggaaggaaaaataacagattgagttggtattggaaattttttgaccaataggtgctgatcttcagaacttggtgaaccaagcggccgttcatgcctccagagagggtgttcagggtgtccggctggaagatttcgaatgggccaaagaccgaatcatgatgggtgcagagtatgtatttctaatcgttgtctgttctcctctactattctcagcttacacactggatgtcattttcttttcttacaggcgaaagtctcactttgtcactccagagagtaaacgaatgacagcttatcatgaaggtggccacgcactcgtcgctcttctcaccccaggctcgatgcctctgcataaagtcacggttctgcctcgaggtcaagctcttggtatcgtatgtgtcttctctttatttgactttgctcttcctcgtatgcatccttactctcggttgtttgtcggggccttgcgtagactttccaattacccgagatggatagagattcttattccaaggccgaatatcaggctagaatagacgtagctatgggcggtcgagtggctgaagagttaatctatgggaaggaaaacgttacttccggtgctcattcagacttggtagccgctacaaatgtggcttcctccatggtcaaggtaagcgttttctctgttgttctcaaatttctattcgaactctgtttttctttctcttttgcggtagtgagactgattggctataaattggggcttcttttcttccctcttcatctaggaacttggattctctgacaaagttggcctggtagcgcacggggaagaatctgtctacctttctgagcgaaagaaagacgagatcgaatcagagatcagagggtccgttctcgttttgttttatctctttttttattgttttcttcatctttgtatcattttcacccttttgacttgtcgctgactgttttggaatttattcatttttatttctatcttggcctgtcttgaaacagaatgattgaaagcgctgccatcagagcgctgacacttttacaaacaaaccgatcgaagttggacacggtacgtagcttttttttttctctttctcgtgttttttttttaagaaaagaaatgtatgagaacaaggtttctaagacacggccttctttcctaccgcacacttgactccacacgtattcaaacacaatagctcgccaacgcattaatcagatacgagactttatcagcagacgaagtccgcgaagtcctctcaagttctgatggttcattatctggaaagaacgttgtggacgtcctggacgggcccagtatctgattcagaagatgtattctatatagaattttctttgactctaaagttttgactccttccgaggagaaggtgtgcaatcaagttaaccaaccgcatgttatggatcatgacgtaagttgaaaattgaacacaagaaactcaaacagaagataaagggagaaaatcgaatgagcaaagaggtagaaaaccctcagaaaaatattagtatgatatagcgacaagggccaggtaggtatcggacaattggtatatacgtattaaaaacacaatttttgacgtcggtgaaacaaaaaaaaacaaagactgtcaaacttgagaacaaaacatagaaagtcaagaggggcatctagagaacccgtctcggacttcctatgcgacgaggactgtttcctcctatggaattatacgatcctgaccctgacattcggcctgacgatgctgttgatgtcgtcggtatatgagcggaaggtaagacgtcctggatccgctcgtttcgtcttttggcattgtcgatctg

SEQ ID NO: 1911 - DNA, 12549 bp, Xanthophyllomyces dendrorhous
gagagacagtgggaaagagcgattgtcataagaggcaaggagaaggcggatgagtgagaaatttagtttatataaaacatcagtttggaggattaaaaaaacgtacctgacttgagactccaactgagctgctctctctttccctccttgcttctcgctcttcaccttctcttctgccgccttcaatcgattctcgtattctctcactctcgcatcccatttggattccgccaaagtcatcttgttcctagcagacgacagtttttcttcatacacactgatttgattcttcgcatgcgccaatcgacgttcgagcgtgctgatccgggtctcgagcgttttagcgtcgtttgtagaagacgtccgggtatgttctttggaagctgtcagctgagacgaaagttcagcatatcgtgcctaatttatttagaagaaaaaaaccatgatgagtctcggttgatgcgacgcgaggatgaatatcatcagaacaaatagcaggactaacttgcaaagattcgagttcgccctgtttttgagcatatcggttcctccattgagttttcaccagttccacttttcgaacggagctttcaaagtgatcgagttgcttccacttgtgatcaagctgtttcttcatcgatctgatgggtgacgaacgcgtacattaaaatgaaataaaaacacacacatcagttgggctcgacgatgagggtctcaaataagatagttgacggtagcacttacataagcttctcattgaacacgctctcgcaacctctcactttcttctcaaaatggctttgaatgtgactgagcgtccgaagtcgggtcaagatggcatctttgaacacagcaaaattggccgatggccctcctcggtcctggatgacgaaataaaaaccaaattgtctatcagtaccaggcggacaaagcacagcgcatagatagtcaacaaacctcagtcccaaggatcttattcagatgttgatacacaaccaacaagagctggctatgctcttgcttctgagattccgtctgatttttcgaaacggtgagggatcggtgttcgcttgtcagtctatgctctaggtcgttgaccctttcacgcagaacggccgcttcgttctcggccacccgagatgactgtttgtacaagtttttttaattgagcagggaaggccaccatgtgtagacaaaccagagaagaagccggtttggacagaccttttgaaccgtgtccaatttatctgccatgttcagccgagattgaagttcgcttgaaagcttattttccagctcccggctcttagcattctgttagtcaacatgaagcaaacccaacctcatagatcagcaagaagggtctggtggaacgaccagaatactcagaaagacactcaccagatcggctaacgcatcctccctcattccaagagtgagctccttcttcttcaattctttctttactctctcccagtcactctcaactctaaccaaatccttcttgagccgttcgatttcgagttccatggcaaaccgatcggtgtcgtgtgtatgtccaacgagacgagcattatcctggatggtatgcaagtcagtctctcggtgggaaagccgatcacggacttgatcaagctcgttcgacaaccgacgaacactctgtctcgaatcaaaattggagagtaatcaagatagcgtgatcagcgatagctttcaggaagacattttatgagcaacaaatagcaaaaaaaagagaacgtacgtcttccttctcttggaataatcgatcccaatgcgcctcgcggtcttttagctccctcttcgacagacttaacgtcagtccattctccttctcgacttctttcacccgtttcgtcagctccgtccgttcatctaacaatttcttccgggcttgctcatcggccacttgtctgtcttccaaatcagccgccagggtggatagatctgtcacttgtgtttgtttcagagcgaggtcagcctgagacgcgtcatacagttcagctatctcgtccaagtcggccttcgtctcagcgagtttctaccacgatttcaagatgaaatttatagatgatgtagacagagatgtgtgaaatcttggttagttgaggatcatacgagcaaaaccccaaagagaacagaacgaacctctttgagcgtgccgacaacttcgtccttgacgacctgcgcctcctccagagccgcatccaacgcattcagttcagcttcaagttcggcttccttcgcagcctttgcctctagttcatcttcgagctcgtgtatgcgttctcccaactaattgagacagtccgagaaggtaatcgataatgagcaggtgcttaaagacattcaaggaaagaaagaattgataatgacaaaccgcttgaatttcttcattgttggcgactgattctgcctctctctctactttttctagctcgactcgacgaagctgttcttccaacttttcaccaatctcttcattcaaattttcgagttcggtcaatcgttcttgaagttcggagagctcgttctcggtatcgtggagagcatccctaagctgctcggcttccttctcccgttcttgcagaacctgttgtttatagatttgaaagaagttagtcaagtaacacaagatcaaatggcatgattacataaggaggcgggggaaagaattcagggctcacttctctcagttcgtcgttcagagctttcccttccttgacttcgtctgcccactgtcggtcgttggtgtcaagctcttcgaatgcgtcctgcaacgctttctctttctgatcgagttcgagctgctttcgttcgagttcgagtgtggaagctgccaacttgtctcggagctcgtttctctcctattatttatgagtcagcaagacaagaagtggaagaggaatagatcagagtacgttacagaaggagaagaagacgagaagacaagacgagcaagtgagcatgattgcgtaccgagtcgagatgatcgagtgcattagccctgtcggccgatagatctcgttggccactctcgaggacttcgatctgtcgagtgagttcgtcccgctggtccaataggtcttcccgttcgtcctcgagagtggcgatggttgcctggtgagtatctagctgggtctccaatttttggaccatctaagaggaaagtcagagattcaagaaagaacgaatgaacgtcaagtagagcgcaacttcatcaacaagtgggagagaaaggtataggcgcacgtcttctagctcttcagttcgacctttgatcctgtctagttgctcttcatccattccgtcaaggcctgccagcctggcttgttcgtcctctaactgctgttctttcaactcgaggtcttcttgcgcttttcccagtttgtcctccgtgtcttctaacactgtctgggtttgttcgagctgggaggccagggcatcagtttctgattcgagagtggaaaccgtgtctttgagctcgtctatctcggcctgtgaaggaatggcgaaatcaaaagattccagatgagttgaatgaaattcaaccggaaggtaaagagagataaggggaaagacagactttagatcgggtatccagatcgcggaattgtctatcgaggtcttcattccgctccctctcgctctgaagatcatcttcgagctgaatcctcttttctcgttcatctcgaacaagatcgtttaactccgactctttctctctatctctcccgccccgattggcgccatcttgagtgacacccgcccgaagatcatcgttctccctcttgagctcttcgagtgcatcaaccaggtcgagcacatacttcttgttcttcttgcactcgatctttagtcgagcataggccaccttgagttggaggttctcctgatggatgttgtcgagtgtttctggggattgttgcttcaggcgttcggtcaagaagtgaactttgagctttaaatcaaagttttcccgttctttcagatcaagggcctgagtaaattttcaagggaaaccggttgaaattaaatccgatcagttagagagggactcggctatgagaacaaattgtagacagggtcaagaggaaactaaccttttcctgctccttcaacgtcagcgagttctttgatcctagccttgtttgttgctgccctcttggaatgccccctgttactggtctcgtaggaaattcttctccaagcttctctggagagcctatgggactttgagtgaacaggtcatcggagtatccggatctggactcatcatcagccggtggaatagcaaatgaggacgaggtggatgatgagtctgaggtgcttcggacgagagcgagatactggcctggggcagccagtcgagcggtagatggttgtggtgttggaaggtccgtcaaagatgatggagcatggcctccgggagtgtacacgtggctgatatgattcagtgtcggcgaggatggtgaggaaacttcttagccgataacgatggcgatgtccgaacgaacacagcaagccgaatcagtaaagagtcatatcaacgtcaacgaaacggtgacaggtcaacaaccacactcacgatcctgcctggccgtcctttccttcttgaccgtcccaggtggctctctgaaatcccaatcggaagcttgaccgttgtttgaggtttccccgtagtcttgtgctctgtcggtttcgaatctgtccttctcgcgctcgtgatctgaatgaaagctgtctgctagagagggtaaggatgtgtctgctccgtcggctgaggaatcatatctggacggagtgttgagaacgcctgtgaaggccgatgcgaaagccatctaaggtcgtgtaagcgggctggctgccctttccagccgatatggatgagacttgcttgttcaagaagaaagcaagtgtaggttgatgtgaaggacagactgaacgaacgaaggagagaaagacaaagatgaggaccaaggaagaaacaagtcgcgtcggtgtttgtccgacttgtctattacgttttcttgtatttttctctaatggcttccgtaataaacgattaggaaagttctctaatgtgtttgggtgactctcctaataagctgtctattgagttgtctagtaagttgtctagtaactcttgtattacagtttgcttgtgtgttctctaatggacttccttgatacttgttgcaatgatgctttctatgatgagctctaagatggctcttcatgctgattcgcagctcatccagtccaagttgcactctgtccagcccctttaacgattcatgaagcgctgaatctatagtgaccgaatacggcgacacggccgtctttgtgaacgaaagcaccaggcagcgttgaaaggcaagctagaagtgcgatcgctcgagctctttcacctggacctaagcctgagtcttaactggttgcaattcgtttagctgtaggaaatggtgtgcatcgaacatggcggtcttcttaattcctttctcgcagtatttcgtcgttcttcctctcaaatggcatgctcatatgtttcatctggttctgtctccgctcctctatctgtttctcggcagtcttctcgtttgtagctcttcttcggtggcctgtgctgtcatcttcttcatctgtcgtctctattaattcgcaccttggtcgtctccaacatcataccaactgctcatcacttgaagcctcttaggcgacgaatgatgagaacgactgcgctcagaagcgtcaagagagggctggcactctcaaggtgacgtcactgaatagccaacaagaaaatctcttgctcatcatttaagaaccacacaggctagaaaacccattctcttcatccaacccacccaaccttccgcatcactgttcaccctcatccgacaagtgaaatgaccgactacgttaaacaaaccgccaaacggtccctcgcgctctctcaagatgccgtccagtcttttggatggctctacccgatatatggaatcccatacttcctccaacactctgagctccgaaagccactggagaaactcatccttccctcgctcgccatctcggccgtcgtgtttggcttgatgttcaccttcacttacgttccgcaagcattggctctcagtgcgcttcagctcggaccctggggtttcatcaccgctttcggtgtcgtccttgaagaatcccaatttgtatgtcgacctgtttagccatctcatctcatcatgcattattcaacactaactattgaccggtctatcagatcatctcgattgtcttgaaagcgttcttgttcaacacgaccctggccgagacgtttgataacgtgctcctcatcaaaggccaagacgaacttgtgtccaaaggtcgagagatctcccaggctaaagctggtcagtctggaaagacactgggcaagatgtaagctctggaccgtttctttcatctatgctcgccgcttagagtgctaatctgatgcccattcatggcccatgttcaattcagggtgatgaaacccttggacaagttcaagccggcagcaatcatcaagtatctgatttctattcctcttaatggtacgtttccctccccaactgaatctgcgatcaaccatgatcactctcatccactgatccatgtctgtatctatcctatatactcacagccatccctgtcgtcggaacgtttgtctttttcgcactcaacggagttcaacaaggaccggctcagatgtccagataccatcagctcaagcagttcacgcctgagcagaagaagaagtttgttcatgagcaccgaggagccgtaagtctaatttatcctccgtctctttccccgcagtggccaattgggcagccaattgttgggttcatttctgatgtcgttttatatctgatggtcttgatcgtgcctatcttacaaaccagtacaccgcgctcggcgtaacgtctctcctcctcacactcgtccccgtgattggtcccgtcgtatttgcatactccaaccaggtcggagccgccttgcttgctgtcgatttggagacgaagaaagggaaggttgccgagggagaacgggagatcagaggtggaaggaaaaaggaactttaaaatagcactgatttgtttctttcctttagttcacgtcctctcaaccattgtttctcctatatcctatcatctttctgcatctttcctttgctaatatgtaaccattaggctatctatttgttctcgtactttcatccatgaaactcaacttggatcatatgtagctttacatgcaccccccttatttcttcatccgatggtctgactcgaggctgttcgcgctcttcagacgcaaaagagttctcaaaaacaaagaaagaaaagacgtcggtaaatgaagagaggtcaagtataacttaaggattaggataaccgctttgtcaaaggacaagcgccggactgccagcttctaccagatctaccaagtccaccgtcggctctttcaggtcggtatcactgactagagtaagtatctgtcgaaagaccttcgtccgggctctataaagctctgcttcagattctttgtgaatcggttcaggtggtggttccactaaacgagagtatttacgcgcacacacgcaaataggcatgtgtgagcatgtcatcagagagaagagagggataggggaagaaacgcagaaagagagaagatgacgagacgcacaactctcggtccatgaatttcgagattcatctgatgcatgaccacacggacggctcagaagatagctcatcaatgattggaacatcctactcctacgatcaaccagagaggtaccacagcacgcaatgttagcttctcgtggttggatggtaaagtttcgatggactgaatgccgatcagaacgagtgaggttccttactccttacgatcgtcgtgggacacgactgcgtgtaactggttctgaagaaacagtagggcttccattgccggtccagagtcacatatctcgatgaatctaccgtcagccaaacggagagaaacgacatattaatatctccaggcacatataaaaagggttcggagtaaaccgaattcaatattaacctctgtttcctgattgcaagaagcgctttctgttctacttgcgctcgtccacatctacgtatgagattgcaaccgtcggaagtaagcatactgagaatgacctatcgaacagaagtgtctttttatggaagaaaactaatggaacaaatcataaaagacggacctgatgatctcgagctgccaaaagtcatctagtcgggtatcaggactggtgcctgaattaccgccgtacaaaaaaaatgtctcgctcctggcatcgtacacaaactgatgtgcgtatcttggcgatgggaattggtttcttttgttttatcaagaacgattcgatacagatgccttcagtctacattttctgatacgcggagcgcgttccgtacacatctccaagagtttgaaaacttactttgtctgacctgacccagcatcgtcatagccacctatcgttgcctcatcgtcactgtccccccatccaactcgatcattccctccaatcttcttccatcggccggtctttagctcacacgtccacaactcactcttaaccacactgtccttcgatggtccactctgccttgtcaacccggagagcacaacaatctcgtccctgccgacgtcaagattggctctaggggtgaatgctggttgaggaccgctaacggctgagtagtcggccgtaagacattcgaaggttgaagtgtctgggtagtatttccaagaatctgtaagactgatgcggaccgataaaatattattaactatagacgactagaaggacgagtagacaggtggagatgatccagggttgggagagggcttactaggtgtcaatccgaagacccccaaagatgaggagcgatcgatctgtcgggttccatatcatgctatgacctttagatcgatatgaggtgattgaaatgatgaaaggataggtcagcttcatgcccttatctgcattctgaaactggcttgtagtctctgacctgttcttgattccagtccttgttccgagtcgccactaacaagttcacaggataagcgtgcatcacagaaccagttgccaaatttggaagaaggaaaggaaagccttgagagggagatcgggcactcacaaaagctttgtccacgaacgagactttatatcatacttgaacattccactgtgtatatcggttgtatctgacgcatggcacgccccgccatagatgtacagtgcgcccttttcggaatcgactgtatccgattatcgagaaaacaattagatcagagatgttcgcttgaagtaatacaggacagacgggcaggattcagttctacctatcatctgatgatcatatctgttccatcagggaggagggagatgcgtgagaagtgcaaattcatgatgcagaagaagtttacgccaatccaacacccgaatgaaaacttacatcaagctgggtcctccctcactctgaacattgcgggaggaacgtttagtaactcggattgtgaataatgagtctcttcagaacaaggatcgatcgatcaagacttactgcagtgtctagactcaagcactcccatccagcctcttcgttccatacgttgaacctccagaaatcgtttccaaatctctcttcttgatcggctgcttccttcggtgcctctccatctatatccatgaaactttctttatcatcctccacatcaccatctacgtgcatcttactggctcggctcttatcattcgacatcgacgactgaccttcatgcccttcataccgaccaagaagatacatccatccggtctcttcgtcaagcgctaacttatgacaactccgagccttgggccatgttcgatcgagccgggcctttccagatcctgatttgtggattggtgtagaatcgggagcagaattaatggatttattcaaaggagtaggagaaagggctgtgcttgagatcgcaggatctagattgacggtagatagcccaaccgacgaagaggtggctgaagacgacgatttgtcagaaaggcttgatgggttcaaagaggacgggagataattctgaaagagtgaagagctctggacattggaaggcggcctgatttctcgccatgatcctgtaagcggcgaatatacccacaggtcggcatagttttgggttccgtcccatcctccaaataggtagaccctcgtttgactagatgatgaagatgatgaagacgaagatgaagaaggagatcgaggatgtgtggcttgtccccttgggtcactatcaaccaccatgccgtgtcctccacgtttcccaggggtcggctggtttttcggtacctgtagctgggtccacgaagccttgccagtctccctctgacaatagagatcaaacaggccctcagcgctcagttcgcctatgagtttctccgcaccggacaagtccccatcgatgacaagggtcgagtgaagttttgtgagtagcttgtgttcaaatgagacggatgacgggagagcagatagcagggtggaaaaggaagcgaaaagtttggtatcgcgcagatgttttagtgtcagaaggatggttcgggtctgttgagcctgcaggtatgtttccttgatgtctcgcattatttggtgatcagaaacaccgccaaaggccaggaacctgaacaacagattttcaagagagattcagcaccggatgtggaagagagaagaatcacgctcatgaaatgatgaaaatgtaccagatggagcaattgtagtttggaacttgagcggttaaaggaatgactctgaagaatgcggatgaattgaagattagcaccgatcggaacggtccgcgtcgtactggtcagaaaagtgacttactttatgaacttgactggaacaggctatagtttacgaagtcccaatcagccttcgtgatatgatcgaaacagagcggatgaaacaggaaaggaaccatactaaacgatctccccctgcctcccgccaaccgacttcgaacgtctctgattcagtgtccgacttgagtgagccgttgtggacgagcttcatcgtctgcagagtcagtccggcgtagaccgcgaaagctttcacagtacatggatgtactacaccgttcaaccagatgccgttagatattcagaatacggaaccaccttatcaatcaagaggcgtaaagtgtggaagatgaaagaggttgaactgaccttttatgaatttgccaaacgtgatggtgcctatcgggttatacgattgattccacgcgctcacgcgacgtcagcgacaataagcttcggatggacggcgtcatagttggatgacagactcacgaaacaagcacaccttgtcgagctccagacagatccagttcctgccttcgtgttcacttgaccgggagacagaagctaaaccgactctatcttccgtcggcccaggagctggttgagaggctgacgctggatggtatatgcctgcccatcgagatgcctgatcatgaggcgcgttgataaggacgttcgaagggtaatcttaatgagaagttgccaaaatgaacggctaagttaaatgacaatgaatgaactacgtccaaggggaaacccatagacagacattttgttgtgacagatgagcagctatcgcgatgttccgttcgattcaacaggatcaaccaactgatttattatggttatatagagaagaacatgggagacgagctcacgaatgaacgctatatggaaggttaactttagcgagctcggcgattcggtcttgaggactgcccatcttccaaaaagagggaataaacccgatttggttccagttggactggatgattggacaaggagatggaggagatatagttgagttcgtactgttgatggatgactacatcgattcaacgaacagagatcggagaatgatcatatgttagggttagatacagccatggttacattcagtcgtaacacctacgtcagtccatttctggtctaagtatatacgttctacaatgcgatcatttacctttgatttaatacgatattatgagtcgtgttacatgtgcacaccgaaacaaaacggatagccatcacattcaagagaaagattacggcgaattgagttctatctaagtgatgtatagtgaaggtagatgagaagaaacatgaatactgaatatgaaagtgtagccaacttgtagattaatctattggaaagatctgtattttcctccagctcggatcagatgagccgttcattttgccctcctttctgactcttccagcctctagcttctcattcttacgttctctccacgaaagaagaagacatcagtcctgtttagaaaccgttccaatgaggcgattcctattggactcgtttctgtatctttgttctttttctttcgcgcgctcccttcctttttttttttttttttttt

SEQ ID NO: 1912 - DNA, 18120 bp, Xanthophyllomyces dendrorhous
gcactcccccgaatctcgggttttctcgcgaaacatctcacccagccaatcaggacggccgcctttttttctcattttccgcagctgcgtcctgatttgccctggctttcctcacaaagaggctctggtttccttttcatttcgatttttccttcttctctcgtctcttcctacccatcttccatcctcccatccctccctctccctccttcttacccatcttgtctaggttctggaaaggtaagagtcttatggtctccatccaatctcttcgcatcgctctcgatactaattcttgaggatagaagaggaattaggattgagagcgatcaggagaggaaagggacaagtttttttcaatgaggcctctgcgattggcctttttttcttttcctcactgacctttcttctttcctttccatgtttcttgttctgtagatgattaacaagatcccccagtctattcttcgacacatctccccgaggggaatggccaccctttccaacaggattggggacacccaggtcaagatgagtgtgcttgacaaaggaacccgtgcgttatctttttcatttctcacctaaggataaaaaactctggtcgagcacattctcatctctcatcctattctcttctcttgatctagactacatcaactaccagcgaattgaggacaacttgtctatcgttcgatcccggtaagtactcttttcgatattttctttcgtcctgaaatctagccgctcggattggcttatcttctccggtctaaatctattcccatctcagactcaaccgacctcttacttacgccgagaagatcgtttacggtcacttggatgctcctgaaactcaggacattgagcgaggaaagtcttacctcaagctccgacctgacgtgcgtattttctccccttgcagtactggttctctatccatacgtcatttgcttatctttttctttttgtccaatagcgagtcgcctgccaggacgccaccgcccagatggccattcttcagttcatgtctgccggtctcccccagaccgccgttcctaccaccgtccactgtgatcacttgatcgaggcccagactggaggtgtcaaggatttggctcgagccaacgaccttaaccgagaggtctacgacttcttggccactgctaccgccaaggtaagattatcctgtcttgacctggtcttatttttcatcttcctagtgttgacttcttggaactgtctacagtacggaatcggtttctggaagcccggatccggtatcatccaccagatcatcctcgagaactacgctttccctggaggattgatgattggaaccgactcccacacccctaacgctggaggtctcggtatgattgcctgtggtgttggaggagccgatgccgtcgatgtcatggccgatattccttgggagcttaagtgccccaaggtcattggtgttcgattggagggcaagatcggaggatggaccactcccaagggtaagctggctttcgctgaacgaacccgtctcattaacacgcaactaacctcttgaatacgtatttccttacatatagatgtcatctgcaaggtcgctggaattcttaccgtcaagggaggaactggtgccatcattgagtaccacggacccggagtcgagtccctctcttgcactggaatggctaccatctgcaacatgggagccgagatcggtgccaccacctctgtcttcccttacaacaaccgaatggagtcttaccttgaggccactaagcgaggaaacatcgctaagtacgccaaggccttcggacagaaccttcagcctgacgagggttgcgagtacgacgagctcatcactattgtatgtccagcttcttctgagtcttcatcgttttcatcaaatagctaacaatccatgtttcgctctgtctcagaacctttccgagcttgagccccacgtcaacggaccttacactcctgatcttgccactcctatctccaagttcgccgaggccgtccgaaccaactcttggccttccgagctcaaggttggattgattggatcgtgcaccaactcctcgtatgaggatatgtcccgatcggcttttatcgctgatgaggctgctgcccacggactcaagaccaagtccaaattcaccatcacccctggatctgagcaggtccgagctaccatcgcccgagacggattcattgagtccttcgagagtgctggtggtgtcgttctcgccaacgcctgtggaccctgcattggacagtgggaccgacaggacgtccagaagggaaccaaaaactccatcatcacctcctacaaccgaaacttcactggacgaaacgacgccaacccttccacccacgctttcgttgcatctcccgatatcgttaccgccatgactttcgccggagacctcaccttcaacccccttactgacaccctcatcggtaaggacggcaagcccttcaagttctctgagcccgttggtaaggagcttcctcctaagggattcgacccgggagaggataccttccaggctcctcctgctgatggaaccactgtctctgtcgccgtttcgcccacctccgaccgactccagatgctcactcctttcaagaaatgggacggaaaggactacatcgatgcccccgtgctcatcaaggccgtcggcaagtgcaccactgatcacatctccgctggaggaccttggttgaaataccgaggacatctggagaacatctcccagaactgcctcattggtgccatcaacgagcagaacggaaaggccaactccatccttaaccaggttaccggcgagtttggacctgtccccactgttgctgcctactaccgagacaactctatcccctgggttgtcgttggagacgagaactacggagagggttcgtcccgagagcacgccgctttggagcctcgattccttggaggtgtcgccgttatcgtccgatcgttcgcccgaattcacgagaccaacttgaagaagcagggtatgcttcctctctggttctccaaggcttccgattacgatctcgtcaagcccaccgacaagatctctattcttggtcttgatactttcgctgagggcaagaacttgaacgttgagctcaagcacgaggacggctctgtggacaagattgaggtctcgcacaccttcaaccagggccagattgagtggttcaaggctggatctgctttgaacaaaatggctgccgacaagttggccaaggcataaataggttttctttatctacgggtccttttccatctttttcgagcttgctttcattccatacccctcatgtcacgtccgcaccatacgttgctctaatcttccaattgcttcgaatctacccctttcaactttcacacgatgttgttcttttgtatttatgttttgacaactgaaccataacgagcgagtgccaatttgagaaagagaaaatatctagagacccttggtgtcgaccgctaagatagaatgcacgacaatcgactattcgaataattactcggtggcgccgattgcgggccattgtaattcgaccatattccgaaccaaccgctcacgtacacatcgatttaaaccatctgatccattgataccccaacgttctggtccacatatatcgaatcaacattctctcatctttacaaagaaaaagaaaagagcaaccatgtcgaaagctgctaagagaacactgtggggatcgattggagtgacttgcttgacgatcctcggagtacattacggtcaagtccaagagtccaatgtatgttctcgtacttctttcccccggctttttcgttgacctttcacgtacaaagtgctcacagtgtcgacgctctgatcattttatcgtttggtgaacgcgatgaacaaacagaacatgtatcgtggagtgctcagggacgaagaacggatgaaacttcgggagctggctaaggcctcaggagagagcttagcaaacacgctcatcccagccaccgtcagagattcattaccctcgtcatcaactgtcgcttcaatcttcggttctggaaccactccttcccagccatcgccatcgtcatcaccatcgcctccaacgatgggcagcaggccggtcaactcagattccgtcttaggattcgaacctccgacgcaatcaacctcgaagacggacgcccagcgcgagaaggaaaagaaagagcgcgctcaagactttgaaaggagtcagcaaaggctaagacagcttgtaggagaacaaggtatgactggggacgagcagagatcaaaagctgggatttaatgaaacattttcttttcttttcttcctctttacttttttactttacggaaggaggagatacggatgattacgtaatcatacataccctcatgtaggaaagagtcagaaggcttgaacgcaaacattatctactacacctcacacctgttgcatcgctccgaacatcttcattaatcgaacctgagagctctgatccggtagatcgttgtctctgtgggcttctttgtctggatgcaatcgacgaccgccgaggataccgtgtccatatccaatctatcgccccagtcgacaccggctgtctatcactcctttcccacttcgttagaggccgtgaccaaagctatagaagcgttcgagaggcaatatcccaataggcgtcctatgaataacatgcaaagctcggcaaacctatacggtcatcaagaagagatggaagaagctcaagtcgcggatgagctttctacaatcgtcaatggaaatatagataacagtgtacctgtatgtatctgtatatcttctagcactagctcggtttttgtttcacagtcgtggggacggggaatctgacctgtagattttcatgttgattttcttggattgtctgcaccgatagtttccctcacctccctcgacaatgccgatctccattccatctgaacctatcaccgctatatctccttaccctgggttcgaacaaacaccatcgtggcctttaccgacagctgtttcatcttcatcatcccatgcccaaacattctcaagaccgtcctcagagaaggagcacaccaacctaacctctatatccttctatccggtaaggccgtatattccttctacagccgctgttgctgctgcttctaccctcccccctgtcatttcaaatcgtacaaaccctgggcctatgggcatacagctcgggttggtcgagggtcaaccaagtagatatggactgaggagtagtctctctcgaatatcgacgccttcatcaagttcgagtataagagatctcgctccaaaaagagtgacggcttatccttcaccctctcgaggatcgtcgcagggctccctagctttcggttcggatctctcgtcattgacgagcgaggtgagtacaagtagcgaagaggagggtatggaggatgagatgatcaaggttggtccgtgtttccactctgggtcaaggagatgtgcattggaatagcaccatcaggttctcatccgaatttcttcctgcctatggttgttggggagattcaggttgtcgcaagtccgcgaccgagagaaaattcagcctcgtcgagcggaccgtggatgacggtgcccgtcgctgctaattggggcgagaccccaggaccgatggtcgtccgagagccattcgttgtgttggatgaggctgatctgattgaagaagtctcggaagtcaaggcaaaggataaagaagatccaatcgaggaagatcttgctgcttcctgtaaaaggaagagtggtccaagcagaagaagttcagggaagatgaatcatatcaaggatgaaccggacgaggggcaagcgaaggataaagggaagagaacggaaaagaggaagtacacaagacgggctacgactgcatctgctacctcggaaactccaaccacttctggccggatatctgaactacccgattcacaaacggcttcacatacggaacgtagaaagtatcagcctcgtagaaaatcactgccttcctcctcctcctcctcctcctcttctctggcaatacttccgtcttcgtctctctctgatcgaccgggatcaacacgttcatcacgtgtgcctccttctcccttggcaaccgattcgaaccaacttctaccgataagaaggcgtgcaatcctagcgtttcctcctcgaaaatcacaagctgaacttggaagggccccatccttaacgacgccctcgccaactgttagctctggctcttctacccaaaccagaacaaccactgagaaacggacagaaagatgcgctgaagatggacgtatgatgtaagtgtttcttcctcaaatttctctcgataggccgttcagcgataacaaactggtgatgaggtagcagtggtggagactgatccagtggcttggtgaaataggacaataacgactacaacgatcgaaacagtaacagtttcatacggagacgatctagattcggaacccaacagggaagtaactgatagttcaagggtgctgcaatacagcaagcggaaacgaggttgatatatgtcgattacttgcgctcccactctgcttgtgttcatctttccaatgttcaaagtgaaagcggcttagaaactacattgatatcgatacattatgttttccgaacaagaaaccctgatagctattcactccaaatcaggaacagcctcgtcaatctccttctcctgcttgtaggcgtcctgctgaacacctcgagtggtcactccactctcatcatccaagatgttgctctggtcaagtccgtcaagctcctctggataagatgaatagttgagagccaagaaatataatcatgtgttagcatcaaaaccagacggaatctgaagagcaaagacaattgtcgaaaggatacttacgagagcccacaactccagtctcggtggacggagcaacatcttcaccactgttagcagggggaacgtagtcatctccaccctaataagagagtgtcgaggatgtaaaattctcaatcatcggagtttatattatctaggagaaagagcgcgagaaaggttaacatacctgatcgacaacaggggcgctatcaggggcaggttgattcgactctcgctgctcggctctataaatcatgcatgtccgaatcatgagtatcagtgataagaagcaacgaagaagcagaaagaaaggagaaaacgaacccagagcttttggcaccaccgtaagaagtagaagaagacattgtttggaatttaaacgatcggtggagttaaatgaatgtaagtgaacaagagaaacatccacgacacacaggaggtgaagctctttatataccgtttttcttctccttttcatacgattcgatcgggttggcgttgccatcgttgtttgtagattcatcattgatgatttcatcatctgaacgcgatcgagatcgggataaatacagatgggcgcacagagtttatctaatctgatcgactgaccccacacgctcagacgacaagtgagcgagcgcacatcaaccggtgaataggctcggacacgtttcatcctaggttcggggccagcaacgagagttgaaagaaccgttgaagactcgaatctcttagacaagtctttcactaagaagaatcatcactgcctatgtttttcctcaagatactagaggacattagatgagaacgatgattgaacaaggagtttccttgtctctttctcttttatccataaattggctcacctcaactaacttgtcttgatacaccttggctcaacccaaggtgattaaggtcgttgggcgatagagtgttggggttcgaactcatgttcttcactctcatactgatgagcgttgagaagggacgttcttggctatcccgctgccctctctctatcactatgactcggccgtgaggcccggattgccaaatgcaaataacagttgtagatcgccaatcgagtccttcccaagactcttccatcgcctctctttctctctttcgtcatgatcaattttgtcgccgtcgccaaacagaatcttttcttcttctttcgcttggatgactgatgaatagaggggctgagggattatctgattccgacttacccgctaacaaccatctctttgaccgaacactcatttcccatcatgtctgattctgattcccaaaccgtccttattctcgccgagctctctcatttgagtctatgcaaagttagggaagaattctccacagttcattatcatcctttctccggcgatctatcttctgtcgccttttccaaggagattctttcgacaatcgatgtcgtgttcttggatcacaatgtaagcttattgagggccattcgctcgtttgaagagactcctaagcttcagtatctgcagctatgtacatctggttcgtctttctatgtttagttattattcgttctgatgctctcaagcttcaatgcgtccacggattcctttgagtcatcaaggttttgaacatgactgacattgaatactctcgttctcggtcctgacgctgactgatccgtcctcattttcatatttcgaattattatttgatcttttccctataaacaataataataccgatattactgataaaacttacaatactgctgttactatcgccgctactaccaatactacttgaataggtgctgataaggcgatcgcctcttctgcctttagtcggacgaacaataatgtcacactctgcaatgtcagtgggatccatacattgtccatcccaacctatgttctctcaactgtattggcagtctatcacagacttccaacccaaatattgatcgctagagtaagaccaaaaagctttcaacgcaccctgtttcctattgtctcccgaatctgactcttatgacacgacgatgttcaataccgtcatagcaagaggccagatgggctaccgaaggcgaagtcatgcgcgaccaaaagtcgtcttactatgttagaaatatccgaggaaagactgtcgggcttttggtatgtcagcatttctattcatatatagcacttgaaacactgaactgaacttttgcttcgcattgtacagggatatggtagagtaagctcccgtccacttttccatgagtcatctatacgtcaatctgatgatgccataccgtgctcttctttatctctaaccacaagatcgccagggagacagctaggttgttcaaatctctaggaacgaaaattatcgctgccaactcgaacggaaagcgaagggatgagtgcggagtgagttacttttttccacgctgggagcgatgtatttcaaacctgacatatcatgctgacaactctcgatgggcgtcatctcagtacaccatcccagggacaggagatgatgacggtgtgtcctccttgatcaaagccgtcaggtctgattgatgttcaatgtcagtttactgaccaaatctcaattcgaccattgtcagggtccattccatccgaatacttttccacagaggaccctctatccttgaagagctttgtctcgcgctcggatgtcttgatcgcctcgctgccttccacagacaaaacaacgcatctgttaacggaagagcttatgggtgcgttcatcgtcttgattccaaatcaaatccagcctgatcagaacgaaacggaaaataacccagtctctcgaattttttggaactttaaatcagccatgctaccaaagggtgctgtttttgtcaatgttggccgtggcactttggtcgactctggtgagctgagatttaacaacgatagataaggatagggaacaatttgctcaaaaatttccgagaacaatcaatgaacccagatgttcttctcaaggtccttgacggtcacaaccctactctcaacctcatcctggatgtgactgatcctgagcctcttcctcaaggccatcctctatacactcatgatcgtgtcattgtgactccacatctatcagggtacgttcgtcttcctttcttcctcaggacgcgatgtctctgatgtcctgctctcgaagattattccttcgttaccatgacctgatctaaatcttcatgtttcgtttttcagaaatgctgaaggtgaaatggacctcgccactgacattctgattgaaaacgctaggcggcgtaaggaaggtctaggattgacaaacatagttgatattgaaaaaggttactgattttttctcgaggacggactgtattcgatgggatcagaagacaagagctctttagcggctggatatttgatgatataatatatgaatagcccttatacgttacatagacgcgtccacatacagacgcgtgtgtttttcatttgagcctagtgagacagatatcatcaacagcacaatcacctctcgataacacaagacacgacccacctctccccagaggttccgccgcacccaaacattgcccatgagctcagctagacggtcaacaaggcagaccggagataactcttcctctgtctcttcacattccaagcctagatcttcgagggtaaagaagcaaacgattgaaaaggaagaagagtcagaagagaagaaacctaaacgacggtcgcccaggcctgtgatcgtcaagcaggaaccactagcggaagaaaacaaagaagaggagtcttcattgaccaaagaagccgagcctgatgatcctgtcgaagaggaggaggtggaagaggatgttgacgtcgatgagcttctcgaggagatatcagacgccgatagagagtcaacccctcagcctcaatcccaacctcgttctgtaaggaatgtgactgaaatgagctcttctacacccgtaaaacaagagccaatagaatttcaagtctcccagtccgatataccatccatccctcggtcccgacaaccgaccaacacttcccaatcttcctcaaggcagtcatacgcaaccggtgctaaagcagagattccaaaggctgagcttccgaccccacctcagaagagactgatcatccaaaaattggttcttgaaaacttcaagtcgtacgctggaagacaggttatcggcccgttccacaaggtgagcttctagaacgctatctatagactgttcattcggcgaaatcatgattctagcagcggacttatgccacgaaaccactctcgtcctgtctgttctcattgaatagtcgttttcggccatcgtaggaccaaacggatccggaaaatccaatacaattgatgctctcttgttcgtatttggttatagagccagcaagatgcgccaaggaaaactaggagagctgatccataactctgaggattggcctgacctcacatattgtaaagtcgaggtctggttcaaagagattatcgacttggtacgtatggttcttcttacatctcagtcctatcatctgaaactgttgacccacaatactaatagcccttacgaaatgcagcctggtcctgacaagtacaagacaattcctgggtctaatctcattgtggcccgaaccgcgtacaaggacaacaaatccacatactcgatcaaccaagggccatcgagctacaccgaggttaccactttgctcaaggacaaggggatcgatctgactcacaagcgatttttaatcttgcaggttcgtttctttataatggaaccaaatcctccttgtcaacctgagcggaacgatacatatcttccatcacggctgcactaaccattttgtacaaaccgttttgaatagggagaagttgagtcgattgcacaaatgaagcccaaggcgcagacagagcatgaagagggcctcctcgagtatctggaagacatcattgggacatcccgctacaagacggctatcgaggaaagtttagtcgaaatggacgggctgaatgagataattggaggaaaaaagaatcgactaggtattgtagtgaaagagctcaacagcctcaaggtacgttcttcttacaacattcgagactctcagccacctccttcgtataatgaaaatgtagacaacatatccaatcctaaccgttcgatgttatttacactgtattctgtgcttatgataggcaaagaagaaagaagctgaggactacttgagggatcaaaatgagcttgctcgaagacagtcgttactttatcagtaccatctattccaccttcgatccaacatcgagataacccaagcctctatggtaaaaagtttctttcaacccatctacttcgacggttttcattctcaacataagcgaacggcaatactgacaagacgagagactttcccttcataggctcgactaacggagcagttgactgccgagagggaagcaaacaaggataacatcgctgagatcgagggtatggaaaacatgtacaatgagcagaacgagatctaccttgtaagcttttcatcttttttaaaggtctatgtatcttgtgctggccatgtttctcgtcaatctcaagtcctgcacttcatgtttgattatgtcccaggatgtcaaacgcaacgcggataaaatcatgaaggaacttgcagctcaggagaagaaggaggttcagcttcaagaaaagaagaagcattcagtcaaccagcaaaagaagctcagaaaagcgatccaggaggttagtaaatccctcactctctagctcgtgtagcacatctagttgttgaaatttgaaatcgctcgcacttctgctcatcattcgcttcgtggtgttgtcggatttgcaacatggacttgaatatgtaggacactcacgccaagtcttcatcagccacatggatcgagaatagccaggaagttattgatgataccaggaagcagattgaagggttagagatcaagcttgctgccgaagaacgagaatttgaagagattagggacggccttaaaggtcaattctcagtatctatctagttcctctgtgatgatgactgatttcttatctttgttgaccaaaatcttgacagacaagaccgccggattttctaatcaaatagagctcaaacagcgcgagctcgagccttggacggccaagatttcagaaaagcaggcgttgatcgatgtagctgagagcgagaggaagctgttgcgagagaaggcgaacggtcttacagaaggtgttgtagaagccgaggaaggactgaagattatcgaagctgggagagaagaaaaggtaagtttacattcataagcccagtcaatcgagtttttgagaaatgattcagcaaactattttcttcggcgattgacgattgttttttttaatagcttgagatgctacaagctttgagcaaaaaagaaaagattctcaataaacaacttgttcaggcgaggataactttggaggtaagactcatcagttattctgttctacatacttcgatcaggagtccgaggtatctcaatatgtccttttctgattcggatcaacatctaggaaatcaatggcaaagaagaaagcatgcgccaccaagcatcgtctactcggcagaaagcggatgaagctaaagcttcgcttgctgcaagcaagggagagaacgagatgctcaccggattaagaaaaatgagcgagatgggtcgattgactgggttttctgtgagtgacttatccatcaatttttttgtgctcggtagagaatttatatgcaataatctcgtctatcacttacttactcagggccgtctcggagacttgggggttatcgacgacaaatacgattgcgctgtaactactgcctgtggagggtctttaaatgcgctcattgtagatacagtgcctcaaggccaagcagtcatcgagcagcttcgtcgatctggtcatcgagcatcaatctttgtactggagaagctaggagatcgtgactattcgtctatcgacacacctgagggcgttcctcggctgtttgatctgatcaaaccaaaggaagctcggttcgggcctgccttcttcaaggctacgggaaacactcttgtcgctcatgatttagaacaggctaaccgaattgcttacggcaagaagaggtggcgagttgtaacattgggaggagatctaattgatgtgtcaggagcaatgtctggaggtggaacacgaggtttgtcattctatcactttagatactgaacgcattgttatgctagctgacatcattgattttatttagttcaacgcggaggaagttcgttatctcttcttttttcttctaaataaaaaacagaccctcgtttgttgatatgtgcacctgtttgaaatattgcagtgagttcgaagtttgctaccgatagaattgaaccaaaggtcctcgctcgatatgaggaagagagtgaaaaagcgcaacagagcctcatcagttttcaagcgaccaaacgagacgtcctgtctgaggtttccaatctacaaaagcagcttccagagctcgagatgaatatcaccaaggtagagcttgacattgagaacggaaagaagaggatggccgaggccgagcagcgactcaaggaacttcggtatgtcaaattatgaacaatggcgaaatgcttccaatcgatgttcactgactatttgcgttttcgaaacggttgtgcagctcaagagcaaagcctaatattggcgatgaacaacgcatcaagattcttgataaggagatctcatcggtcgaagaagagatcagttctttgcgtcaaaaatcgagtggaatcgaacaagccattaaggagcttcaagatcatatattagaagttggtggtgtcaaactccgaacgtgtgttctccagacttgcaagtaatcttagaagcttcttacattcatcaaaactgacctttcctgaatatgatttccagccaaaaatccagagtagatgggaccaagcaacaaatcgaccttgctggagacaaaatcacgagagccgaagtcgaacaagctaaggccgagaaggacgccgaaaaagctcagaaagccataacgtccaacactatcaaattgggagagatcgacgaacaattagagactctggaagctgaactagctacttgtgccggagacatgcatctaattcgatcaaccttggaggaggcgcaagaaggaagagaagcgttggaagaggacttagctgctctcaaggaggagctagacgagaaaacgctggctataaatacgttccgtgctcgggaggtttgtttctgtctatcacttgctttttgccacagcttacctatgactaacgatcccctatcttatcaaatcgtcagctggatcttactcaaaagcactccgagaatgagaaagtcctaaaggattcaaaagcgaaacacaagcattggaccgatcggcatcaagagcttgaacttcaatatgtagagtatgtctgtctgactaggcttatctaataataattgtaaggaacttaaatattaactgacttgaccggttcatagggaggacgatgaacaagactctaacgcagttcaagatgatgagaacgctatggatcaagatctcgaggccggggcagaagacgaaagcaacttaacctctcaccctgattcattaccgcgaaagccgagaacctcgcagctagaattcgaaaccttcagcgatgacgagttaaaatctcaagacaggaacatccttgtggctgatgtggccaacctggaaggtgcgcccctgtggctgtcttctcaatgctttggacgctaatagaattgattatcttacactgatcagaacgagtgaataaatcgaagcccaacttgtctgttttggctgagtacaataaacgacaagtcgagtttgatcaacgtcaagccgatctggaagaagtcaccgccaatcgggatctagctaagaaacgatatgaggatttgcgtaccacaaggcatttagagttcatgactgggtttacagccatctcgtccaagctcaaggaaatgtatcaagtaagggccatttgtgttgatcttctcaagagtctcttgatatacgtatctttcttttctggagcctgaaccgacgaataatcttcctatttgcaacatctcgttcttttgctacttcagttgataactcttggaggtctagctgaattggaactcgtggactcgctagatcctttctcagaaggtcagttctcatactcgccatccctttcaagaaaatactgttctcacgaagctgtctctgatcaacaacttgtccatgtcttcaggcgtcattttctccgtcatgccgtgagtccaaagtgcatgtctgccttgtcaattttgaaagttcaatcgaactgataacactcttattcattgattgtctcgcaggcctaaaaagtcttggaagcaaatagcaaatctgagtggtggagaaaaggtgaatatttccataagcgatacgactgatgttctatgtaaagcgacagtgctaatgctctcctaaatatactttttcgatagaccctgagttctttggcacttgtgtttgcacttcatgtttacaaggtcagttctttatatggtcactttatagcgtcaatcccagctaataattgtgacgctttctctgggtttatagccgacacctttgtacttcatggatgaaattgatgcgggtaagctctcaaccagattcttggcgctgttgtcttttacgtccgtccttgctcacccaagtgttttgcaacccttgtttagcgctggatttccgaaacgtctctatcatcgcaaactatatcagagagcgaacaaaatccgcccagttcattatcatttctctccgttctgatatgttcgaattatcgtaagtttgtctgcctgcttgttcttcaaaatagagtcagccgcggaactgatttagggtaattatcaatcattcgtacgggaatacatttaagacaccgactggtgggaatttataaaaccagtaatgcaactaagtcggtggctatcgacaatggacagctggtacctaacatcagagccgcgagctgattgaagatactgcctggtagttcttttcaatatacttctttatttcgacgtcttgatatctttccggtcccatcatccctcttctcatttacttgtagcaacatatattggttctcaatacgtatgattgattcgatgtcttctgtaatttttattctcgttcaccctcttcacttaaggttatagagtatgtcactgtctttcgagatctagttcattgaagataaagcagtatgtgacacgaggtgatgttgaaaacatcataagatacagtactgattttgatcaccagaataggaaatatctaaatgtgaacacgataaagcacaatatctgttgaaaacaggtggcctttgtcatagttttaactttatcttcaaaatgcaacataacaaatgaaatatacgtctttttacaaaggaagaagattagatcgagggtcatataaaatatgccataaagtaaagagtcaagagacaggatacagatgcaaatagggtaagcagagctagcagcctcaatatcaaaagtatttattctgatagcagccagttacacaattatctgcctactcttttatcggtcatcacagtgctctcgccgcttgaagattgagcagacttttgatagcttactcactaaacaggagaggcaggttctcgttatgtatggacttgaaggaaagatggaacggtgtcaaatttctgaaacctgatagaacactataggatagcagtactacagagagtttcacacgtaggatcacataacagcaaatctccccatgtagcatccaatgaaggtatcgattggctcgaaagacgtttatcaatgccacatgagccagagtagacttcacggaacgaagatgactgtgtaaacaaacagatcaatagaagtcagaagtaacttgattatatctgaacgtggtccgtcatctctctgcttatcatctatccaactgagttttacgggcgcaggcaggagagctgtgtgtgaagggattctcagcgtgcttaagccctcaggcaggaagaggtcatgggacgatacagagtagacaggacgatgatgatgaggaggaggagga

SEQ ID NO: 1913 - DNA, 475 bp, Xanthophyllomyces dendrorhous; identical to SEQ ID NO: 543

SEQ ID NO: 1914 - DNA, 360 bp, Xanthophyllomyces dendrorhous
gtcgagtggaagtactgcaggtttttgtggtcaaagggcatgacgagcgactcaaagtgtccatagcgagtgcgaaacgccgtcttccactcgtctccctccttgattcttaccagattgtatgcgcctcgcaagtcgagtttggtgaagatacgagcttgacggagacgatcgattgattcaccgatcaacggcaaagccgcacggttcttgatggtgatactattcagctttctataatccacacagagacgcagactgccgtctttctttttcacaaacaagatgggtgatccggcaggcgacttcgaggaccggataaagccttttgcaaggttctcgtccagccattcccggagt

SEQ ID NO: 1915 - DNA, 543 bp, Xanthophyllomyces dendrorhous
tcgtatatacagtagctagtttattttcttttctttcttcccctttctggttctctcaatgaacttgctcactgtgtgtgtgtgtaaaattgtttgagaatcagagaattatagaattagcattaggatcaggtctatccgaggagaatcagttgtctcgaacaaacgatcaagaagattgtcatggtctgacccggtttgatccgcgcagggtgaccttgcacaatgtagaccgattcttacaacagcctcttggtactgcttaactcgctcttggtacatcttaactctctcttggttatatcttgactcttccttggtatctctcagctcctccttggtatctcttcgctcttgcttgtggttgcttgtgtttccttgtgttcgcttgtgttcgcttgtgtttccttggtctaacatctcgaatgacatatataccatgtagtcgttagctatctcccctttactcccccaagcttggaacctcgttaaatcctcatagttcccttcaataacctcttcatatccctctgcaatattgca

SEQ ID NO: 1916 - DNA, 735 bp, Xanthophyllomyces dendrorhous
agtggacaatctactgtccgaaaagaccagataccaacagaaggattgatatccttattacacaaacagtatgcctcgacagcctacttcttattctcgtccgtttgttcctgcgtcttgtggatttgttgctagacctgtagatgatgggccatctccgatggacattgatgtcgtcgagacaccggccgccaaacagaacacttacggaagagctcccacattccatcctgtttccagaacagctgcaggggtaagtcgacccaacatcatcaaagtccctctttctgcagctgaaaagcaacgacgacgacgggagaacctatgcctatactgtggcgatgccacccaccatcgcaacgcctgccctctcgtccggtagaacaatcaaccgtctcagatggcagaactaaccatctacctcgatacggatgagatggatgaggactcggaaaaagtcaggactcagtaggtcgtcctctgctgggtcatcctcactctagcatccacggatcgttcaactggtccgagccaatcgctcaggcacagtctcctaagtctacttccttttgttctccttctcatgtttcttctcatacggacacttctcgctctcggaacaatccgactgactccgttttctcaagtaaatctcgcgttgaatcttccatcacatctatatcccctgtatctcctctcttagcctccatctctacttctcctgtgacccgttca

SEQ ID NO: 1917 - DNA, 643 bp, Xanthophyllomyces dendrorhous
ctgcctccgcatcgattatatgatcatgcgattgatctagaacagggatctatccctccctttggggctctctaccccctttctgagactgaactgattgcactccgggaatggctcgacgagaaccttgcaaaaggctttatccggtcctcgaagtcgcctgccggatcaccgatcttgtttgtgaaaaagaaagacggcagtctgcgtctctgtgtggattatagaaagctgaatagtatcaccatcaagaaccgtgcggctttgccgttgatcggtgaatcaatcgatcgtctccgtcaagctcgtatcttcaccaaactcgacttgcgaggcgcatacaatctggtaagaatcaaggagggagacgagtggaagacggcgtttcgcactcgctatggacactttgagtcgctcgtcatgccctttggtcttaccaatgcgcctgcaacgtttcaggagtttatgaacgacatcttccgggatctactagacgactttgtcatcatatatctggacgatatcctgatcttttctgctgacccttctcagcatgaagaacatgtcaaagaagtgctgtctcgcctgcgggatcataaactgtacgccaagctcgaaaagtgcgagtttgatacagatcact

SEQ ID NO: 1918 - DNA, 475 bp, Xanthophyllomyces dendrorhous; identical to SEQ ID NO: 548

SEQ ID NO: 1919 - DNA, 824 bp, Xanthophyllomyces dendrorhous
cgatagcttcaaggtctggcgacacgatcttgagggatcacagcatcctatccagatctattctgaccacaaaaacctgcagtacttccactcgaccaaaatgctcaacagacgacaagtacgatggtcgatggtgctgaactcgtacaagtatgtctttaactttcgtcctgggaagaaaaacaccaaagtaagtgctttcactcgacggcacgactatacagaggggggtaacgctcgagcatctgacgaggctccccagttgctgctacgaccagtcgaggtatcacctttcgagacggacggggccatggaagactcagcagacaataacccagaaaatgccttggaaaatattacggatagcgcaacgtcggatattgcgactcgcgtgaaagcaggttatcagactgacaactatctgaccgaactcctcccttttctcaagaacccctctcgtcaagctcccgtccagttgacaaaacaactcaagaaactcactcttgagcctgacggactaattttatatcaaggcttggtctatgttccagatgaccaagacttatagactgacattcttaaacagtgtcatgaccacccctcagcgggtcactacggtcggtacaagacgctcgaactgttgtcccgcaacttttactggccgaacatatccaggtttgtcagagactacattcgttcttatgatatctgtcaacgatcgaaacctcgccggcatcggccgtatggtcttctgcagtcactgcctgttccagaccgaccttggtctttgatctcacttgaccacatcgtcgacttgccgctgt

SEQ ID NO: 1920 - DNA, 444 bp, Xanthophyllomyces dendrorhous
acagacagaacggatcaactcggtcgtcgaacagtacttacgagcgtacactgactatttacagatcgactggtcacaacgattatcgttggccgagttctcttataacaacacgatctccaccacaactaacatgaccccaatctatgctaactatggctaccatccccgtttctcagccaccatccgggagggaccaaacccagccgcccaggaccatgtgaagcatgtgcaaaagacgctagcgttctgtcgttcgggcatgtcgatcgcacaagatctccaggaaaagtatgcgaacgaacatagaacaccagcacctccattcaagccaggcgagctagtgcttctcaagcgggtgaatgtaaaaactgaccgtccgagtgacaaactcgatttcaagctacttggtcctttcaagatcattcgagccgtcggcaattc

SEQ ID NO: 1921 - DNA, 3874 bp, Xanthophyllomyces dendrorhous
gttcgaagtatcttcgtcctgtctatcattacacctatgcctatgactttggcatctttctaaatcctcgagagcctgagctttccacatacaacctcatctgaaaactctacaaccaaccaagtcgcaacaatcggctgccgggcccttccgccctcacaaagcggcctaatcggttgggtcagggcgagtgatgacaggctttccctcgtcatgagtccggatatagcggtggaggttgttgttgggattttgttggaatcatctgttcgagtcctttcctcgaattaccttctcaaattaatggtgtcgaaattgattgtgtctgaagtatctgttaaacttgtcctctttcaccttcgacccattctgtctcagtcgacatcttggcagctatcttcttccatcgtggctgtttctcttagtgtcgtcttagcttctctcttcttatccttcttctcatctaagcacattgtgttctctcacatatatgtgcgctcgatactttcgtttgttttcttttctctttctttttctttttctttttcccttcctcagtattaacaaaagactgtttgtgtgctgagttagaatatatttgttctatctcgcagaacaaaccgtgaatctcttcagagccttctcccattagaacaatctcgatttagttcttttaggcggagtacccctccgaggagctgggaatgatgtgttgcactcgttatcatcatatctgggtttgctatgatctgtattgttgatgtttgtgtcttttttttcaatgatgttaacgtacatgattacattggagcgttttatgttgtagaatgtcttgggttagtcgcccaaagaccacaagtatcgatttcacctagtttttgaaggcatcgggttttgacactgatcctatactggcgtgaagcaccaaaataagatcaaaacctttaaagtcttgtacccgaaggtatcttagcaagctatttataaaaacacaacaaccaacacatgatcgactagtagaactaaacaaattacagaaaaatgcaaaaacaaaagaagaggaacttgaactatccgcagtgttcatcaaatcaaaagagaagaatgcgaaccacgtcactgtagcagtactagaaacgaagtcatgacagattgagagaaccgagttgaatagggtgattgataggactacgtaaccatctagttattcctgaagtgttcgatatcttatagacagtgattactataggtattcttgggaaaataacaacacataattaaaacgtttgtttaagctctcctgaggtcgcgttctttcaaattgtatgcccgagtgacgaagcatcagtggcacatcatcatttcgtgtcgaccccgattaaaaatcgtcgctttattcaaaagtcttttcactgggatttttagttaaagcctcatccaagctcggtaccaatacgtgatcgttgctctcacgctacacgccaattctgacatctgagttcaagatacctcacatcagatgaactaggtacaatcacactcacataatgtttgatcatatagagatactgattattttttcctcttctcatacaacgagcttcattatgaggtgtaaagatgggagatctgcaatacaaagtaccttatgatgaaggcttgagagatgaggcttcacgtgcattatacgcacgttatgttctgtacgttgttaagaaaacttgctaacgttcaaaaaaaccttgccatgattatctaagatgtctcatcacaggcattgggcagcgtcatgcttgatttcatttaatcgatgaagtccattatgtctttgtccgttaacttgcgagagattcacacagagcgtctatatgcacctatccatcttcaagcttaactcttcatatggagaacaacagaatctatgatatgtatctttaagtgataaaggaataacagaagaaaagtaaacgtcatgcatggtaatgtcgaaatttagacataaaacagtctcacaatgcggtcgtccgcacgaagaccgagttagagtcattgatacctcaatcaaatcaaaagcgggcaaaaagagacgaagccagtcatcggatctaatataaaaatgtaaacagataggtatcatataagtacaaaattcattgttttctttgctagattatgtatagaaacaaacaatcatgttccaatgagagagttcagcattgaattgattctgattacgagaacaaggtctccatttagttgtgaatggctttgtggatagtcttgaacactgaacgatctatcgggaaaaggttagaacaatcgaatgacagtgacttctatttgattgggtgggaaaaccccacagctcaccttcgggctatcgctcttcttcacaatggattaatgtatctagtcagtctgatttgcgaggaacccttaaaaccatcatgatgatgactctcagcaaaattgtattcaacccgaacagttttaaattgttctgcgacatataccactgttgatctaaaaaacgtttcaataatcgtgcaaagcgccccttttcatgatgggtctgacgttgttcagccagataaaggatagaacttccactcgataccatacgcaatggttgattgacacaggttttacaaggcaattattgtcatgttctgatacttttcctcactgatcatagtatctgtccatggatttctaccataatactgtgctttgctctttgagtttgacaacaccatgaaacatgtcgttgtgtaagttacaaatcattgtctcatgccgtcaactctaaataaacgtcataccccaaaagatgaaaattttatcaacattcgcggaaccaagataagaagcagagttgaaatacacatacgatgtttaattgaagagaaagaagattggaagaaagaagcattcgggaaatgttcatgatcttaagaatcgttacaaacacacatcacacttgaggattcggcgaatttatttatgagacgaatacacattgagagcacagttctacaaaaatgtggagatgatgcaggctcattcatattcaagcaatcaaaatcgtaccaccctcaacatcatccctcaaatggcaatcttttcttgatatcatgctgtcgatgctaccaaggtgaaaggcaatgctgactctaatgataaaattagctatcacatcatagaatatggatcataattaacgacgatagcgtcttcatatggttaacccgatgaaggaaagaggtaaaatgaactatcacattgatatgccatggggtggtagagctactgttgagcaaaattaacatgacgtgaagtagacgcagaccaaacttcatatcagtgcattctggtagaaccgatgagcgtataagataaatatcaaaaactgatgatgagctcgccatcgtcagaatcactcatggaggcgagtgatgggattcataaaaacatttatcttttcaatctgtaaaacattaacaagcttacatgacgctgtgagaaaaaggtgatactacaagtatccaacatgcttaaaaaccaaacggagcacaaagtatccaattggctaacgattgacctcaacatcttttatatttgtacaaagtgatatcatgtttttttagcactacttcttagccgtttaagcaactgattttcaagagtctataagtctatgtctctcaatacgtaccaatcatattattattgttgccaaagcacagcgacttcttcgcctgaatccgtgtcatggagtattgatacaaaacgatgatgtagctcaagacactgaaaagtctgggtcgaaaatagtacacgacctttgaaaagatggtaacagacggtcaaagct

SEQ ID NO: 1922 - DNA, 3111 bp, Xanthophyllomyces dendrorhous
ggtaacagacggtcaaagctgcagcacaaggaagatatgaagagtactagaataatggcactgtatggccaagagatgtcatggcaatatacgatgtcacatcacctctcaagtgactctcgataatgttttgtttgttgtcttgttggaccttgcatctagagagtgtgttacggccaagctttttccctaagtaatgtgaactgttcgcaaattgagtctttttcacgtaagcctacagagccaattcattgcggttgaacgaattttacatcatttgcttttgtagtggtactcggataaacatttcaaggaatgaaaaagctagaaagcctaatgtgaacaatggagtgaaaaccacgaaaatcatatctgacaaatttattcaagtgcagctagaaaagaagaacgttctgcatataatcatgttagcttattatgtcacactacttcgcacctcgagtgatgttcaatattgacaaaatattcacttgtgtgtatctagacccccaaacaattctaccgcaacaaagggttttgaaattttaaagaagatggaaatacctgatgcgaaccaatgtagatgattgcacctagggcaaacatgtttgacattttgaccaaaaacgtgcaacatatcaatcgacaatgtgtaatgttgttatgcaatttttcgagagcgccgaaatttgacaaacacgctttgatgtaagcaatatttatctttgtgagcatttaagtatcacttcacgttccaagaactttgattttcttcctttcataaaatttgtgtgtgcacaaaaaataaaaaaactagcggtgtcttacttttgtatcattgtcaaacaaattattttcttttttctcaaatgaactgtttgtacaaaatattttcatagacataatactgtggttcattgagtaaattccattgatgtttgtgttaaattaatatcaaacatagtgaaccaatattcaaaatcagagagtaaagctactaggatccatcacaaaggaaactctctgcctcgtgtatttaatttcatcacaatcatcattgactaaagaatgatttgtgaatcaacaaaaatccacctgatgcggtagattcaagaaataacatgccatgtaaaatagattcttgttccaagtatttctggcggtgcagacatgactattcttattcttatttacggcaacgaggtttgtctcaatctcagagtagtttaccaaatgctcgctgtatgataatatatcataacaacgccattttgatgtactccttacagtgagtctgatttgtacatactcctcttcctcttccatggtggtttacaattataacagagactgagcaatatatttgagaggcgcatcacctgatcacaacatctgcaagaatgaaattgacaaactttggagcgtcgttcgtgataattcaatttaagacttgtttttttatacacgcgttgttatttttgtggtctttgacataacttgagattgtcaaatgcaaatgctgacgtcaaacatgaggtgggcaacaaaagaattgattgtatacctttcactgtatcattcactgctttacatttgaagttcacccagcaaaagaaattgaacaatatatgcgattcaaataaacgaaaccctgaggtcatcacaggtattgtagacaatcaaagtgtataaaatcgtcagaaattgcttgaccataaagtgcataaatgttgacatcatgattgtttttcgatcacattcatagaatgatgacgaagagcaatatgataacaaaaattgcgatccacatgatttactcgtgttgatgaatctaatataaattcgcttgtaagaaggtgagtgtcgatcaaagagttttggcttgcaagctgcagggaccggccctgttcatgaagctgtgcagtggcagtgaatttggtaatgacaatataaatgacgatgcaatgattacagtactgtcggggtcactgatcaagattcagcatttgcacttcagcaactcacgatattcagtcacttgattcataacagcacatcgttgtttatttggaggcttcagacaatttgcaaagatgctcatttcatgcatctttcccaagactttcgcactgtatctcaatgtaagcagtaggagcaacctgctcattgtcattgcaagaaatactgagcaacgaaaactgtaaggatgatttttcaaaagaaaaccaagaaaggggtgatctgactacgcgataaatacaaaggataccaagcttcatatgaggataagtgaaggaagaattgatttaaggatggaggagaccatgatccatgatgccgattcaagcttgaaggcactagtctgaacaaatcaaacaatcaagtgagacatatatcctgagtcaaatgaatgatgaagagtgggccgaggtcagtggttatgcagttcagttgagatagaatgacgatctcagaagatcgaaatccctgaacataatggacaacaagatatgcaaacataacacgaaatatatagtctaaaaacgttaagaaaaagggcaatagaaatgataacaatgcttatatcgtcagtgaccatattgagagtactgcaaaatagagcattgggttgctgaatagcgtttgtttagatgagacgtatctaccggaccgggctgatttgtgtcgagttttcttttccttgttcaccttttctgtcatctttttcttctttcttagcatatactgatagtgttccgctggcgttggaattgttttattacaatttctcagcaatacgaaaccgtatctgctgttagattaagagcctgatttactctactgctacagatatatcttacgttgtgtagccagtgtggcccactgttgcagagccgtcgtatgtacagatctcaatcaagcttgttggcaaatacagtttcgtattgctaagaaatcaaaatgaaacagtctcagcaccaacggaacagttctggcaaatgctaaggaaggagaaacagaaaacaggaaagacaaagcaaaaaagaaaaagaggaggacggaaaagaagagaagtacgccagctgacagagtgcgctagctaaggcttag

SEQ ID NO: 1923 - DNA, 1946 bp, Xanthophyllomyces dendrorhous
  misc_feature (1609)..(1618): n is a, c, g, or t
  misc_feature (1698)..(1707): n is a, c, g, or t
aggctgtgtaattccaacaattacctgcgacgacccttgggacagagctttgtactctgatccccatgaggactttgttatggaagatatctttgtactcttccactggacgaatgacccaaacaaagtcctcatgggagttagagtacatagctctgtcccatgggtcgtcgcaggtaatatggataagagcgatcctccaacagctgggttacgacgtttctagtgtaatcgctagatcagataactccaaagagattcacgctttgttctgcaagatagaacaaatatattctaactcagcacacaaacagtcttttgttaatactgaggaagggaaaaagaaaaagaaaaagaaagagaaaagaaaacaaacgaaagtatcgagcgcacatatatgtgagagaacacaatgtgcttagatgagaagaaggataagaagagagaagctaagacgacactaagagaaacagccacgatggaagaagatagctgccaagatgtcgactgagacagaatgggttgaaagtggaagagaacgagtctaagaaatgattctgacataaagaaatccagaaggtaattcgaacagatagttcgagaaaaggattcgaacagataattccaacaataattccaacactcccactcatcgttgctgtttaaacaacgatgtgaagataagatgatgaaggaaaaacaagaaagaaaaggtaaaaagaggataagataaagaatgaagaaagaagatgattagataaaaaattgaaacaaattgaaatgaaataaaacgagatcaaccaggatgaaaagagataaactgaaatgaagaagattcgaacaaagatgaagcgtcaagaagtcgaaaggccgagatgtcaacatgtcgaataccaaaaacagtcgcgactcaaccaccatcttctacttcttgcttcacctctggggtcagctcacgagctcccactcgaccaccaagaccgcctttgtctctcagatactcgaacgtctctctcgagagtggcttggtgagtaagtctgccggcatgtcctttgtcttgacccatccgaggtcaaggatgccttgtctgtacatatccctcgcgtacttgtacgggacatcgatgtgtttcgtcttgttgtgtagctgaccgcttctgacactcgctatggctccttggttgccagtcttggcgacgatggtcggaacagaataaccgagctggtcgagaagcgaccggacccagacgacctgcgaggctccgttcgagagagctatgtattccgactcccaggacgacttggtgatggacggtatgcgcttgcttttccagtagaccagagctccaaacacatataacatgatcccaatgaatgactttcttgactccttgtcttcagcatagtccgagtcggtgtagagctcgattggcgagacggatggggaggacttgtggccgatggtgagtgtgaactaatgaattagggagctctttgttatatatcttctgattgcctaattctgattctaattgtattaaaacacctgattccctcaaactgattcctctgatcccttgattctctcaacaagaatacacacacacannnnnnnnnngtgagcaagttcattgagagaatcagaaaggagaagaaagaaaagaaaacaaactagctactgtatatacgagatcaccnnnnnnnnnnatggaaataaatcgagagagaagtgacataaagatgatgtagaaaaatagaaataatgtagagatgaaataaaatgttgaaggagaaagcaaagagatagaaagtcaaccaacgcgcaatactcgatgattgatgtctagactgctatatccaataaaaacctccaccgctatatccagactacagacgaaggaaagcctgtcatttcttgtcctgatacaaccgatcttgccgcgtac

SEQ ID NO: 1924 - DNA, 6732 bp, Xanthophyllomyces dendrorhous
  misc_feature (225)..(250): n is a, c, g, or t
  misc_feature (558)..(567): n is a, c, g, or t
tcacggtttgttctgcaagaaagaataaatatattctaactcagcacacaaacagtctttgtgtatactaatcatgatataaaataacaaacctgcaagatagaacaaatacattctaactccagaacacaagtaagctatcgatgaacacgatacaaaacaagagagaaagaaaacagaaaaatagatatggaccaacctcaacacacaaacagtctttgtgannnnnnnnnnnnnnnnnnnnnnnnnnaagaataaatatattctaactcagcacacaaacagtctttgtgtatactaatcatgatataaaataacaaacctgcaagatagaacaaatacattctaactccagaacacaagtaagctatcgatgaacacgatacaaaacaagagagaaagaaaacagaaaaatagatatggaccaacctcagcacacaaacagtctttgtgaatactgaggaagggaaaaagaaaaagaaaaagaaaggaaacgaaagtgtcgatcgcagatatatgtgagagaacacaacgtgcccaaatgagaagaaagataannnnnnnnnnagtgctgtagtagtagaacgctgtacttttaacacatgtttcaacatgttctgcaggatagaacaaatatattctaactcagcacacaaacagtcttttgtgaatacttatcatgatataaaataacaaacctgcaagatagaacaaatacattctaactccagaacacaagtaagctatcgatgaacacgatacaaaagaagagagaaagaaaacagaaaaatagatatggaccaacctcagcacacaaacagtctttgtgaatactgaggaagggaaaaagaaaaagaaaaagaaaggaaacgaaagtgtcgagcacagatatatgtgagagaacccaacgtgcttagatgagaagaaggataagaagaaagaagctaaaaaaaaacaaaagagacgataagagaaacaaccacgtgtcatgatctgacccggtttgatccgcgcagggtgaccttgcacaatgtagaccgattcttacaacagcctcttggtactgcttaactcgctcttggtacatcttaactctctcttggttatatcttgactcttccttgatatctcttcgctcttgcttagtatctcttcgctcttgcttgtgtttccttggtctaacatctcgaatgacatatataccatgtagtcgttagctatcccccctttctctcccaagcttggaacctcgttaactcctcatagttccggacaatcatcctcgcccttaacctcctgtcaatatctcattacccttccgagagcctgagcgcgctgagtgcatcccctactcagcctccttgcctgcgcccataacaccacgatggaagaagatatctgctaagatgtcgactgagacagaatgagttgaaggtgaaagaggacaagtctaagaaataattccgacacgatcaattctagaaggtaattccagaaggtcattcgagaagaggattcgaacgaatgtagaccagccacagcaagcaaacaaacagcatttgtgaacgctgaggagaggaaagagaacaagaggagcagaaaatgttgagcgctaagaaacatgtcaaagaacacaaggcagaatgcgactgtcaagatgagacgaaagataacaacaaaaataagaagagagaagctgagaggacagcgagagtaacggctacgatggaagaagatgtctaccaagatactgactgaatatcaactatctctataatcgcacgttggctaatatactcttgtctttcccctccgacttaagaatcattttttcgacaccatggattgacatgtatattagtattgtaaactagtgaaccacccttacttattggacgattaaaatgagcatgaggcgatatcaaaacctcatgtcaagatgtttatcttccttcttactttgttaaatttcgactatcatcaggtcatatattgcccgatattagtgtgggacccttttctttgagcttatcagaagataatgcaaattgtaagctaccgtatccgcagtgattgaattgtatcggcggatgccgagggaaggaagaagaatgaacagccgaagcatggggtagtatctctgaaaaagagaatgacaagcatattttgatccaacctgatcgagacacatcaagatatcttggtctcaagattgtttcatgtgagaacatgagcaatgaggacttcaaaaccaattgtgaaaaatcagaactgtaagggacgattatttgacatctgattgaaatatttcgcaacgtcactttctacgacattgacttgttgctcagattgaaagaaagaaaagaggccggatatcgaaattctgtagagagtgtctcttcgtcatttggagtagtttggtggaagagtggagctaagtattgggttcgtatcaggttagggtgcattttgttataacagtgggtagattcatgcaagctcatacaaaagataaagtacttctctcaatagccaatgtgtttggactaagactgtgttctgtggccttacacaccgaacgacgcagtgacgagaaaagtcaagagagatggaggatcaaaaggagatttgcatgtaagcaaattttgccatgaccgtatctataattataggtacatccgacttgatgatgttttcttggtgccacaacttggttgtcgctttggaagttattcaaaacgagtgagccaccattacgaatagagaggcttgaacgaaataagtcacctcagatcgaatgacatacgaagacattagtcaaatcgaacacatcaaacacattgttgacatatatttcagcgatctttgagttaattagagtctgcgacacgattattatgatagggctgcatcgtttgatcgatcagtttggaagctacctgacatacaagttaagacagatacttcctaaccagcgataataacagaagagacaacagcgaggctagaaaggaaaaatctgatatgggagacgccttgccacaggtgatatccgtcaatcgaggacctggtgatgagagtattctaagccttgaggtgccagaaagctatatctgactcatccagacggctagtcctacgtgttgattcaacaatcaagacgtatcctaacagaatatagacacgcccccgaaataaacccctgtcaacaaaaagtggagaaaccgagcatatgtaagcgaacatttgtcttctggttgacgactacaagtctgaaaagacatgtccttgatcattctcttgcccaaaccctacgccacagcttgtttttttttttcttttcaacctgagttatcaacatccttctacctccctgtctttctcctgcgaggtttgagtcacgatggagaggtcgtgaccaatggctcagaaaagacaaagagagaatgcagaaagtgcaaacgaggcaagcactatattcattggtgtcggctagtagtatttgtcaatccattataagacaggtctatcagcgaacgatctgatgagtcaactagtcatgacatgtggatatcttgcctcatgacgcagctatcgatcaataatcagcagaatgaacaagtcgatcaatcaagattgagcgagaggtgagagcaaaaaacctgaagcatgaagcaagaggtgacgtgttagaagaaagaaatgagacgaagagctgttcgaaagcgattcaagtgcaacatatacatggtttagatgcaacaaccaacattatccaactagtatatcagactttttcctggcctgctcatccacacgcggcattcccatcttacaatctcttgtgcctggaaagaaagtatgagacagtccggaaaataagaacgactatgttgaggtggatatgcgcgagcagattgaacaaaaaaaactatgttcaagttgaattgcgtttttgataacagacatgtcaagcaggcgagtttagaaggttaataacggttctcgttcgttggtaccacgaattaatttatagtcaaggccaaaatacacggatctggtcttcataaaaagttaagaagggagaaacaggagtgaagaagtggaggccccagagagaaaggcctgagggccatggtgatggtgatggttgagatgatctgtgatcaaagctggtggcctaacgggcagtcatcgtcaaccgaacgatcgacccgctccgacacgtaactagagaggctggccatgtcgccttctccggaacgcgacggcagatgacgcggttgatttctctatccgctcaacatccttaccacgcttgaacgacactcatccttcccgcttccacttctgctttcgtctgcttcccgtccagaccacatagaccttggccgactggcacatctggtgtcgttcatcttgcaccgacgacgacggactcaccgattgatccactttcttctacctcgcctgccttggctctactctgtttacacgcgtttatactggttcgcactcgaccacagccgtccacgattgtcccagcaccaacacatctatcaaccgactgccatgtcaccgacctctatcgagctgcatggattgaagcgggtggacgtccagaagctatgcaaggtccgtctctgctctgtctgtctctttttctctgtctcgctgtcgtactcatcatatgcttctttccctacttctggatcatctctttcttgtctctcatcacacagacactcggtatcaaaggagcaaaccagaagacagaggctcttatcggccttatccttcagcactacgcaaacagccagtcaaccacgagcgagggcgaacaagcaccgcctgcagaactctcttctgtggagagcggttcgtctggtgctgtaggagaaggcattgcctcagcgttcgtaccaacccctccctcccccctgtgttctttctcacttctcccgatcttctttctcccttctcctcccctttatttccctttcttttcttttcttttctgctcctttccgtttccccctcgtccattcactcttctgttctgtcagtcagtcgagatcgaccccgtctcatccagcctattgtcctttgatttctatgaccggtagaaagaccagctcgaacagcagcttgcatgtcagccggaacggcaagtcgaactccaggcttctccagccgactgcgagctctcgagcaaagaagatgacgaagcaaactatctctcagaagccatcgaccacctgtaacgctcggccaaagaaagaagccggccagcctgtcgaggccactctgccagaagaccaagaggaacccatgccggtcgaggctgaggctgatgagtatggggaagagcctgacgacagagcgaatggtgacgaagcgatggaggatcggaccgtgccgcccaaagcagctcggcctgacggtaagtctgaccaagaggtatctttcttttgctctttttctctttgtttgctcacttttctttccttgtcctcttttctttcttccctcgacggccgcttgtcgctgatatagttcttatcagtgaagacaagctggaaacagagatagcgacggtcgagcctacaccaagtccgagactgccgtcaacgtccgagcctgtcgagtcgatcgaaggtatgtctttgtctttaacctcttgctgtctttttcttttctttcttgtctcttttctttttttgtctcttttcttttcttttcttttttgttctgtttctccttttcttcccttcttctcttttctcttctctttttgccattccttgctattcatgctgttcactcatgcggccaaagtttgtgctttcaacctgtcccaatcgaactcgactaccctctagcagcgtcagcctgtgtatacacgcggtcatccctcgttcagccctcggatctgttgaccgatctcctgtccgtgcgtacctccttggccgaactcacagccagggttgatgacctgcccacacgagaagagaccgagctcaacaagcgatctgtctacgacgctctggcgtgcaccgatgccaccgtcgagttcattggcgcggagatcatggtctttgggcggatgtccagccgggccgaacggctgtctgtcaagaaggaggacatcgaggcgatggtcgaccagatggtcgagtcccgcctgaagctgatcgaacagtcttttgccagtcgactcaagacagtcgaggacaggctagaggctcggctgtgtcagtcccagacgtgcgcttctcagccggaagcaatgaaggtctctgacttgtcgcttgacctagagaggcagtcggagcaggttgagcaggttctgggcaaacgtgctagaaacacggtcgacatgtctgcgcctgtgtcttctaccttgaccggtggtaggtcttatcctgacaggcaagcttcaactcccacttcgtccggtttgtctgatcctgcactcccgactcccatcccctcttccgcggccttctccatgcctttctccacagcccgcatggatgcaaccggcctggatgatcaccggcagaaacggtcgagggtcgtcagcctggcagtcagcgagatggaggcgggcgatatcgaggatctgttggaagacgtatctggcgagcctagtgcggctagtgcggctagtgcggctagtgcggctagtgcggctagtgcggctagtgcggctagtgcggctagtgcggc

SEQ ID NO: 1925 - DNA, 834 bp, Xanthophyllomyces dendrorhous
ctagtgcggctagtgcggctgatgaggatgacgggcggccccttgcatctactaacgattcattgatcaagtctcccatcgactcttccgtcatcgcctccgctaccgttcctgccatcacctccactatcacctctgcctctctgacacctactggcgtttgccgtacgccattgcttatgacggcctgatcagctgccgagccagctagacctgtcatcccacttccttctgcctcccacctgggcttgactcagacgacgaatggcaacgaccggactccactcacaaacccacaggtgatcgtggctttcactcccgaccatgggccagtcaaccagcctggcgacaggttctcccatccgcctttctctccgtccgaccgccagacggtccagtctcttcttccgcctgtgcctgtcgacggacctttctggatgtctccgatggcaccgtctcggcagttgcaccggcctacgtctggatccaagcaggagacgcccaagcgggcaacaaagggagctgcccagaaggtggctgccccgttcacattgatccctacgggaacgcacaacatacagcttggaccaggccaagacaacgagatcgctccactgacgccgccaggaccgaagacgatgtttgggacggaaaaggagacgtttgggaggttgttcagcgatgagatgacgccgtggatgccgtgagcgacgtgagcatcatcactaggtcgctcgacaggattcacatcaagggtttcaattagatttctttccccccttttttgacaacctctctctcgtttttttttttcttttcttgttgtattgttga

SEQ ID NO: 1926 - DNA, 51636 bp, Xanthophyllomyces dendrorhous
ttttcttgttgtattgttgatctcgatccactgagctctatcagagcttatgtttgtttgtataatctctccgtcaatatcctgtttcttgactacattacattcatcaactactctctctcttcgtacttcgttcgcgctgcatttctaccttattcttacgtgacttggtcccgtctgtatattataatctgatatcataatccttacttgaaataccagaaagatgacaacgacgacgacgacatcattagatgcaaaacacacaagtacgttctttcaaacctgatggtgattatttgagctttcagctagagggatttcagtgaatcctcttttgctcaaccaaattcgtggaagaataagacgttaatggccgtctttttgaatcacgactttggaatattcactattcagatttaatcgccgtgccagtctaataaaacagtctttttactgtaaaagagttatgattgaattgtttttcaacaggcatgtcaaaacgtaaccatttccgttatcgcccggacgatattgtcccgtgctctgtcctccctgcatcggcattgacagggacggtggcatctgtacttgcctatcaattatttctcttggcttccatttgtttttgccgtgaatctccgaggattgtagtgatacatgatattggagatccatctgaacccatttgtagtatatgacaagacacgaaccaaacaaagagacggtttcaatcacgaaaacgagcgaaccagacatactcagacacattgagaatcgaccgagaggttaggataagaaaagtgcgagcaaagacgaggcgatcatcaagagacaacggcatttaccgccgggattggcaagagtcatttgcgagcccagttacgagatatcgggatcagccagccacttggttacagttcctcaatcgcccgggtccctttttgtacttttcttttctctccctctttttttctcctcctctctctttgcctctttactactcgtcgatttcctcttccacattctggtcttttccttctccccaccatctaggcaaaagaacaagtgttcttccggtatctgatcatgacttctagaattccctccaccatcactcgagcctcctctattttggctcgaagaggttttgcctccgtcgttcctcctccatcgaacgtgacggctcccattcaggccaaaaaacgaaacttcaggcagactttcggtcgggtcacccttggaacattgagtgctgctaccgcagctttcttggtcggtgagtgctttctcttcttattatcgtttccttatccgaagtctcttctctttcgaaagaaacatctataatggatgtcagggtcgcatagccctcctcggagatttttttttctttcttaccttttcttgatacatatatgtgttccttcgatgtcttcatcagctttttataccaactttgctaagcatcaatcttttgtcctccaaaacgtatttctctagcaacctaccttgacaacaaccccgccgagcagcttcctcaggatcctaagaaaaagaaccttgtcgtacttggtagtggatggggagctaccgctttcttgaagaaccttgatacggaggagtacaacgtcgtgcgtatctgccttttttggtttatctcaatcatgctctactaggtgggtattgtcttcgtatcttcattctgactcttccgtgtttcttccattcttttgaacggcaaacgaatcgatactgtgtaccctcagaccgtcatttctcctcacaattacttcttgtacactccccttcttccttccgtcacagtgggaaccctcgaggcgagatccatcatccagccaactaggttcatcactcgacacaagaagcgagcggtcaatgttattgaggctgaggctaaggaagttgatcctatcaacaagaccgtcacctttgagggttcgtatcattcatcttgatcgttttcctcagcaggtgcacaagcttatgtgaccgttgttcaaaaaatatcaaatccagacaactcggatatcaagggttccgtcgtctcgaccaccatcccttacgactacctcgtctatgctgttggatgcgataaccagacctttggtatcgccggtgtacccaaatatgcctgcttcttgaaggagttggctgatgccgacaaggtccgacagaagatcatggactgtgcgttcttccccctcttatgttcttctctttcttttaaatgtagacgagatccgacgctatgtgccacagacatcttacttacacgttgtcttacctggatctcacataccataggtgtcgagtctgcctctttccctggtcagtctgaggaggaaatcgaccgactgatgcatatggtcgttgtcggtggaggacctaccggtgttgagtatgcaggagagctgcacgacttcttgatcgacgacttgaagaagtggtatcctgaggttgccgaccgactgaagatcactttagttgaggcccttcccaacgttcttcctatgttctccaagaagctcatcgactacaccgagtcgaccttcaacgagaataagatcaacctgatgaccaagactatggtgaaggacgtccaagagaagcatattgttgtacaagacgccaataaggaaatcaaggagattccctatggattgattgtttgggccaccggaaacacctccagggccatcaccagaaacctgatgggtaagttccccgccgtccagaccgagcgacgaggacttgctgtcgatgacactttccagatgttgggagccgacggaatctacgccgttggtgatgtcgccgccacaaagtacgctcctaccgcccaggtcgcctcccaggagggtatcttccttgctaagaccttcaagcagttcgccaagaaggatgccgctgaggctgagcttctccgactcaagtccgatcctactgctacccctgccgccattgaggctcaggagaaggctctcgccaaggcatccaaaatccgacctttcaagtactcccaccagggttccttggcctatattggatctgagaaggctatcgccgatcttcctctctttggttctgagaacttgtcctcgttcggaggacaggccaccaacattttctggcgatccgcttacctttcccagttgtacagtttgcgatgcagagtgcttgtcggtatggactgggccaaggtgaagatcttcgggcgagacatctcccgagagtagttggtccgggcatcgaacaaccaaaattcaacaacgtttccgttctagaagtagttccgtcatcacatgtggtcatagttctatccccctttcttttgttttctttcttcttgagcttgggctttttctccttttttcttattgtattctttccgtcattgaggctcttttgtgtcttagtatggtcaatcatttctatatcttggttcgtaagttttgctaaaggaaacctaggttgttccgattgaacatttgtttgaaaaggctgcaaagagaaatccattgatgcctttggttgtcacaatacatgataggaaggcacaggagcgatgggtgcagaatcaggaatctgaggtggtacagtatcgaaagcgcagcagaaccacctacgaaataccaagctgtcttgcagtctcacactcacccagcggatttttctctttcttttttttctcttctctacaattagacagacgcatcaacattccgatcaactcacaaccacagcatctcacacttccttatctctagccagattacacctctttcactcctgtagaccaaatggcatcccatatccgacacagtatgtgattttcataagacccgatcgaaccccgaaacggagttgctcgtttttggcattccctgttggaacggccgagctgaatagcttatattcacgatttatcttctctatctctcattgtgtgtcagatggtgttcgtcatatgagcagtgctacaaagaccgtctcagctccaaatcccctagtcacacaggtgctccttcaccgacgaccgtttctgacacctcctaaacctgcccacatggacgccgtgtacgactacaatttcaagcttcgaaaagcactctcgtcccttttcccgacacatctgtacctcaagaaggggtcgatggcaatgaaacgatatacctatgaacaggctatggcggaacatgaggcctttggaacgcctattcctgaagacatcgaggtggtcgagaaggatgtagccgcccaggcgatccaacctagggatacactggaaaaggctgccgaatcgaggggtgaaaagagtttggacagaaaaggagagagaagtttgtacctggtcgtcaaaggaaaacaaggctggcggtttcctggaggagtggttgagtccaagcaggccggagaggggcaagagcagccatctagattggaccaggtatgtcgtgaaactctcttttccgtctcttccggtttttgttttccttgattctttcgttctggatttgcctacgagaagttcgatgaatcttatcgtctttctttttatgatcgatttcttcagatcgctcgcaaaacactccacgctcatcttggaccggacatgtctgtctggccagtgggtcgatttcctatagcgtacattccctctgattcttcggtttcgtcctcaaagacgtttgtgttcaagacacacatcctcgccggtcagccggccatctcggacgtcggatccaaagcgggcatccaggatttcgcctggttgacaaaggaagagattggcgagcgagctctgagtgaggggtcggaagagggaaagttgtggtggaacacagttggtgatttgttaaacgagtattaatcaactcggaatgagaaaacgtataaattaaatatttcaaactggagaactcaatggacacgctttgtgccttgatcgatatccttgcaggtagatggaagctcgcttagcacaaagacgagaataagcgatcgagtgaatgggaaacaatttaagcatgatacatctatagctcctatctttgtttcctgacgatatatatttacacccaaactggaccaacagaagagctgagagacccggaagagattcgaatgtgaagtattaagtcgacatggctgtaggctcgttggcttgtttctcgagttcggccctataattaccacgacagatcgaagaaatggcaagttgtaagcaggtatacattgagaggccgtgattgaggtcagtgaacacaattcgaatctcgagctgaagagtgcaacatacctaagctgcttgctgaagtcttcttcgacatcatcatcatcccaattgtcttcccaaagattcgaggtcgtggtcggtgccgagtcggacgaaccagtagtggacatgagatgagcgagggaggtttccgaaggattccagtctgacggttagaagaggtcgatcaaggcgggtacgaacaacgtataggtagttgacaggtaagtcaacgttagtaccgcatgaccgacctggaaggaaacgacagctgaacgtcatatctgagagaagaggtgaagctgagacataccctgttcggcaaactcctcaaactcgtcgtcttcctcgagggcgccaagctgaggaacgaccttgtttgtatcctgagatgaagcggaggtggtagctactccattggtagactcacttgtggaagcgggagcagacatcgatagttgattgagaagatgggacgaaacgatttgttgatagcggtagtagtagtagaagaagtagtagcagctatggtagtatagttggtggtagtgatgaatgagcgatgatggggatgagctggaagtgtcagaatcgattagagaaagttgtagtcgactttgtaataatgatcgatgttctctggtgacagaccacaagcgtaaccatcacccactccgaccttgcgcccatcctgtttctacaagcttgcatgtcctctgcgcgatcttctgtatcgatcaacgtgcatcttgatgtctcctctgctccatcctctatagaccaaaagagaaccagatttgattcaaccacttgctcagtctttgggctttgttggagacgcaggtatatcgttacgtacagcaggtagcgctggactcttaaagcggtgcaagatgtaaccggttgactgaccgttcacacagcccgcccaccgccctttgatctttgcgtttctctgttctctttggagttcagccttcttttgtcttgatctcgctcgcttcaacaaacgagaacgacatcatctttttgaaggtcccttctaggtcccgatcaagatcatacagagtggaagatcatcatgtccaggtttccagaggtaaggctcgaccgaatcgaattagtctgtgtaggcctgaatgtcaacaatcacaacaacaatgatgatgaaaatcataaagacttacggctcgatcaaaagcattgcatgcgtggtgatggcgctcacatcgtttcttcaatcagaaatcgcttgatatatagaactgacatttacttcttctcatgtttaggccgatgagggtcaataccagtaccagaaccagccgtatccctatccaagtgacacccgcccccccgtcgctccgtacccttcggcccagagttcacctccaaatcaggcatacggttaccaagtccatcagacccctccacccgttcatcaaggaggctatgcttcccctcctcctcaagcgatgtactataacgctcctacccctgggcctggttacacatctccgccgcctcctgaccctgcttcaagtccttactatggtcagccagcctaccagcagacaccaagttttggacaggtgtatcagcagtcgactacacctgcgctcagccaacagcatcaacagcaacaccagcagactatctatccgcctacgttctctgaacccaacagagtgacctctccagctgaacccaacagattagcctcacctaccactggccctcaaggagatcctttgcagaatgcatcttccttcggtggcccctattcctccatcaacctcacaggaacgcctcagccaatgccttctccaggagactatcctcctttggtcgattcatatcaagaggattggcacccgtctcgagctagttttgaagatgatgctgaacgactcctgccttcttcaggggttggcagatcagatagttcaaacaccattcccggctcatttgcagatctaggggatggtgaaaaccaggaggacaactaccactatggacctgtgccatctagagtacccaggagaaacaaaacggtcaaaagagtccagtatgtacaacaggtcgttgatgtatgtgtgagcgcgcacgcgctctaacccaaccggtcttgctgatcaactgtatcgcgcgcatctgcctcgtcatctctctctcaaagattattccgtggtcatctagtactggattgcccagtgccttctaagctgttagaccagtgcaagaacacgactgagcaggagttcaaaactatgcggtacaccgctgcgacttgcgaccctgacaatttcaagtgagtttcaattgaacacatcgtctgcgtacaggattcgcaggtgatctgatatattgtacactattctcttttgacagagcggatgggtatgcgctccgacaaaccctgtttgctgagcctcggaagacggagctcttcatcgtcctcacgcagtatgtcatcctatcttgcactaactttccatcacactgcgctcttgaatgaaagattgacttcaacccttttgtgatgtccagatacaatgagggtgacgaattattcctgcggacattacgtggagtcatgcagaacatagattacctgtgtactaaagataagagtaaaacatggaaccatgacggatggaagaaagtttgtccacttcaaaatatagacctgaatctgagtggatagcgtggaaagacttcaagatagtttggagtattgatccttcagtcttctctcttcaggtcgttgtttgtgtcgttagcgatgggcgagctaaaattcacccaaggaacttggcttgtattcaaaaatgttagtagtctctatagtattcaggaaaacagacaaaagacaagtttacaaagtctcgcaatctcactgcttcgtctattcatctgtcacgcccttagtgggatgttatcagcccggtcccgccaaaaacgtggtgaatggaaagctggtgacagctcatatatatgagtataccacccaattcagagtcaattcgaagctacagattgttccaggaaacgcagaatcagtacctgtccagatgctattgtgagttcatacttctacctgattcatcgaccaaatatatccacccaagcttggtatatataccatcactttgggtctgataaacaaacgacattccttcaaatacagcgttttgaaagagagaaatcagaaaaaattgaattctcatcgatgtaagtattcaagcgtatgatcgagaagcctcgagctaccagaactcaacaaaccttgtgtgatgttgtgttacctcattttcattagggttcttcaatgtacgtagctaccgtgatcacatagatcacctcgatgctcaagtagtatgtgatattgatcgtgtacatcttgaataatcaacaggccttcggacctgtgctttaccccaatgtgtgtgtgttgattgatgtgggaactcagcccggacctagagtgagtgctgttagcgtattcaaacaccaaaatctgctactgatagaaagctaaatcccattttcccttttcctctcacacctgcgttttcaaaatggttccacctctcagtctatctatcatctttggaagagtgagtttcaatcctcaccatatatcagttgtccttccagcctttcaagctgatcaccgtatatggttcatttctgtgcgctgtctcgtgcctgttatgcaggttttgatctaaattctgaagtcggaggtgcttgtggagagattgtagctcttaaaggtcgatattggtcgacgttgctcaaggtgagttcatgcaatggacgcctcgactacttggggagtatgtttaactcaacaggtgaccatggtctcttgacctttttcagaacccgctggtggccgctcaaaactttgagtgagtctaatactcatgtgagagaagagcatacacatatcttgcaaccatactaatcgtgtcatctggattgaaggtacaaaatgagcaacattttggacaagcctctcgaatcgatttttgggtttatttcagtgttgcctggagcgttctcggcctacaggtttgtcagaacgtcacaatttggaacagtgctctgtatctttccttaatgtccttacaatttcaccgttatcaattaggtacatcgccgtgcaaaacgatccaaggaccggggaaggagttcgtctgatctctctgatgcaatatagtcctaattcttaaatcgatctaacgcctgatgcgcttaccattgtctgaatacagcctttgcaaagtaagttgtgcctttaaccttactaccaacgtttggattgtactttatcatgtacaatcattttattttatttatttttctaagaatacttcctgggagaaacgttacacggagctgggtcagtcactactagaatcatcaaacctcatagtctctagcagctgatgtcccttttctttttttgggcttgaaacagagctggcattttcgacgccaatatgtgtgagcgtgacgatccaatagatatctgaactttagccaagactaaacagttgttttgcttctcacgcgttatatagatctggctgaagatcgaattctctgttgggaattagtctccaaacgtgattcttcttggcatttacactatgttaaatctgcctatggtgtcaccgagttcgtactgccctttagtattctgtatcatccgcgatgtatgcgctcacaccttgatatgtcgactcgatttgtaaagcgttccggatacggtatggcgttcttggttgatctgattttgtacattcttgataaccaaactgagcatcatctcgtcttccatctacaaatctagattcctgatctggtcagtcagcgtcgacgatggttaaacggatcattctttggtttgtcaagacaattttagcatctcgcccgtgatatcatgcaactggtagaattggaactcatcattagaccattttgatctcatctcctatcagcgagtttgcatgctacctggcatttttactatatttatcgaagcaaacatactgctattcggaagttcatgcttcatatcctcattggttaccaagccattcagttgatcttttcatggtttggtatcgtaagttgctatattgatcttccgaggttgccgccccgcactgaccttttactcctggggtcggtattgattcattagggaaactgtaagtgggttgtcgttcttgattgatgtcattcttgcattgatcgtatggatatgttttttcctcctcagacttcatcgcttttgtaagctcttttaattctcactcgacactaggatcaaatatcacattctgacctgtcttcgtatatgtctttgtagtatgttttgaccaagtacgtcagctatactcaggcagtgaaacatctgtctgttactgatattctctctcacgatagatcgatggagagctttacggctggtctcaagtggttaaatctaatcctaacttatgtctacagtggactcaccatgtgagtgcatcatagcatgattcaaaaaatttcatgtcctcatcgtgtcatattattattccatagcgcatgtttcctaatggctctgggaaatcgtccaaaagggtatgtagttcatggagtagaattgagccgatacagacagttggcctcaacatattgtggtttcgtacagatccaagttcggatactcgatagctttcgtcacctttgctatcagtgagttacctctatcagttatgttcctcgcatgttctattacaagtcgctcatgcatcaatttctgttcatccatagtaacggtatacatgacgtgcgtatacgctattgtaagatctttacagaagcatgagtcgacgatcgcactaacaatatcccctcgatcagattcgccgcattttatgttgccgtcaagagtattagcactatcgagtcggttgtcggaagtgtgacgattggtagtttattaagtgatggtacgcctgtgccgcttatcatactgtagagtggttgtgcgttgtcacagggattgatcgctgcctccatcgtcttgtagccgcgttcacacagatcatcttgtctctccttgcaacgttcggtatctatatattggccagtctgattgtaagtgtccgtatatcgtggtatgctattggcccgtcttgctgaatacaggtcaatctcttgttctgtttgaatagcattatgatccgtggcatatgggtgcgttaacatctctgattgcccagtatttttgctagaacataatggagactgaagatcgatgataatgcatttgcatcgttagtcacgagcttgatccagtaccttttgatctctccaagtttcatctcgggtaagttgccctcctttccacttcaatcaccactgtcttttcagtcgtaccactaatatgaaaccgcctctttccttttcctttctatagttatgaacgtatacggtatgagactttgtcgtccgtaatcaaaacttctagtgggcgtgtatactgatactctgaatatggtcgcgcatgaaagccttctgcaatacggttcgtatcacacaaaccatttgcgctatcaccgattgatgaactaactagccatttgtatattttgaatctcgtttcttcgcagcatgatgttgtaagtgatgagtcttgattctttggatcggttagcagtttgcataagcaatctgacgaattttctatcgtcttgcagagctggggaactaaaggacaagataaagtctcaacagaccttggagttgttacctctagcaaaggcgggggcaatcacgcggaagtcaacgttaccatagaagctcaagatcttaatgccgagtatcaggacgccagtacgttcacggagccacaactgcgactcgagatataacgaacgcaagctgatgactatttctgttccttggttcgacctcgaccatcattggatagttgtcgtgctttcttcgacacctcccaagattgtcgaagtgcctaatccagaagaacttcaagaaggtatacttgaccgcaaacgtacattcgtctttgtagtcactgaagatatctaacacatttcgtttcatcaaacatgacagactactataaggcttttagaacccggtttgtccatgttggcttttttttttaacgcctcaattccacagatcgactgattgatggaataaacattgtattctggttcccaaatcattgatcatatagagtgcgtttgatgttaaatgtcgtcgacaattctaaccgtatgcggttgagcttatttctttttgatctgctttgttttcgcatgtgtcagcttctcttggcctgggtcctctcgaacggattcttggtcgctattgttttgactgctacgagcacattcacgactaaggttacagaggctcatgctgtcgagcaaagcacttccatgtacctcgtcatcgtcttatatgtgttagtgatcttctctttcgttattcacgaggatgaaatccgaactgatgactgactcgtatatctaataatcaattctcacttgtcatatgccttgaatgtatagtgtggttgtactggcctgtaagttgcatcgcttttcagtttgatgactatagcgaacggcgaactcgttcacgcaatgcgagaccaagactaatatctctcttcgtatctaatcttcacttgaccctgctgtatagttttccgattcatgggatcatgtgcttacatcatagtgcggctgttcgttggagaatagcacagcttcgaacactctccctagccgtttcatgatcattgtatatgtatacctctcttcccttctccaatttaccacgttgttcaagataacgctcaagatattcttacataccatcgttcaaatactatttgatgtcgacctaggtcatctccttttttcatcatcttttgctcacgtcgttttatgtatctcatttcaatctgtttcgagaatatatcatgacctttttccatttatgagaagaaaagaattgcactcgagcttgttgagatgatatcgtgtcagcagatattatacagccttcgcgctgattcatgtcaacgtgtaatgggcagtgaactcgagaggagtctatatagcgggtgaatgctttctaaacaactccttagacgtcgtgtttacctcattaatagcttgtttgcggtgggtgatgcaaatttgacagctgtaaagaagcgcgctaacgccatcaagatgtgacaaaggaagaaggaaacttttacagggttctgagacaattgcccgcaacaaaccaacccaaaacaggacactcgaagaccaagagtaatcacttgaacagcgcttcctcctcttgcctcaaatctctttgtttccagacttcgaccactaattcccagatcatccagcacgccatccgctcatcctcgtcctcttgtcgactttgttgacgcaatctaaccgtgttcgatccctcttgatcggttgtgtaaagttcaagttgacgctcgatgacagcgagacaagctctggccagcgaccgtagatcagatatgctctcaccggaaagaagatgggcatctagtctggtgagtaggctgaatgaccaataggctaagatcggtggaatcgaaggactacaagtttgagggaggttggaaggagattcaatgatccatgaggttatgtgctttagaagatatattacggctttctacgcgtgttaggaaaggaacatcgaagagagaggcacgtcagaatggtccagaaccaggctcaacagggaagagaatgaaggggtcgcagctttacgctctgacgtacatcagacatggcttggagaattagcatagacggttccttcggtgaatgctttcctggatcgaaaggctctagctcatcttctggtacgttatccccaccctctatgtgatcgttaagctgttcctcctcattgtcgttctggtcgtctccttcgctgtcatcacaatgaaattgtctctcctccatatcttcatccagttgccaatcttccatatcgacactctcattcagagcagcctcttcgtcatcttgtatcagattggatacatcacgggacgtaggaatgaatgttgcttcggctttagctaaatcggccaatcgccgtcgtttggcgccgaagatgaacagggtccaagcagattcgtctgaggcttttggtaatattattgatggcttcttgcttggttcatgtgagagtgctagtaaattctgtcagatgatggaaggtaaatacaattttgccgttgcagaaggataggtcggagcaaacctcaaaacgtacttgccgcagatttgagaaatgaagcagaaatgacaatcgccatgcttcggatggcaagagaggatgtctaggtgatgctgacggtccaatcaatgtcggtgaagggactgattctttctgaaatgtatcgccacttggttcgagaaatgtagcagaggcgagagcatacggatttagcgccttggtgaaagtaggtaggcttgcttcctctgctctgtcaagacaaccagacgggatagtagcaggacgtattgatcgaacagaaaaatcgctagtcagatatcagacatatgctcattcccacagatacgactttgtgcaagcaaagatcagagttgagctacctcacgctgagtaaataaagctctgcttcgctcaagccaagaacgttaggatctgatgacctatcgacggcggacgttgaattaacggacgtcgagggaatatggaaaaatgctctgggttgatcattccctgagtttacgtttgaccctctcttcttatatggctttttgggttgagatatgttggacatgatgataatggcgagcgaaagcgatgatacagatagaagtcgaaacttgaggaagaacagtggatgatgacaacgaaggccgtagccatacctccaccttgagcgtagccaaggttacgtttcaacgtgtaaccaaagcctctcaaattattcagtaaattctcttcagctaactttccaaacggccttactttcctttcctatccctcatcccctctctcttgtttctttcgcccttttctttctctttcattcttgattagacaacatggtctccatcaggaagagtgagtcgcctttctgtgctctgtcgctgtagagaaatgcacgtttgaccattccctacgaatgaattacacctaacggttaatgtaccacagaaacctccaacagaggaaccacccaccagcgatccaagatcaagcaaaaggctgccgagacccgaaagaagaacaagaaggccgccaggaaggatgtcacctggaaatctagtcagtcgttgatcttacctttcctgacgtgtaatggtctgacttggatgcaaggcagcagtctgtaatcgatccgaaatcacatgctgatatcttcttgcgtttgttatagacaaaacgaaggatcctggaattcctaactcgttcccttacaaggatcagatcctagctgaagttgccgagcagcgccgtcaggtcagtcacattcttgtctcgttacttgtccctttctctgcattgagctcgggctgatcaccttgcctattcaacattgtgtcacataggctgaggaggagaagattcgcgcgaaggaggagagaaaggccgccaagcaggaggctgccgagcaggcagaggcagaagaggttgatcagcctggagtatccaagctatctggagatagggtactcgccttgcctcctaagactgttgctgctcctgtggaggaggaggatgagtcggcgcctctactcttcgatgcctcgattcctaccttgcaggccgcgctcgagcaggcagatgtgttgctcgaagtcgttgatgcgagagacccattaggattcagaagtccgtggttggaggagcagttcctgactgtagacgagggagacaaaaggaagcttcgggtggtggttgtgttaactaagattggtacgtctgaacgtacttgtactcaatgcgagtgatgaataaacaaccttgtatattgacgcgttcaatgtgtttcgtggctttgttcttggaatgactgttgtgtcaacagatctggctcccaaggaggctctcatccagtggttgaactacctccgacctcgtttcccgacagtccttttcaagtcttctattcctgcctcgcatgttccccttcctcgatcggagtctacagtggagccctcgctcgctccttccgagtccctcggacgagaagagctcatggagacccttcagtcgtgggctgaagccaaaagaaaactgaccaagaagggcgcagattcagaagaatttgtggttgccgttgctggtctacccaacgtacgttgcttcccgccggaactgtattcacattcatatcttcatcaattcttaacctgttctctctattcttgattttaatctcgtctgcgccacacaggttggaaagtcttcgatgttgaacactttgttgcaggttccggcctcatccttccccgtcgcaacctatcctcctaactcccttcagcacggcccaacgaccacgacccccacggccactacgtacaccttcccttctacctcctccaaaaagtctcctctcgagatcaagtttatcgatacccctggctggatctttgccgacgtcttccccggagacaatgaggattctgaagacgaggctgacgatgaggacgatgaaggagaagatcagggtgagacggaagaagaggccgctatgtgggacttgattgaggtcaaccgaatcaaggatctcctccgccgaaacatcggacgaatcgaaaagatcaaggagccgttcgccctggctgagtacctaatcactcactcgaacgccaatgacctcgttcttctctatggtacaccctcgtttttaccgaacgactcaacgtctttccttaccggtctcgctcgagtaaccggtcgaatgaagaagcatggtaccccggatctcgattctgctgccaaattgatccttcgagattgggcccttgggcagttcccccactattcgttacccccgaagaacttgacattagaacccaccgtaccggccaacctcgagtctatcaagctgttcacgaagagagaagaggatgtattggctcgattgcgaactcgaagagagtttatgagtgagaagggtggacgaggaatcgtcaagatggttttggacgagaccttcgagaaggagggaggtgatcaacgagagattgttctcgatgatgagattagggaggatgaggacgagagtgagggcgagggtgagtggagtgatgaggaagacgaattggatggcgatgaagatgaggttatgaaagaggatgagccggaagaggatgaagaggtaagtgctcatattactcctagagtttgttccgttctggtctctctatcgaccgccttcctaaccgccgaccggttttcacttttcctttttaaaggatgatgaagacccagccggaccgtccgccctggatgtccttctcgccgccaacccgtctctactcgggtcatcccgaccttcctccaagaaaagctccaagctaagcgctgcttcggtccccgttcctagcctcgccaaaccctctaaaaagacttctgctacaccggcttctgtatcatcgtcgtcgaagaacgcttctgctgctaaacgagttgtcttcgctgccgaggagaagggcaagactcccaacggagactctccaatgtctgtcggcaagggacctagatcgattctaaagactcaaccggcagctgttgagtctgctcctgccgttgtcgctgttgctgcttcaaagggagctgattcgtcggccaagggtaagaagcgtaaggctgctgccgcttctcaggaggaggacgtggtaaccgctccgtccaagaaggagaagagggaacaggccaaagccgccgcatccgttgagaagattgacaagaaggtgtccaaggttgcctcggctgctgctcccaaaacgactaaggcggctaaggctgcacccactcccgcggaggtcaagatggatacaaagagcaaggctgctgagagagcaaaagacggggaacagggttatgatttcaacaaattctttttctaaagctgggatcttcatcaaaaactagacagacgaagaacatatctagttgtcgtttattggcttatgccttagctcctgctcgtgtcagcgagtttctattgagggtcgtttcgaccaattttcacttgtaatcctttcttccctgattctaccatcatatatttcatggccatttcttgatgttgttgttctcgtaagaagcacgtgtcgaatcgcataaccatattagccatgaactcttgacagtctcacagagttgagacgaacagattcaggaattctccggatgttggaatgaggtatcaagcttatgagtatcacaaaaacctagaaattagggttattctgaccaagggcaaatccgtccgaagcggtatcggctgacagaacacgcagttgtggttcggctgatccgcccgaagtgtcatcaattttcggttttccttttttccctatctccagcagttgaaaacccaacactcactccctcaatcacttactcggcatacaacagctacctttgatatcaatcatcatgtccaacactttcaagattgcagtcattcctggagacggtattggtacgttctgaacactcgtttattcgccttttccttgcctcagtgaggatgatctcatcatgaaatttacatttcttccaattttttgcttttataaataatgtactttcgactttcttccgaaataatctcaatcgtatcttacacggttattctttcttcgtcttccaggtcctgaggtcgtcaagcaggctctccgagtcctctctacccttactgccaagactgatctcaagcttgagcttactgagtacgatttcggaggaatcgctatcgacaaccatggaacccctcttcctcaagagaccttggacgcctgtctcaaggccgatgcgattcttatgggtaagtttctcactgtgatcaacttgaatgccacttgatacttgaatgatgatactgactgccttgccgtatgttcccgtcccattcaggatctgttggaggacccaagtggggtgtaggacccgttcgaccggagcagggtcttttgaagcttcgaaaggagctcggcctctacgccaacatccgaccggctaactttgcctcagaaagcttactcaagcacagccctcttaagcctgaagttgctcagggctttgatatggtcgttgttcgagaggttagtcatgtgattctttacagctggtcttagtgtcgaatgatggtatcacgttttgtcagccaaaagtcgccggctaacatcttcctggttggaatttacagcttatcggaggtgtctacttcggagaccgacaggagaccgacgacaagggtgtcgcatgggacactaccctttactccatcccagaagtcgagcgaatcactcgagtggcctgccagattgcctcggccgagtctcccgcccttcccattcattcgatcgacaaggccaatgtgcttgctacttcccgactctggagaacgactgtgaccaaggtcgttgagaaggagttccctcatttgaagttggaccatcagctcgtcgattcggccgctatgatcatgatcagcaacccccgaaagctcaatggtgtcatccttacggagaacatgttcggagacatgtaagtctgtctgatcataattccggttcttcttccgttttgcccgatgataacttatgttcgatcctttttctctcagtctttccgacgagtcttccgtcattcccggatcccttggtcttctcccctctgcctcccttgctggtgtcccctcgctcgacaagacctgtttgggtctctacgagcctatccatggatctgctccggatatcgccggtcagaacatcgccaacccactgggaaccatcctttccgccgcgcttatgctcaagtactctcttggtcgaccgaaggaggccgagctcattgagactgctgtgagaaaggttttggactctaaggacgttggaggagaagatctcaggacacgagatcttggaggcgagagcggaacgaccgagatgggtgatcgagtcgttcaggtcttggagcgattgcttcagtaaacttgtctgctttgtttctgccgaactcaatatttatttcttctcccgcttctcgtttcctatttgcctcttctcgtccgtagagccgatgtgtttgtatcggataacccaacaaaagtagtaacaatcaatgtgctgtgtctcgtgaagtcgtatgtacagaatcaatcctcagagttttatatgagcgaactgtatatttggggaaattcgatattttattttattttatttttaccaagcattacgcgtccagattaactcacatagtatgttaataaaaaagaaaacaagaataagacaaacgacgcgtacgagcgatagatttaaccaccaacacgtcgtttccatatcctctaaagataccttcacattcaccgaccatcctctcttcgcttataggcgctacctttatatatctggtgagctcagtggcttctcaatctagcattttacagttctggctcaatattcttcttcatacatatatcagcaaccagatgtataccgcccaaccgctgccgtattatcctacgctctcttctcctcctacgacccaaccatccaactctgttccctctcaacgatcctctacagaatccacagctgatacatccttactctcagaactcacctcagatactgaagggggagctggagggaaaagttggggtcacctcgatctgagcttaggcttgggagccagtttgagacgtaacggatggacctctaacaacggagaccataaaggtcaatctagaccggaagaggtagaatctcctgaagatccgtaccaaataaatgcaaactggagcaattttgcggatgatcttatcgttgttgatgaagacgaaacagaagtcgaaggggagactgaacgccaagaagatgaaacggccaaccaacccagcacgtcctctcgccgattttcctcctcttttcgagactcaaggtttcaaggatcccatcagaccgacctattagtagacgttacccctccattctcctcttcgactcctccaccggcgtcttatcatccattcccgtcattgaaacccactcaatcgggaggagaggctatagggtcttcactaaggaatcctggtggtcgaccgtctcttcagacattactcaactctatagaggaccgaactctgcaactgcatcaagagtccatatctgggattaatcgaagctatcgatcctcctctcgtcctagccaacaccctgatacaaatcatgaaaccccccttgtcaaccatgttcgaccgaacgggttcgatgtcacagctagcgcgcctcgtgcgagctcggacgcggtgcagcggttgaaagaggctatgaaccgagcaagaagtacgagagaaagctctccggtacttcccaagcagtcttcgactcaacaaacgaaaaccgcccagaagagggaatcaagatctagagcagctgtggaaaattggctcgaagagacatcggctgaactctctcctccgcttcgatcaaactcacaagaagacgagccagctgaaatccttttccagtctccgtctcttcccccggctaaactcttacttgcatctcctcatgctcagacatctaaaagcttgcattcgacaacgtcttccggccggcggatgcacgcacatccatcattttcttcacgttcacctcgactcagcaaccaccatcctcattcattgagagaagttcccaaagaggaagatgaggtggctgaaaagctttcttctgcttcgtctgaacaagattccccacccacccctcctcctcgattattacctcacttttcgagacgttcgccttcttcattcgtggtcgcccctccttcttccccgccttcgcctcctccacggatcacgctccctcctccgtctgcatctctaaaaactctacacgatcaccgacagtcacctgagccacggtctgaatactcaacacctgcccgatctagtatgtcttcgttagtcgcgactcctgttctaaacaccccaccagtccgagatatccagacaccagctgcgccgacagagaggggacggacgccttatcagacgagggtcaacaggacggatagagatgtcacgagggctagaggtgaatccaaaacaggagggctggaaacagaacacggagcgcaggaagttaatcagcagacagagattagcctcgccgtgacaaagccttcaagtccttattcatttgacaaagcatccgcatcctcaatttcccaatcttcatcacatcagactcctctccaaagttcttccaaggcttcttcttcaaagtacatccctgtcgtctcgtctaaatctccgaggactcaattaaacgctgcttccaaagaaaaatctggatctctcacgtctgcctcaacctctcccgtttggcttcagtcttcgctcgcccctctacgtgatcagatttctccacgttggggtccatcgacgcctgttggtactccttcgaaaaaggttcagtttgaaccgaagacaccggctgctcccggtggttggggatggacaccttaccagcctaagatccgcagagacatcacgcgtacggagaacaaaggaaaggaaaggaatcaggctggagaccaaactggtcaggatcttgatgatcctaacaagggtgcagataaaggtgtcgaaaccaaagtgggattcaacgttgcttctgagaaagaagtcactttggtacatgatgcagtatcgcctgatcatgaggatgcgaagattgggacgacagaagtgacatcagatgaacgaactgaggacagactcgcgatcgtgggagagaagaagtcgaggaaggaagacagcttagcgacggaggttatcgtgagcgatgacggatctccagcggcccccaaacaggaggacgagcgagagcaacacggttcggaggaagttcatcccgatgccaagtttatctcttctgagattgaattccattccgtctctctctcaccgaccagaaatccatcttcccaagagtgcctttcttcacaggaccatcggtcatccattatctgttctacggctcctgccacacccccattagccaaattttctcaacattcatctcaaacgcctatttttcaatcattgtcacaaactcctactttcaagacacctgcagctccaggcgcatggggatggacaccctttcctttcaaaagacgaccttcgaccttggcgtctcaatctccagtggtttcatcatctttacctcaaacgtctccctcgccttccactcctcccaaagtgtcatgtagccctaggtcaccgtcccagataacggcctcatattccgctgatcaaaccggttctcctcttccgaagaagttggctttcggtccaccctcaactacgaatgcttcttctgtgacatctgctctatcgacggtgacaacgacggcctcgccctctcgacttcggattgctcatcttcgagcacagctgaataaggcggaggaggatgaaggtgccgctcggcgcagagtacaaagtgctcgaaaggattgggagagtgtcaagtggatcagaggcaaggctggagatatcggtcctagagaacccagagcgattagagctaaggttggaacatggacgattcttggatggtgcgccgtgattgcctgggtctgcttctcgtaggttttctactttcatttcccctttattgttgacatcaaatgttcgtagactgactcgctgtttcccgctccaatgctatgtctcatcagaatcgcacgatatgtctatgacggatacaacgaccctctgacctcttcgcctttccacccggccttatactcgcctcccgagtcttcttcgcccttgttcactgcctcaatggggcttccacccggcttgtctgcgtttgagatcccaggccaaatacaaactggatggaatttactgctgagagattggattgcagccgagtggcttaagctaaagtgaaggagatgacgaatttcgtaaagatatggagataatgaaggcgttcgatttctttgctttgttgctagcccattgggctgatcgtttcctctctttctttcttccctcatcataatcagaaccttaatatttctagtcgttgatatggtcgtgtatagtgacttgattcagctgtataatttcatagatcctgtcttgtcctgacgaagatgatgtcgtctttctttcatacttacttgtatttccgttttcccttcgcactcctgattatacattacatgtatctgttccacggtattcataaagtttttttttttgcttgggatcaaggatgaatcagaggtggtgacgctcttgagttggaaattcaagaaaatgggaagacacgaaaacacctgcgcgggaaggattcattcacgccgctgtcgacttctttccgtctacaacgccttcttgcaatcatctatttaggcttcacgactgacaacccactaaccactatcatcaaaatgtctgccaagtctcctcacgatcaccccaattccccaagatcgccttcgccacttcctcccccctccccgcagcggcttcccagtcgtagttcgagttcattgtcgcgttcaaacccaggcgcccatccacgtcctccgtcttctacgtctggtgcactctcttctcaatcatctcatgaagctggattcttaggccggccaatcccgctttctacttcatcgcactcagctacaactacgaatggcaccaaggctttgtctaggccaagaaaaagacgacgtacggctgaggaagaagaggttgcgcttggacactcactattgggaacgagctcagaaaagttgtatacgtttgacaagaagctgggtgaggggacgtttgggtaagtgcagcaccttattccaggtctttgaccacttcatgatccatcatgtgatggcaggaacaactgataatgaacacatcgtattgacgtctcatcgttgttttcaatcttctcaagcgaggtccacttggctatccacaaagagaccaaagctagagtcgctctgaagcgaatactggttcactccgaaacagatggagtgagcatcatcatgttaattctatctttgctttagatatgagctagagccgattcattttgtttatgctttaggttccgatcaccacgatccgggagatcaagcttcttaaacaattgtctcatgtgaacgtagtacccgttgtggacatggtacttactcaaggtgcgcctgctttgctgtctcgctctcaggttccccttaattgaggccaattttgtcaatatcgtgtgatcttgacaatttcaaccgttaggagatgaaacgaataacaatcgagggaagatctacatggtgtttccatatatggaccatgacctagcgggtttacttcagaaccctgaggttaccctgagccattcccacatcaaactatacgcccagcaactcttgacagggacagcgtatcttcatgccgtaagcctctctcctttgatgaaaagtaccttgatcagtacatacatatgctctttctcgaaacgttttgtacctcgaagctcaatctgacaatgcttcatgaaaatcttacattcttacgaatgaaacctgccttgacagaaccatatagttcatcgagacatgaagtcggccaacctgttgatcgacaatgaaggttgtcttaagatcgctgatttcggccttgcgcggacttatgacaagtccacatcgagaggaggcaataagatcatcggtggaagagactacaccaacatggttgtcacacggtggtaccgaccaccggagctgctgttaggttgcaagcagtatggacctagtatagatatgtggggtgttgggtacgtgacccttcttagtctaacggatgaaaccccgactttcgtctcgctcaaagtcataaattttcgtctcgttcaaaatgcgctatgttgaatatctgaaacagctgtgtaatagcagagatgtacagaaaacaccccattctccaaggaaacacggatccagaacagctggtagccatttatcagctttgcggaacaccctccgaagaagctttgcctggctttgatacttggggcggttgtgagggtcagttgatgttgcctcccatacctcttccgcgaagagttatacccgaattttcatcgtgagcttcatactagcatttcaacgagactatgttgtctgcttttggcacacgaccgatcactgatgtttcttgcaactggccattctgggcgacgacagattgagtaacgaacttgccagtctattggatggactactatgtatggacccagcaaaacggacatcagctaatgaagcccttgaacatcccttcttctgggtttcacctctacctgccaagctaggctcgtgagtcatctgcgttttacttttcagattagaaattactttaatagatttttcaatcctgtactgacacgacataatgatttagcctaccccactactcaccttcccacgagatgactcacaaaccaaaagctgcccctcgtccagttgtagcaatgcctcctacggcgagtggtcgtatacccgcgtttcaggcgactggtcaaccaagtttcatggtcccccctcccgcgccggcacctcccttcacctatgtaggcggtccccctcctccaagcgtcatcactaccggaccaacgctagcaaatcaaggttggtatccttcttctggacctaacgcccgaatcaatcccggaggcatggctagcgggaacaacctaaattggccgggaggcatgtatgcaggtggtcctccgcctatcaaggttcctcctacgcagatggcattccagtctcaaccttttcatcaaccgacttacaatcaatttcagacctcacagccagcccaagtatattctacgtctaatggccgaacaagctcttcttacccgaatcatcggtccgcggggtttccgcctttggcttcgacaacttcgaggccctaccaacagccagcgaattcttcatcatctgcggcatatcagatgccctacaagtcttctattcccactcatccaggtcatccgccagcgccgccgccaccacgtgcggctgcccatagatcaaacatcactgctagtagacctatgcccgcagggtttttcaagcctgtggctggaacgggcgataagggcagctattcgagctctactaatggatcgagcagtacgaaaggagtagagagcgagagagatagagaacgaaggatccgaaacgagaccccggctgggttaccatattgatgagccaccaatggaatgacgatatcttcaatatgcctcgtaaatgctaaatacaacgcgctgtgacaagattaggtatggctgagcgagcagaagtgtgatgacgtaatcacagactgcgtttttgtctgttatgcgctaaatgcacggactctaaacaggctaaggttgtcaggaaccagagttaggtaacatatacacgacagcgtgaccatgctcacattccattattcatcatgccttccatttcgttatgctccttctcctcaccttatgcgcttgataatccttctcagctacgttcccttgattagtgataggattagtgatatggattagtgatctgttgcttgataatctctagttgataatcctgtagtttagtaatcgagtggcaaccaggtggccacttcatcgtagctagaacacataaaaggatcgcgtgcgcgctccttcaagatgtggttcttcaagttaggatccttgttaaataacctagtagctaccagtgctattcaatcacgattcatcctctcttccctgagcctggaagcctaaacctccacgcctcgagcatccctagtcaactacagtcaccttgcgtaaccctgtaacccggccccttacaaaggttacctgtgagatagttattgagcccacccactctcttcttcgtccaccatctcgcctactacttatcttgatacacaccgaaagcactaaaacatgattccagctcagaaggtaagcctggatcagaataagcttggaaggttgaatcgacaaaatagagagcaaaagggatgctctgaggatcgtgagcagaagactgagcatcttcgttgaggattgttcctgaccggaaacggtctgagataaagtcctaggcagacgcctttagtcagtgaccagagctgacccttggtgtttcctattgtgtagaacaaagtagacctctcggtacgtttctctttgtatcttcttctccttggcaaccgtgaacgaatagattgactcgataagcaaactactgtttacacctttcagactttgaatgaggaggagaagaagcttttccagttgtacggaaagttaccctccaaaaagtcgaatcccctaagcaggatgcaggttcggtcttatctctgagtgccttctggacggataggaaaccaatcgattgactgacacactttcatgtttctgttgttcatctttttttgctcatgtcaatttcgaaactaggagaggaagtagtaagtcatgtgattcttacattttaacaggtgggtgtattccggattctggttgtcacgtacctgaccatgtgttttgtataaactttgtgattgtcatttagtttcgattccggagattatgccatgagtaaagcaggcacgatggcaggcaatccagtccaagttggaacggccattcctaaacctgaaacgtaagtttcccatatgatagattcctagacttaaagagctagactaaactgatgtctttgcctctcttggtctgtgccggcaaaacggagtagaatccctcacgcttcccctcccccatcgtcaggcagtgttcctactctgtcgagttcgccttcaaaggattctagtatggggagcatgggcagcatatttgaagggtaaatcttctccttgctcggttgttgaggtgtcacctatcaatagaatgatgctaacaagcttgaatctcattctaccgactcacagacaacatactcggcggctttcctcgtcgctatctaacgtttgagaattgagatcttgtatatatattcttcttcaaacacctctcgcctgcctcttcgacgcttcgagtcctcggctcttccccgtttagtgatctcttgcctatatatattcaattttacaattactgtgtttggtgatgccttgtcaacgatcactctgagcgacgtgtatatagttcgattcctatagccatggttatctcgagacatgtgtgtatatgttatcagaagacggagagatgtatgccagatcacgcctgggtggcgacgatcacgtgtctggagccggatgagagactgagagagttgggaaaaaatggctgacaaagagagcggcgacaaattctgagggttctgactggtcgcccctttttggggaatttgtagcgaggcctcctgcctttatcattctccaagctgccagcatttttagcaatactttcgctcctcttttctattcatcacagcatacaaagaagtatacagacgcactcataggccttcataacacaggatagaaaaaagatgtccctttcggcagacgaccttcctgttggactctcctcgtcctccacccttacctcctcctcttcgatcacgtcacctgttggaccgcagttggtcatcggttcactctcccttggagaagagtatcaacgaacgatcgccgagctcgaacggacaagtaagggatcaaacgaagttcagaagttcctggtcgataggattgtcgatggaggtaagtctcatctgaaaatcgactgaggttccttcttctggctgtgtctttcttagtatgagcgagagaaaattggacggcgggcggacggtaggcaggtcgggagatattcatgcacaccagacaggaaaagataatggagatatagagaagagcccgatggaagatatcaagttcccattcctctttgcttcgtcaaacgaacaagatggccgagagtgtatttcgagaacaagggacgaaacaagtgctgacttgttgctcttttccactctcacacaaacccttgaacagccgccatccttccttcgacgcactttgtcgaaattcacctggtactaccttcggagttcttgaatccccagctaccgccaacgcttcattctcagatcatctccgcacttgtaccaacgaccggccgattatatatccgcctgcctacgaccggccccaccgaacatactaccttgatcgagtcccttgtctcatctgggctgacatccgtcccatcgtcatcctcttcgtctgactctcatcttgtgttcgcaaagtcatccggcgaaacattgtcatcggcagcagccgcacagggaggagcgaggctcttgaagcgacccaaaaaccgggctcagaagagtgcaatttgggcattaagctcgggaacatcatcaccgacaggaagtggaacgattaccccgagcagtttgctcacagaggacgacttgaaacgaccggtgtgcgagctaccgacgggtgacaagggtgtcaagcgaaaggtttgtctcaagttcttcttcgcttatctcaaattgaaacagagatgaatatcgtcagactcacagagtattttttctcttcataaatatagagagcatgcaagggatgtacatgtggactggccgagctggaagaggaggaggaggaggaggaaaagaagaagacagtggccgctttagcgccggtactgaactttgacctgacggacgacgtgccggatgcgctgttggcgaaggccagctttggtatctcgaagccagtggcgtaagtggacatttgattaatcatctaatgcctgactctcttttactcgagtggtattcgtcaatcgttacttatcatcagggtacatgtctttgacctgctttcttgtagagcggaagagagggcaagactaaaggcagccgctgccgctgctcccaaagcgacgagctcttgtggaaactgttacttaggggatgcgttccgatgtggaggatgcccttatgcgggtaggtttattttcttgatcgtgttatatctcttgataatttttgccttttccagtatttatgatctgatcttccctgggttgcttgattggtgtttaggtcttcctgcgtttgagccaggacaacaggtcgtgttgggctcttttggagacgacgatgtctgaatatcataaagggtgattttctttttgaccagccagcccctctgatgtacatcttttctctcaatttctccacacgcattttcataatcctatgcatacgtatatacaatttccattgacatagggaaatagataacgccatgaagccctctatatctcctggcgtatcttgcttctattcaattccattctgtttgaccttggtcgtctgtacagcgagtccgagtcttagtcacagtcccttcgttctctgccttttttgtcacgtccgtgacccggagtttatctccatgtgtggtgtgtatatcctcttttaattttctacttggtctgatccaatgacataggtcggcttaaccacacttagctttgttcggtgcgagtagggtgaccgatagaggatcggacagatattacaatagagcccatcatttgaaacaccgttgttgttttatagagtttgctaaccgagtgacaaactgacgctcgtacgtttgtcgtccaaccggtacttcttcggctctgctctcttcctctttttttttcctctttcaccttcaactcccttcctcaacttatataatcctaggcggtcgttaatttatcttcctccaagctccattctctcctctccttattccttccactcgtatctcaacccggtcgtcctcttgtcaaacatgccctctcctacctcgctggtcctgctcgccttcctttcttccgccctagcagctccatcgattgtcgatcttcacaagctgttccctaggcaaagttcagatctcgctgtcggttctgatggttcgtccagctaggctaatagatcaagtttcttgcttgttttgtctctatgtctgtttggttcttcttaagcctcggtgcctatatcgggctcggccgagtgctgttttgaagaggaaaagacacgcgcgtctgccaagattcttatcgcgcatctttcttatatcctttcttcttttctatttggcatctttctcagcttggaaagcttcctatccctcagctcagtctactccgacggacattcctcaggcatggctcgacgctctcaacaccgccgtcgcagccggaaagatccctaatatcgtccccgccacaatgacgaatggatggccgtcctactcagatggatctgaccctagctctgccaagatttgtcattataccgtcggctgtgtagcatccaccgatagaatcaacgctcccgatggcatgatgggggtgtgtttttgttttcatttggcgagaaaggaacacatactgatctcttggcctgatcgatcttttgtaatctgcgctcttttaggtcgcccaagacgatgggcctctcgccccaggagtcgcgctcgtcgatttctacaacgagaagaacatctcgtctacccacttttacatcggttctaatgtcgtgtataatgttgatgttatgcaacacgtatgtacctatctattctcgacatcatgttgtcgtttacgatctcgcgggctcacaacctcgatgtacatcttattctctgtctgataggctatgactgtccctggtcagcactttgccgttcacacatggacccacccatacatgtcgtctctgacaaacgcgcaagttgttgccgaggtccgtattttctttttgcttcggttcacattctgtatatgggggcgtctgtgtctgacaacatcgtccgctttcctcttcctcaacctttagctcggatggacaatgaaggtcatcgctgacgtcaatggaggaaaaattccggcctggtggaggcccccttatggagatgttgataaccgggtgtgagcattgcttccaaatttcttcgtgccatgtctggctgatcgacttgggattttcctctatttcattcaattgtgacaagaaagacgtctctgatgctaagactatggattcatgttccctattgataagtcgagcaatcgcatccgaggtgtttggcttgacgacggtgatatggaaccaggacactgcagattggacgttgggaaccactggaaaagtcgctgatattacgagttcgtaaaatacctcatcgttcttctcattaaactcttctccttctgatctaacattgctgtacggtttacaaattctcactcacataacagacaacctccaaggcttcatcaatggagccaaatctcctggacttttgatcttggagcatgaactgtacaccggctgcgtcgagtaagtctgctttcttcaacttcgcttttgctctgatcgccaagctgatcgattctgagctttccatctcgtcagcgccttcaaatccgtctatccttccatggtgtctcagggctgggatatgcgaagcatcgttagtccaacttgagttttcctcgccgttcaatatttgctgacttgcgtgcatcgctaccatattcttagccggacctttggggagaaaactggtacaaaaatgccgttgacgagtcgtctgcgatctccaacgttggaattgttggttcgaccaatgtaactgcctcggcagccacatccgcctctgcatcttctgtcgcctctgcatcttctgccgcttcttctagctactccgcacaggcctctggaagcgtgtcatctacgagcgtatcatcaatgagtggtgtatcctcctccgttcgagcctcaagttcagcctcggctcgatctacttccgcgtcggcgttcgcatctgccagcgcggtttccagtacgtcaggagccacctttggtgtccggaccacactggggttgggagcggttgcattggtcgttttcattgcttctttggcttaaaacctgtctctcatcatgtcctatatatctctgatacctataatctatttgtactttgttactcaactatactaatccatcgctcctgtgtcactcttgacaaattaccttacttgttctgaactgaacaccttcactcttttattggacattcaatgtgctcttccactgcagactatagaaaaattctgtcaagaactcttttgtcatctcggatgacgcttagtttatacctcgaggcctctgcttctatctgccccttccgtgttttccttatttagcaatgacttgtctatatgatgtagataagataagatcaccttatataccatcatctggcgtgatcatctgaggtcggacttcactccgacagcgtacaacacgttctttcgtcatctgccgtgctgaatactctagtgtcgtcaacactttctatcggaagagttgccgagagagatcaagattgaaggagaagaaggatgggatggattcggacaaaaaaccctttaaaacaaaaccatcaacaacaaagcattcagtcctctcatccccacttttgaaagcacccattcacaccctctcacgtttgtatcaaatgtccgacaagaagaagcctaattttctcatcatcgtcgttagtcatgttctttttacatcctagacaacatgtctgtacatttcgtagtgcttaaacttcggcatgtgttcttcctctgtcttcatccaggctgatgatcttggattctcagatatcggagcgttcggaggagaggtcagagactgattcacctcacggattgataatacaaagtgctcttgttgatgtcgaaaactccattcttggtttctcttctttgcgtctcggctggatggatttgatcccagacagatctcgactccgaatttggacaggcttgcgaaagaaggtgctcggctgacggatttccatacggccagcgcatgtagtcccacgagatcaatgctcttatctggtctgtctcttaggcgctgcttcgctcaatctggttattcaaaaggaataacttctaatgttggacgcgcgatttctttattgggataaatcactgaaacggaatgggatacaggaacggataatcacttggccgggcttgggcagatggcagagactaaagaaagaaactctgctttcaaaggtagacgcgtattttcgtctctcgatgaaccatccatgatcattcaatagtcctaatgttgctctttatcttgggtatgctttgccccatttttaacccgataggtaaacctggatatgaaggcgtattgaatgaccgagttgcgccacttcctgctatcttgaaagatcttgctggctgtatgtgtctccatcactatctgaagaatctagagagcatgattagtcgcattagactaaacagatttttctatatcactaatcaagactcaactcacatgagtggcaaatggcatctgggacttactcctgacgcttggccgtccgctagagggttcgatacggtcttttcgctccttcccggagcaggcaatcactgtgagattacacaagaccttactgacgaatggtaattattgctatgaggagttgactgctgatttgacatcggattcttattaactagacgcgtatgagccagctcatgtcgctggagaagccacgtatgaaccaatccttccttatgttgcacgtcaatgaattacacacttatctatccatctttctgtttacgaacgacacaactaataacttaggccgttgaagttcatgccttctctgtatgttgagaatgatcgtcctctgcctatcgatcagcttccggaaaacttttactctacagaggtgagttatccctcagtcttgccctgatataagattgatctgtctgtgaagctatcgtgaaggcagtttctcaaacagtatcgctgacgttcttcctttggaaatcaagactttcacatctaaacttctcgaacaactgtcgagccggactgaagctcaaccattcttcgcgtacctagcatacactgcgccgcactgttcgtatcagctctttatgtttgagtacatgagattaatcaagttctatctcaaaatgatgtttcactcttctccaagggccgctccaagctcccaaagaatacatcgaaagatataaagggaagtatgatgaaggcccttatgcgcttagggattctcgcctagagaagctcaaagagctaggtcttgcacccaaagatgttaggcctcatccacaggtcaacatcgtggctggaaacccgtggagaagtcttacagaagaagagaggaggatctctagcaagggaatggagatctatgctgctgttcgccctctcttgtttttttcctatggacttgcagtgcgatcgatgagcagcgctaatgaagtgtttccctctcacgatagatggtcgagtttatggatgaacagattggacgtgtcttcaaatacttagaagagacaggtctgtcctgtcggtcgttgtttgctctatgggataccacgactcacaagtttcttttctctcaccaggcgaattggataacacatttggtagctcccacttcatcttccttcattctagtttcagggatgtatcgctaagtaaagtgcggctactctctttccttttagtgttcttctcttcggataatggtgctgagggggcccttctcggtgagctcgatcaacttcattcactatgatcgatcatttgggctaactcatgtcgattttccttcgttttgtgcagaggccatcccggtaatgggagaccaactgtccaaagtcatcgcccgtcactacgacaactcaatcgacaatattggggaaggaaactcattcatttggtttgtcttttttttagcttcataaatatgctgtcattcatttcaattttcaccgtggcttttatcacgttataggtacggaccagagttagtcttttctgttacttgatataacaaccgacaaacaacctaaccgcgatgttatgttatgcagatgggcgcaagctgcaacggctccttctgccatgttcaaaggtatgctcaagctcaacgattgaactaaatgatcaaccattctaatcttttgttgttcagcttggatcactgagggaggcatcagatgtcctggtacgctccctcttccatatttcttattcggaacttcccatggattgacctttcacatgatcaacttgattcgatgcagccatcgtcaagtatccttccttccataccgatcgacaggcaggtgtaatagcagatacttttaccaccgtcatggacattttgcctactgtgcttgatctagccggtactcaacaccctgcgcctgagtttcaaggaaggaaggcgagtctcttgcttatattcaagaccgttaacatttattttgaattcctaagctaacattttttgatacattttctctcgttccaggttctaacccctcgaggaaaatcttgggtgccttatttcgccaatcagtctgaacgagttcatgcagaggatcacgttcatgggtgggagctggttagttcagctcttatccctcttgaatttcaggctcttcgctaaagagaacactacttgaatcttatgttcctttcatttcctcggatgagtatatcagtttgggcagcaggcgatccgtcgaggacattggaaagcgttgttcctgcctcctccgagtggaaccgataaatggacactgtttaacctagcgtcagatccaggagagacgtaagttcctcttatatttctgattctcgttcttcgatcagcttttttggccgcctagatatgaaagttgttttatatgtatcaaaaatcgaacgaaaccaaaaatacggaaacaacagtgaggatctagccgagaaagaaccagagattcttaagcaaatgatcgcgcactgggtggaatacgaagccgagacaggaacagtaagcatcaaccagttcaacctgtatttcaagaaacatgatagttcaaactgactccacaaattatgttgtgaattattgaattaaactggaacagattcttcttcgccctgaagagtggcaaccaggatacctaccacaagcttgggagtaaagtcggacagtggaaggattggtggtaaagatctgggcgaatacgagaagaaagagaaactgtgattgttgtagtgatatccaatgtgtatcttctgtcgttttacttcaggtattgttatttcaccaattcaataattattttcattattcttgaatggaggagctagagaacccagtgaccgtgtccagcacagatgacctagctgcatctaactcatcaccctcttcgatttgccacaaccatcgctggtaagggacccgaccgcctattcctgaccctaatgcggcggccacagcagccatgcctgctcgcgcgctagctcgcatcatccggccgtcccgacctcggccatatctatatcattcaaaatgaattcacaagcgtaaacgttgatttgaatgatcaataagttggagccgatagcttcagaatgaagagtcttgagcactaagactcaccctagggtctcttggatctcatccgacttagcaagaagatcgtctatatgaaccatgtactgaatgtatggaacatagtcgatgatcagcgctttcgaaggaagtaagggcgccggtggaaagatgatcgactcaaggaaagtgagaagttgatcaaggtgattcaatctagagccgagatatatgtatatgagcaaaccaattgtcacgatgttagctctgtcatgcatagaagatcatgtagaagtcacgatggtgattcagaaaacgagaacgaacctgtctttctccagccttggccatcgatcaccagcagcactcgtcaatcgctctaactcctgactttctgtacctgtagtttgattcaacgcatgctgttcgatccaacgcgccatttctccttccatacccacttcagacagacgcacttctatcgggtctgctggctctttcgcaaccaagctatacccaacttcgtcatctgccgaagtgccatatcggtcgatttctagacgatctatcagcgtcgaagccctccagtcgacatgagcgtccataaaagattttgaatccattatcgaagcggatatattgagtatatccgtagaagatgctgagcgattcttcgatgttgatgtggagcctacaaataccgcactctgctctgagaaaaaagggttgtgttctgcacataagagattttcgctttgagttgtcggatctgacctggtaatttgaagagtgttgatagaccggcgtaggtctgtggtgtcctgaggttgactaggagcagggtggccgacaacgtccactagtccaggcgcgagtgttcgatggccgtgtgaagtgtacagcctagacacatattgtgaggaaagttcagaacgttggtatttggcaatctgttcaaggtagggtatcgataaatatgatggcggcgaaagatacactaaggtcgtttggagaggaagttctgagagcgggattgtactcgtatcttttaccaaatcgatcatttagcggttagaacaaatgcgaaagagcacaaccaaccaactgtcggaagacgagacggatggaaaaactcaccattacaggtcattactactggtcttctagactctgagatcaatgcgatcacggccgcccagaatcctttatcttcttcgtatagaacatccacctcctccagcaagatcatcgattgcctgaccttcccgcttgaacttccaccttgcacatcgactatgtcctcagccaattttttctgggacgaaacaaattcaaatttagcatcaggtcgagcagcgtcttccgtgaggtcgacgacggcctgactcgatttagaccccaatggacgttggggaatatctataccgctcgccgctcgttgcctgttggagtcaagcatcataaatgacagggcgttttcactcgacagatccggttttgatttgactttcgatgttcctttctttgtcgacaaagaagacccgattgggacatcagaagcgattggggccaaattactgcccgtccctccacgagctaccaagtgatttcttcctactcctccaaccatctctactaatgccagtccggaccgcttaccggctcctggattgacttcgaatacatcccagtcaagttcggttgcgcacgcatagatagaggaggttttccctgatccaggcggtccgacgagaagtatcgagtttgagagcgcttgatcagctgacaatcgagggtacgacggggggtacgtgtgagatcgagtcagaagaacatcagtaggttcagtaggtagcggttggtcgatcgagtccgcagccaagggtaccgtatcgagaaggttgtgggtgttgggctcggatttgatcatatctctttcatggtccagagcgccgatatcatcgtcatctacaatccagtcagtctctccatctcctttcttgaaccttttcttcctcgacttgtctacctttctaacgatctctcttttcttcctactatcaggtcgggaggtgtcgtaagagctaccagcagtggatgcagagtttgtagaggatgaaggcctttgggaagcaatcttgacttcgagcgccatcagccagtcacggaggtacgtggcttcaacctcatttcctaaaacctgagaggctgatctaggtcggaatttgtcgttccatagttcggaagacaatttaaaagatgtgtctaagggtaaagtagattcaaatctggagaaggctggatggcggagtatgaagggaaatattgatccttgtgtggaaggatttgagtcaagtgataactctttgttgttaggcttagatatacaatcctgccaaaaacgactagactcctttgaagtccatctgtcttgtgtgctgatatcctcagccgaacgtgacctgttcctccagatgaacccagcggcgctaggtagattcttgctcatcggtgggacaagtccacagtgagcttcctcactggatgacgcccatctagcctcgaccggctgctggtcggctattttatctttttggttcttaacgctagttgtagaagctccattggatttgaaacgtggagcgaaaaatgcgtgcgccattctgggcgagggtcggttgggcgatttggagaggtcaacgtgatcgacaggtattgtaggtagagcatctagatctatggctagttcggccgaagaccctccttcatttgaggctaagtcgtataaaagcagttgacggcccacaagtttgagcgcaaatgatcacgaaagattgtactgtatgagcaaccttggtatcgacaagaaacatatagggcagatagtgtagctcgatatgaaagacgaaaacaaatgccaacaaggcagacacttaccagcatccacacgcaaggtacccttcctggccactctacctcctttctcctttctagcaggacctgcagaccttctcccatccgtcgggccgaagtcgaccaattcaagaacatcatcatcctcacgagtcgctttcggcttcgtttttcctctcgttcgcctcttcgagctttccccaggcgagctgctgaggttgctcccttgtttggtgtccgagcttggttcctgtacggccgctggttggaatcctaagcctcccccatgttttccaaaggaaattacggcttgtttgggatcaactatcagctttgacttcctcttctttgtagtagttgaaatagccgagttagtttcagcggaatttggtgtagagacaggaatgattggagtcggcggtgcagatactgagtcaaaagttgatggattaacggtaggtacggtcgaaggatcatgctgaccggacgacgatgaaggagcctcctgggctgaagccgccgtggcaggagctcgaaacaagggatggacaagaccgctttttgtaggctccaccatagaatgttttgacagatgttgatactcaagcttgaacgaagaatgaatgcccttccctttctgtacgatcaaggaatagacgaaagaggacgggaggtcgctcaaatcgatcggagatggtgtcgatctgacgcgtcgacgcgtcatttccatctttgccttctcgcgtgtttcgttaacagtatgttcgttcattcatctagatcttcttctacaagaacgatctcgttgtccccttttttgttctttttcattaatccgaatggtccacatgtaatacagatttctgatcctcttcttttagagctcatcatgagcggcaccctgtttgcgctcattagctagatcttccaacttttgcctatcgaactcctcaaacgaaggcatctcacttgacccagccccacccatagatcggagaagctgctccaattcatcctgctctgacactccgctcgcagattcgggttctgatcccaacggtgtttgctcgacctcaggcgcaggcttgatctcgggcgtctcggtctttgcagagggggagactccaatggatcttcgaagaagcgcctcgactcgggagaagaacctaaggaagggatggcgcgaaatcacttctcagcctgatacaaacctactttaattgagacgtgagccgggaaaacacgacgtacaaatgcatatcaggcactgtgaaaccagatcggaccatcgtgagatccaacaacgttccgaccgtctccttcaattcggcctgtgctttgctatctccctcggccccaacggcctcttcaagcaggccttggatcaggggtgaatgagggttgatttcgagcacccggggttgagatcgcatgaattttagcatagggtcctcatcaccttgagcctgggacgccatgagctgttcagattcccgagtaatgggttcagtgaccggccgtgatgctggattgacgaagaaagacgaaagtctggactcactctgatcatgttggcggacataccagcgtcgtcagacacaatggcggtgggagatgtaacgagtcgctgagagataatgactagtgatgaggaatacagaattggtttcaggaatgctgagcgcagaggtcttttgctagaaggatgatctagcaaggatacgcaccatcgctgatgaccttgccaaaggtctttttgatgaagtctgaaagaggagtgaatctctccttgatttcgacctgggattctttctcgtcttcatcgtctaggtctgtcaatgcaggttgaaaaaaaaagtcatgagaatcatcgaccttctctcacagacaaagccgaaaagatgatgtacacataccttcatcgccgaatttaagtcctttcttggtcacatcctggaaggttaacgatctgaatatgaaaagaaaacaaagacagccccgtttgagtcagttgtcttccctgaaaaaaaaacaattaaaaagaaacacaggagagacccactcgtagttccggagctgagacagacagatctcatccatcggctcatttaataacaagacttcatatcctctagcgtgaagcttttccacaaaaggcgatctagcaaggtcagaagtcggctggccgacacctgccaagaaatagatctgtttctggccggctcgtcgtctggaagcatactgtcgtcatcagaaaacccagtcaagtttttgttctcacatgtgtcagcttatctttccttgaccttcgagcgctgtgatacatgtctattgacaagaaagaagagagaaacacactcacatcttccaggctagtgaactcattcaagttgctatcaaacctaagtaacttggccaatctgactcgatcggtgtaggtctccgtcacaccggccttgagagcattaccaaccaggccaaaaagcttcttgtacttctcagggtcagaggtggaaagcttggtgaacatatcgagagctttcttgatgagatgacgttgctgccaaggtgatttgtaaatggaattgtaatatgaatatcagacattagcgcaaaccggttatataacaactaccgacatgaatctgcctttacttacaagttggttgatgaatttagaatttgtgagagtatctcgagagacggtaaggctattagaaaggtaatacattaggcagcattcagaatgatttctattttatttcatcttacaaaactggaacgaacggaaggtcatcggctatatgaaagagcagacgcattgagagagcagttaattccggattcagatgaagcatttaatttggagccgaacagtgcacttaccatctacaacaaccttcaagaagctcaaccatcgtgggctatgggagaaatatggatcacgagacagcggagattaattgaatgcacgctgaaagaacacaaaatcaacaagagagatagatacatgaagtggtctcctagatcatccgtgataaatactcgtttgaccatcattcgtacgttcttcacgccctgttcggccttggtccagaagtcctgagaaagagctgagggaacaaagatgatactcttgaaattgatgcctgcaaagtcagccctgttgtcgtaaaaagaaattgattagaaacttgtagaggaacaaagataggaatgagaaatcaaccatcactcacttgaaatgagaccaggccaaaggaccttcagtatccttgctaagtgctcgataaaatgcgtcgtactcttgatcctcaatcgtcttcggatctctgacccaaatgggctcggccgtgttcaattgctcgaaagcgacttcctcaacctcctccgtctggggctcatcgtccgggagaacatcctcgatagaggccgcgtcatctgccaacttggaagtcgatttgggggactgaagcggggagagcggacgggtgattgttcgggtcgtttgaagataaatgggaaaggaggtcgcaaaactagaatgggtttcactgggtgcgtagaagagggaagaaggagaaagggaggagagaaaggtgtgcgatcagaacagtgctcgtctgacatctgacgtcctaaatatatttgacttacacaatttctcggattttgttctcttcgagccattctccttctccctctcgaagaaccatgacgatttcagttcctcgctcgcctaaagtattccctctggggtcctcatacactttgaagctggtgccatcagcatcggattcaaaaatgtgctgaacggggtgagggttcgaagcggtcggtggcgggagagacgagactcggacagaggacgcaatcaagaaggtagagtagaagccaagaccgaattgacctgttcagaacgattgttgagatattgagtaatcctctttggccaaaaaaatgagctaattaatctgtgaatcaacgctcaccgatgagatttccgtccggcttgccattggaatcttcggcgctcgacaagaactctgaagttccagacttggcgatagttcctaaatttctttgaagctcctcaggggtcattccaataccggtatctggttgaggcaagaaatagaatgaggttgcaagaatgaaatctgagatcaacgaaccgcttgcgcaataaatgttttccgaacaacttaccatggataataagtcggccaactcctccagactctgacttgtctggctctgctcgaatagtgacattgagttctcccaggccctggttaggtatgatccagtccgttcaacagggcaaattgtcaattattggggctttgaacttgataaacaatcaaaatcacggttgcagaacgaacgatggtgacgtgctgatccttcagcgaggtgattcgaagtttctccaatgcatcgtttgcattggagatgagctctcgaaggaagattgatttcgatccgtatctgtgcgcgcgtcaggtttttcttaacatcagcatttggcgcgttgatgatttcatcctctacttctttgatagattaacacttacaaagagttgaccacgatactgaagatgagagaacagatttagtttttgatcagcatgtatgtagagcttcccgccctgattatgcgattagaagcgcttaccttctcagtctagagacatcagactacagggtttgagagaaggtgtacatgttagttgacgaatgtgctaggagaactcgaagggatcttagcccgacggacctggtactcgaatgtagtttgagcatcagacgaggcgtcagctagaacgatggcgagtgtgggtagtattgctaggagaggagcgaggagcctcatctttgtgagccttgtgtgtcaaaacgagcgggtcaatcaaaagccttgctgaatgagatggagatctcttgggcaaggaaacaaaagtcgacgtggcaaaaaccagaggagaattcaaaacagctgatgtaataaatcagatatcaatcaaaataataaataagtgatatatccgaagatgtagatagatcaagcatgtgacctgagtgttacttgtctgtgatcgaccactggtaggccgtttcacgtcctccgtcccttctccgcttcttctactctgccaacgtattgagttgcaagtataatcgttctgcgtatgtgttttcagcgcattctatggtctagttttttgttcagcatcgttagagtctgaggactatatatataagacaagctccctctgccacccataacgtagtctcccaagactggttcctttgttgatctcctgttatcattgtacaagagtacgatgtcaattctattcctcaaccttacgtgaatttttgtctcgtcgtgtcgttcatggatactcctgcaagggtctaaacttttctcttgcccaactacattccgcgcttggttgctcccatcgtaacatagctgtggctatcccagccctggatcccaatcagacattgttagggtggaagttgggctggcaaccgaagtcttacaagtgaaataaccacaaaaggggtttcaggtttccagggacgaattcaggcttttggaacatggaaacgagattgatagtatcactagggagcaaggacagagggacggggaaggataggaataaatagtaacaaagaatccaggcttcgccttcgtatctgaaagtgatcgagactgcctgtcttatatatggttctcagaccctatgagcaccgtatagaatgagcgcgcgatatgagacgcggaaacacgatacctgggaaacagaaggaggagtagtagaaacaaaggcttcatgggtcacggcctacgaaccaagtgtgattcaagccataaccctaacaaacactgcccgggttcatactatgatacacgtgttatcattacataagctaccgatgacttctgacttttttgttcgttcagcccacgtgatgcctatctctacttggcaaaatgctgaaacaacagcccctcgggtttactcggccgatgtcggagagaagattcttgataagaagccgccgggttggtccgctataacacatagctgccctctctgaatgcggactcggctcctctattatcgccgtcttttttctctctttttccttgtccttctcgagaaagtcaagaagatttttgtctatcatttttattgatctactttttcttgtgttctttcctctttctctttcttcctctttctctcatcgaccataatcgacactccctcagcatattcactcaccaacctacagtcttttcaaaactcacagctatgcctcactcctgccagaccacaaagaagcctgcccggtctcttcacatcgccgtcattctgaccgacaccagcatggcttcccacgttaaggacacccacggttcctattctgacatcttccgtcgacaccttcttctctcccttcagctcagcggcagggacgaggttgatcttgtgctcgatgcttatgatgccactcttggacagtacccttccgaggacctgcttgtcgagggcgctcctggcgcttacgatggcctgctcatctctggttcctgtgggtgcctgtctcaattttttttctctcttctctctacctgtgctttgagtttctgtgacgccggcggagccagatagcttatcttttcgtgccttcgtccctggtccatctcttttctcggtccttcctttcagtcgccactgtgtaccaagaagcaaaatacccttggattcctcaattgttgactttccttcgaagggtcggagacgattttgctcacgtccgaatgatcggtatctgctttggtctccaatgcctcaccagagcatacggcggagaagtcgttagaaaccctgccggttgggaggtgcgttggataccttaagctgttcacatacatcaccaagttctcgaattaacttttccctcgatcgctttattcttcgttcttctttctactagttgggaacttacgatatcaacctcacccctaccggtgaaaagctcttcggcaagtcaactgttggcatgcagcaatggcatgcagatatggctgtcgctcctcctcctgagggtaacttccacctcgtcgggtccagcactaagacacctgtccacagcatggtctcgttctatcccgactcagataaggttcacatgctcgccttccagggtcatcctgagtttaatccctccatcctcaacctcatcatggactcccaggaggctattggtgccttccaccccgatgttgtcagatcctgccgagagcgagcggacatcccacacgatggtcttggagtccttggccagaagatgtgcgagatcttcctcggcgaggcttgaaaccttcttcatagatgaaaggataaccttccgttaagatttcgacttgacgcgaggctcatctctccctggcttccccaacgtttgttcacccggttctatgttccctgccgtctcggccaaaacctttccaccaaaacaaaaacgaaaagatccgacgtcctcaccaattaagtgggatagcgcttgcacgatctctctacccctacattcgcattgcatcgctacgttctattggtttagactcatagagttcgttctttccatacatctctttccatcacctgtcggttcgggctttgtttgcatctctccttgctctgtttgctttatttctttttgttttctccgcatgagttcgtgggaatttagaatagaaaaagactgccatctgcatttcctgcttcatctggttctctgtgtacgctttgctttaaaaatcctacgatctctctttcatcctctgttgtttaacgacatatctttatccgtgacatatctagcttatttacagcatatagttagaggcatctttctctttcaactcatcacgaccgttcacgactattgttcctatctctacgggtctactcatttgcattcatatacatcaaactgttagttcatgaatgacatgtggaagtttgccgatacagaccaatcgtgtcacaggtagtacaaagttcgtgtgtcaaaaggacatcatgttttgctcagggtactgcctcgagctacgtatcttggacgaatagcttttttgattcaactgactaaaagagtttgttgcattcctcgacggcagagttacaacgcgacgcgactgcccgttatgcctttatttcttctccatggacgggatgttgaagtacggttgactgatgacctacccgtactttctcgctaaccacaaactgaacatgtcacctttgacggcaagacctataaaagaatgctgacggaagtacgaaccaacaagataacaatagaacgtcgtctcaccttgtttgtcgtggctagatgactaccaaatcagataaacagccaatccgtcatagggtaacgtctagaggtcttgctgaccttacctttttgatcttgtttctgtagtagaatgtagtcagaaggctgacgcagtgttgctgtgtttttaaaactttaggtagaagtggcatgtaagtccgtcactcgtaacatgcagtgtagaattgcctaggttgatagaaatacgcgttcacttcacgggatcactcaacaggcacacgctgccggtatcggaagacccgatgttgcggatcaagaccaagctgccagacatgcctcaagttcaagaaggaatgtgtttatatctcaatcgaggattcaaaaacgatctctcggggggtgtatattcccagttcatcggaagaaaagggacggacgggcaaacggcgttccttgacactgtcatccgaggtaggagaagaattggaagcggtaacagatgcagagacgtctctagcgcataataaatccgtcggtctcgccagctcgacaaaggttcttggcgaggattacgtccaacacccatacgaagcgttttttccgacgctctcttcctctgtaccctcgacttcgtcggacgcatacgaagagccgatcgagcttgagctcgggagctatgtcgaaccagatatcttcttccacaaccaatccgctcaatctggaacatatgaagaacgttgtgactcagcctctcctcttaatccaatcccatacccaccagtttatcagtcttctccttccgaaatcctgacattctcgaccacccaatttcagaaccaacctcaacagacaaccgagccagaccttgtatccgaatcatacctggttccagccttagaagttcaagaaactcaggttgactaccctctcgcatcctctccgacaacgtaccaccggccaacctcggtatccttaccagagtacacccaacagttctcgtccacatccacacacccttcacatctcagcgaccctgattacacgcgtcacatcttggaacgaacagctggcgaaccttttttccttgacg

SEQ ID NO: 1927 - DNA, 50936 bp, Xanthophyllomyces dendrorhous
aatatggacaaagccccgttcctattcctgctcctattcccggtcgcataccggcttcatctccgatgttatcgacgttccacgcccactcatacccggttcttcccccccaagaagagcctttaggtgtagtaggatggaacccagaccttattgtacggcgggacgtgatgccggatgaccacgcagaaggaagccttccctgggagagtctattaagataggcgatgtcgaattgatggaaagctatgaaggatggtgattgagagaatggctatcaaaggatgtttgattaaacttcttcctcttctcgcttgtagtacgttccggtgcaacaacattcatctcttcgcgttaattctgtaacctcgtttttgaccgtcttgacaaaatgggattgacgtgcatggcacatgtgaagcgcgcggaagacgtataaatacacacatatattatcaccaactcccgtctcaaattatatatcccatttctttccccatctagagagctgagtcatcacacccttcccaccttcgcccctgaaaaactcgacgatttctgtcggttcgatcgcacagcgatgttttgcaaagtcagagaccgaagtggagaatgattgagcaccagcaagaacggatgttgagcatgggtatataatcgacgtctcgacaagagatgtaaaggcctagagagcgggcacagaataggaagaaaagaaaagatctacagcgtcagttgtatatcatgtatcggaattgagacccagaacacgcacatctttcatgagctgacgaccgtgtcgaggtatcgcagagcctatcagtctgtttttggcaaactcgccgtatgtaaaaaacacatgctcaaaattgaagtccaggataccacgctcgcctagatccttaatagatgccaagattgccagacaaggtagactgagacctgatcgaccgaatttggagccaagtgaacatatgtcaagagagcgttgagatatctttgagcaaatagacagattgaagaacgcgctcgtgaaacgtaccccgcagacgtctggttccatgaccccacccagcaccttcagcctgatccacgaacgataattgaattcttccaggcgtcaagaagggtgcatcaggagtgagttcccccatgggacgaatctagagagagagggaagtgcaagtatgaggatcggttgattaatcatagaacgtgaagttgaaggcgcatttagaattcaaaataacctacaaggactttcaacatcatgcgaatgtcggtcgatatccagtttagtctctgcagaccgttttgaatttgaggattctcgagtaagctctgccaagtttagcgaaagggagttgcatccaagatgatctcgttgagtcatttcctttcataaaagccctgggttcccttcaaagatggtaggcttacatcgatgctttcccgccatgtacgtctccaaagactggcatcgtcgcttcctaactcttcctccaaataccatggcacgagtgctttgcttaacaggcttttccatcttggtcccatatttccagttatctcctggtcgaccgctgaggtagcactctcttgatcggccgagcgatcgccatgcaagatcgaatttactcggatgatccgatgggagaaccgagacttgacccgcttttccaatagatgaagagcatcctgagaggtagatagccaagagaaaagaggatataccgggtgagaaggttgaaagaatgctatgatatgttttcccaatggaagacagcaaacatactattcgagaggtcacgccaatcactatcagaccacggccggacaaagcgccgagtctaggtctaacggactggacgacatccactgttggagatgcgccagagaaacagatacggtcggataagaatgcagtctacaccaacacgctttcaaggaagattcaaccaaagcctaaaggcgctcacgtagacaatagagcagcatctgcctgcctccccttccaaaaccggcaaaaatatcgaattcttcaagtacgatgataattgatttttttgatggagccgtcaagatagccaataaatgcgatgggagagtcgttgggggtacaaccgccgagtcctacacaacgttcgttcatcgatgcatggcaaggtatcggtatcaacggaaaacaacgcaacgaaatctatggaaaatgcatgtaagtactaacctgctcgttatcctccaactcttcctctgtctcgaagtcgtcgcctagatcgttgattccgacttgtctgccgatctctctgatcgctgaccggtcgtctttcagcatcaatgcggacaaccgaattaccatgggagccggaatttcttccggattggcttccgagagctcattgattttttcaatcgcttgattgagaatctgggagataagtgagaagcaagatacaagattatcagattgaagacgaaccgagaaaagtagaagagttcacaatggcatacagtcgtcttcccagatcctttaatcccctgaattagacagctatttccctctcctctctccaccgttcctctaaggagctcaaccaagttgaccaaactttcctcaactagggcgtcttgtccattaacctgctctgcgccagctagcgtcggcctaggtaccaaaggcgggacccttcccatcaagtgatcgatcaccaacgtcttggtctccaacacgtgtcttctgatggagggatcaagcgtgaaggttggggcgggaagcgtccaggcagccgattggatgttcaggttgacctgtatttgaggagcagcagcagcagtaggaaccaatgtcggatttgaaggattgtctaccatcaactctcgttctagacattctgaattgctctctgtcagattatcctcgtctttgtctagtcttttccttttcttggttgagctaggaaggatcgccataggatctacatcatcatccggatcaaattcctcctgagccgagtggtgaccgtttggttggacctcgtggtctggatagacaagactctgaactggactgacagtccggtcttcaccatcttctcctaaagtcgtccacctagctgtccctttcctagcatcattttcgaggttcatcattgcatcccttgattctccggttggatcgatggccgttcggctggatagacctatccctgtccgcttctcaaactcctccttgtttctctccctcgcatcagcctcctcgtctacctctccccatctagccgccgccgcctcctttctgacgtgctttccattccgaagcatctttttcttcaaaacctcatcatcctcgaagaacgggttcggtagaatttgagaccacatatcgtccagattagaattatacgcctttggcgaagaagcagcagcgtcttgttcgtcatcttctatctcctgcatgaaccaacctggcttaggcttggccaacgcgctatccttcttcatctccttcttcggccctgcactatgttcggatccatcttcagctccaggtctggatctcttcaactttgttgtcgaaggcagacgcgagggtgaaggtaaaggtgaaggagaaggtgaagacgatggcgagattgaacgttttcgatcaacggtcatcctcgacttcttattcgatctgttctgagagtcggaagacccttgcttcgactcgtcccctaccctcactctcgatgacgttcgaccggccggtgagcttcggttaggcctcttaatggctagaggtgaggaactggttgttgatccaatcctacctgatctaagcgtcatagatgaatcagagccgggttggacatcaatcatactctcatccgagggagcaggtgaaggaggggacattggtgatgcggtcgataggccagtgcagagggtggtggttctctgtgtgagatggtcggtgatgaatcgtcaatgttgacgaaagggctatcaagcggctgttcgaatggttagaaccctaacgggtcgcgccaaaaacaggtacgctcgaaaaagtgataaaaagataaacaaacaccttgttcttacaatcgaatactcaatgagatattatggggcagaaataaatctataatgagatgaaagtaacgtcgtgtatggatgttgtacatgttttagagataggtggcaaccgatcgaccaagaaaggaaaaaacaataaacaaaagggaaaaagaagaagaaaaagaagaaggagaaacagacaagaggaggagtgttggagatcatcactgcaaatgtatgaatacaaccaggtattctttattaaaaagacaagggggaagaagaacgaagagagaatgaagaggaaggaaaaaaagtgataacgacccagacatagtgctacacgcagctgactcttgatagtaagtccgggcgaaacaagcaaaggagaagaaagacagaaggacagaaagaggaacgaatataggaaagaagagtgatataagaaaagaagaaagacagatgaatcatcagagatcgaccaccaagaatagctagaaaagacaagatcatgaaactcgagaagaaacaaaaagaagaaacgcacgagaggaagggaaagggggtaatagaagagacgtgatgatgatgcagatgagaagaggcaatccagaaaatgaaaagggaaaaagaagagatcagaacaagctatttacgtgtgaatacatagacgaaggagagaaagagtatattatttggagagggtatgcgacttgaataattatgaggaaacaagggaacgggagagcgatatgaaaacaagaatcagagcagaagagatacacatagaaccgccctattgttctgctccttccggatacttcgccaccgatactttcttcagcacctctttgaaggcagggaggctcagcggttctatttggttgagaaacaggcaaagatagggatgagctcttggaccgcaaggagagaggtgtccatccaacgtacttgatagatatgcgtagaacccgtggtcgaacacttgtgattgggtcaactgcacatttggggaagagaaatgcgatccaatcgaacgaacagtcagcataaagtcgacacgttattcgtacaggagaagagaattcagatacgaaccgtatcagtattcgccgtcaatgccacaactttttttggtttaaagaagaaacagatcgttagacttagcgcttgaacacatataaccggacaagacgggattaaaccgaggaagtaaacacatagaaactcactcaatggaccttctggaccatgttcttcagagatccgagctttggcagtatagccatccatcacgggcatctgaagatcgagtaagacctgagtcatttacgtatatgaccagtcccccaaagtgcagaaaaagtaatgtaagattttattcatatttgagggcattggcaattcaaatccaagaaagactcaccagatcatactgcttatgtgcgacagcatctacagcctgcgatccgtcatatgcaacatccacactaaaccgacaaggaaaggaagacgaatagatgagagaccgaagtgatatgcaagacaggggagcttccaaactcttacttgttgtagccaaacttttcgagaagcttcgacccgacctgcaagaagaaagagcagtgatcagaacttcgttcagctcatcaggtgccagtccgacctcttgagatcttaagaacaacgagaagagtcgaatagagaagaacgaaataaggacaatacaatcataccttgacgttgacctgtgaatcatccactagcaagattcgtaaagggctcgtctagataagaacggtcaacaaagagcaaaacgaaagccgcgtgttcagttcagagggtgaacttcaagcttcaaatgaaaagagtcagacttgactatcgggacctaccggaactggcggtgtcttaaacgtcgactttttccccttcggatctttcaaactggatttccccggcttgcctacctcttcatcttcctcctgatcttcacttgcatagaacgaaaccgtcggcctcggcattttcggtctttctagatgggataccgagctacttttgtgggctttgactttggcatacagggcggaagccttgacgggtcgacagatgaacgattcgtagggaatctgaagttgagacatcgtctcgttgatgtcgatcagacgacatgccaacagtaactagatcgttgaaggaagaaagaaaagacagagtccaatttaggtaagctcatgaagttagacatcggtaaaagatggacgagcaggcgaactgacctgtgtattgggatacatttcaataactttgtccacatcttcctttttcaggaaatctggactagcaacaatcacgtcgactgcaagtgagagcaacaacaaggagttcaacaaatgacgcagatgaagcgacaacaagagtcaaaaaggcggacgcacagtgacccttcccagctttccccttttccatccacatcctcaaatcgcgcttcgtactcgtgacggttgcgccgacatcctcaagatgagcttggatagtcaaacggaggctctgagacggacagcacaccaagacggatgtgggagactccagacggggaaacttctcgtgagacggttctcggtctgtgatctttgccttgaaagagaactggaagacagatcccttgccaactacatgatcgggtttgcgagtatgataacaaaatgcataagatgagctgatctaaactgaacatcaacaaaattgagtatcggatcgttagaacagacctgtggattccacactaacttcccccttcattagcttggccaacgaggcagatatcaccaagccgagacctaccggcaaaaacaaacaaatcaagatcaagcatcaatctacgacaaacagcggtgtgataggtaatcatgatgagacataccggaaccaccaaacgatcgtgttaccctagataatacatatccgattaaatcaccacgattagtgctcaactgttgatttttctattcagattgacaaacgtacgaagaatccacttgagaaaaactcttaaatagtcgatgctgttcaggacgatgcggtgaagagaagatcgagaaggaagaatatgaaggtatgtaagtagcggcagaagacgactaatagggaacggcaagaggagcgaagaataacaagtttgtttgcagggatacccatgcctatcgagcaaacgcgcaaggactatcagcatacagctggtcggaagggaaggagatcaatatatgtcgacgacttacctggatcatgcacactaaagattcccatacagtatcctgggtcgtcttctatgagttccatgttgaatctcaccacgattgatccctggacagtaaatttgacagcatttctgttctcacgacaaagagaacggaggcaaggtgagtgactgcattcgatacatcaataaagatagcagggtttgacgattgactgacgagagatagttgagtaggatctgggagatagacagggcaagaacaggatgtttgagttgatgttaacaacgaggtaagaattgatatgaagtagcttcacctgtcggattcgatacatatctgatctgaggataggcggatcttccgccagtcggttggcatacacaacctctagattcttacgttgagcagcagaagctattgtatccagctaagaggaagatcgatgaacgtggataattagtgaagtatttacgaatacatgattgaaagagtaaagtacatacagcagactcggccactacatccacaaatttcaacagactgatcagcaacagttcaactactcaaatggagaaggcacacgtgacaacctaccatcacgaatgtcgatgtcgatcgtctctggctcgaccgagccagattctaagcgtgtgatgtcaagtacctgatccacaaacaatcttgataagctaacttttcaaagatagatgagatcggtctgctctgatgcttacctgctcgatgagccgctggaggtcttcacctgcatctttgattgtatgtagatgttctttctgtaaaggaatgggaagtggtagagaagtcaagccacatgagtagatgtacctatacgaatcttggtcccttggagcgagatcgaacggacctgaggagcactcaaccccggacttccttccagaactgcgaccaaaccgagaatagcgaagagaggtgttcgaagctcgtgactcatgtgcgataaaaatctacgatggaacacatatcaagacaagagcttaacggttgtcgacgatgccttgcactggtagatatcagacactcacgatgttttcgcgtagacagcatctgaaacatacaatccagccaaccggcaagaatacagacagatcgtcaggtgggctggtcgttaagggtaccctcaaaccaagtctttcttaccttcgagttttcctgtttgagcatagatcaaagaaacaggatgagctgcactctagacacgtgcgagccagctgggtcacgaaaagaaagaagataatcgtgaagacgaacgggttctgtgttccatcacctgcttcaacagagcaagctcccgttcagtgttgagaagtttatcctttggcgagagatcagcgggagcggtagcgttgtccgtgttaatgttcggtgcggatgccatccggtgtccaagcgttgggatctgacttaacatcgccttggccttttccgccaacgagagagtctgagaggcagcccaaggggtaccatcactcgaactggagagataagagccacaatctgacgtagtgagcgagacctttctgggtgcatcggatgggtctggtgaagatgaatcagccgttgcagaagtttctatcgaggccccagactggaaagaagagagaacgagttaagatttttgaagacaggatcgagagcaaatcaggcaggcacagaaagtttaatccggacgacacaaatgtgaagttccaagagggagaaggaaatcgatctgtcagcaacaaagttatggaactgatgtagccagaggaaagaggcattgactgcaaagcctttctttggtcttctgttcattttcccccttatttctaactcgaggcaaaggaggacgaacctgattgttagtctcggccagtctgctctttaaaaagtcgatggtccttgttgcttgtgatagcttgaaatgaaggtcgatctcgacctcttccaaaagctcctgatgctcctccaggctagctttcagcaggtcgacctcgcacttcaactctttatttcctctctgagatgcctcaagctgatgcttgatttcttcgaactcggattgacgctgttggctggcgatcgacgaattcacgacaggattgctgctgtttgatatgctgggctctacgttgaaagtcctgaaggactctgtagccgacttgagggtgtcagtgaaggatggttgtgagaatgggtaggatgaactaggtgaaaatgcctgactggatggggagggagcggtggatgtagacgatccgatatcggtcatgattatatattccggaggtataccgatcctttggagggttgagggacggacaatgggaaggaagagctgaccggagtcagaggaatggagaaaagtgagaaggacacagaagggaaggaaaggaagaggtaataagaagccgtcaagaacaaggaaccaagattgcctgagcagggcaaggtgggtcggatgtagtgtgaatgtatgttatgagagagaaatgatggtaagggcagaaggaagcccggaaaagatggctaggctttgcttgggctggaagaaaacgattggcagcgaaatttccttaatatgttttgagaggtatattagacgaatagaccgtttttcgtgttcgaacgacccgatacaggtccctaagtcgatcaataaagggctgcgtaagatatgattacaagcttcattagagaaagcttcaggacacgcgcctccacagaaatcatatagacctgaatgcaaccctcgatctgcagcctgcgctaaggggcatagaattaaattgataattgatagagagacaaagattaacataatatagaaaaggtacgcagatcggagtaaccatttatgaaaccctgacatcgtcaccgatctctcgtccgccatgggccgccttccaagtagagatcaatgggcatcggcatcggcatcggccttttccttttccttttccttttccctctttctggtgcgttcgcctctcttcttcatgcgttcgcccccccactcaccgttccgcgatctgttcaccctccctccggatcggatttctgacagacgagacagacgacgcgtcccaagcctgttttcgtcggcttctcgaccggaacatcgctccgaaaggctgtgcatgtcaccggcgtaacaccttcaattgtgagcacgctcatctcatgtgactgacttaatctgatacacatctttccataccttcttcaagtttatctcttctgtcccctcttggctttctatctctgatctatactcactcaacttcttcaaagcgaacccaagggcaaagccaaatagtagcctaaagcgattgtccatgatagctctttcattcatccgagctagtctcgtcatgttcttgtcttcctctctcgtaatcggtacgcctgtccaaaaggtcatctatcccgatcagtccttctcgtattcgatcgataggcagaccatgcctgaagcaggtttgttcgttctccttgtgtgtatatatacatactccgatcgaaacgctcagaattattctgcatctggcccatattccaacttcaaatatcacagctgtgtctgctagaaagcttttgactgaacaaggaacaggcacgatcggaactgtctttcctgctgataggccagatgacatagctggttcgtcttttaaactttctttctgtcatattctgtggagtatgcttagcttcgatcgagtgaattctcactacacaaatggaaccgacaacaacaggttctccttttgctttgatggaggttggtttcggtcaccgtttctttcctcctctttcatcgatcactaaaatgtcaaatacttacctcttgttcttctctgtcctttcatgtaatagtatcaagtccctcaccctaaagaccaatcttccctcttgctgttgctcatgcctatatcaacttcgaccaagaacattctcgcttctagctcacacgaggcctcgttcaccgttcagaactcaaaaggccgcgtcgatcaggaacgagtctcattaattggggtccgtccatcatcctcatctacgtctcttgaccctctcgtcttcctttcttcttcgttctgttctgagtcagcctcctgagcactgacattccgatgaacctctcttatccttctgtcataaacttcatcagaacgtgacgctcgagcgagagttgacgatggcacaggatgcgctctacacgaaacactatcttcgccttcagtatgtctctcagctttcttctttgccgaactttacccaagaaacttttcctgatccttccgtgtccttggtcgtatctaccttaagcccggaagcaatcgcatggcttccgtctgcaccagcatctcctcatgtatcgtactgggccaggctcgaccctcgagaggtgtactacgtcggtggtttcggcgacacaaagtatatcggctggatcgatctcgatacatggaagaacgtttaaactcaattgcatacttagttttctttttttctctggaagattccatgcccttaacttttctcgcccgagttgcaatgtttccttccttttccttgctcttgagcattctagagaatgtggatgtgcaggagggctcctatggacagaaagagttacctgcaaacagataacgcgcttatgaaactagggagcaaacctccacgcaaaacggcatatacacgtgtacacatataagaaacagagaacatgtacaaccacgttactttcttgtcatttctttgctcccctactctaaaagccgctcgaccattcggatcaccaatcccagatatgagcaatccatttggccaagtcggttttccggcgttcactctggcgaacgaatggatgacggagcaggtctcttgggtagggccgatccgccgccgacggaatcaggctagaagaaatcatcgacgttccgaacgaattgtgcgcactccactatgtgagcttctaaacctcatgaaacagatatgaactgaaaggaaaaagaataagacgaaccaaagtctgacgacatccttgattccttcagaccagacaacgtcctcatcatcgaccagctttggcggcggctgatttactatgaagttcaacagatcgaactggcctacaatcggaggttctccctcgggtgggaaagggaatcgattacttgctacctcgaggagagatagtccgagagaccacacgtctgatttgattgagtactcccgcccaaggatccgctcaggctagaagattatatggaaaaaagaaaaaccccgaagaagcgtctctaagcattagtttgagatcttcccttggaccaagaaagaagaaagcagaacgaacagccatgtagaaagacgtcccggtgaatgtaccagccaaagaacctacgagctcgcccgacactccaaagtcacagatcttgaactgaccctgttgagtgaccagaatgttcgatggcttgatgtctttcaaacgaaaaaagagattgaattgatgtcagctcagctacatctatatatcagctctttcgatgaccagaggagataaggagagtgaagctaacctcgatgaataattcgtctctcgtgcagatagtccaaccctctcagcactgccaccgcaatctttcctaagattcgttcactgctccggagtccttttcgcttgctctctttgactacggcatccagactctttccttcgcaatactccataaggatcccgatcattgagtccccgtctgtcaagaaggacccatagtgatcgacgatacaaggggacgagcacgtcgaaagaaattgaagctcccggaggatttgacgatgaatcgcagggttgggtgaggaaggaatgatctacgaacgcacacaccagagccaactgtaagtcagacaatggaacccccaaagtaagaaaaacaaaataagccgagctcggttcacccaccttttttgccatgacaacaccggtccgtcgatttctgactttggtgacagctcctcctgctccctcgcctaggtaagctagatcctctaactctgctggatcaaaccgtaaaggaactacttcctgtttcgctgtaaccgaatcctgctgcgccatatcgacttctcttcccgatccgtatcctgaacttgaaccggaactcgaactggatctgacggactcttcactcgaccgaacccagccctcctcagccgtatggggtcgagttcttcccagatttggtggatctcgcagactcaacccggacacagctgccctgagatcatccgccatagaacttgtgcttctactaccggctaaagtacttccagcttttggtaacgaagtccgctcgtcccacccggtgcttacgctttgcagatttagaacacctggagtgccataaccaccatagacacctccatcctctaactcggcgactgagagggggcggacggttcggtctccggaagaagattcgtcgaaatcagagtaaggtactggtgttacgaaagaggattgagagggtgacaaagtggtggaaagaaaaagtttcggtggtggttgagaagactcttggtatgacgtaggcgtgggtgtcaagtgatctgaagttggactcgacagcctgcctgttgatctataggacggagatagagagagagatagagatggtttgggtgttgccagtgttggcactcttggcctagatgcagaaggtgagggtgatgcatttgaaaaaaatgcaggacgagcattagggttgactagagatattccttgagagtcaacccatccaatttccccggcctgatcaacatttatgccaggaacctgaggtagaggaaaagtcaaaaatttagcacttctcgaactcatgattcgataactctatgaacgaagagaaaaggcgcacattcccgttcggaatgcccaatgagagtcctagttttggcctcgaggacattggtgacggagataagttaggcctgggtaatgatttcactctgccttccacagacgaggcgcttctggaaggtagagattcagtacgatcttcctcggatgatgtaggaccagattgaacgacagccaaaataggtaccctaggtctagatgctgagggcgacggagacatgctggagactgtcggggttgttagggattgagtcggaggcgaaaagttgatgtgtggagatgattgtgccggctggtttctaaatgaagatgaagaagaggtttgaagaagtgttcctcggttttgctttcagaagaggtatgccaagtttatgtcagatcgtacacaagagagtcaacaagaacttgatgccgagaacagaattgattgccaatttagaagacgcactggagacagagaagaatgtgtagctcctagagacaggctgagttttgatttgaagggagatgcgattgacgatgcagatggttgatcagaacaaggtgcttcagagaccgtcgattgaggatatgaagttgaagttgcattctggtcatcggacagttgagctcttgcgtcgttcgaatcctgccgcagctaacatcgaccgtgaatcgtagaaaacgtacgagcatgtcagctatgacgttatgaataaagaaggtactgttctctagaggaacgttacaggatgagaaggaacacaaaagagaacgtacctcggatctagatggggtagatataccaagtgtgggtcttgacggtatcgaagaagcagctgaagacgatccgggtgacctgcctaccagagaggtgttgtcctgatgcgatgctgcgagagcaaaatcagattggggaggatacgtcggacggctgtgattcgggggtttggaagggtattcatcgatgtatccgttaaggccggcgcagcttccagcttccgctgcctttgtcggtagtaatgaaggtaaaggtataccgaccaaggttgaagaaggaaatgcaaatagaggaaacagatatcgagatcaacgaaagttgagcgaaatgaacagcatgtcagaaaccctccaagacaaagtttaggcaagatatgatagaaaacttcggatgcaacggggattcaggcacgatcgaagaaagcagataggaagatatgcgctacctaaaggtaggactgaagagacagcaagagaagaagagattgtctttctttctttcgccgtcagagtgaatagaaaggagagaacgaaccaagaaattcaagcttggtcttcccgacagggacgatcccagagacgatacattgggacgagctccgcctggtcgtcttggaggaggagcgctcatcagagatggaagaaagatggggagaaaggtagaacgagcggaaaggacaagcaagagatgccagagtgggttaaggaggggccagaggattacgtacgctgataaacctagctcacgtgactcacgcacgtgatgtctagtaacacgaccgtcgtgccagctcacgctttctttccacacgagccagcgcgtccattcgtttctttctccttctatctttctcccaacactcttaccgtcctttcgtcctctacctttcttcaacttgtatcaatttcatcatgtctggattgttgtgagtccctgtctatggttctgtttcgtaattaaattgatctaaattcagttttggaaatttcgtcttcctttttcaaattcatttaggggaaaccccgctatcaccaaccttgtgttctctttgggaggtgggattgttccattcttgtttcgattgatatctctttctcttctagacggttgttccatccaatatgctgccctgatgttctgtgctgatttgagttataatctttgctttcgtcgttgtgatcatcgctcacaatctattccctctctaatatcttacttttctctctccttgccacacgacccatctcaaagccatgcaggtcgcccgaaaggtccccactgacgaccctgatgtcctcttctacctacgaatcgcctatgtcgctatccgttagtaacctcttgttgttcgagactcggtcattcgccatcgcgtcatatctgggttactgaacgtccctcttatgtgctctcaacaccgggtcgacgactgggtagaactcatcactttgggcggatacttttacatgacctccaaggtaagtctacaaatattcgacaagaactcgtccgagagatctacatcttacaatcgtgtgcatttttcttcgatccactattcctattctgataatcaggccaaggcaaagaacgatactagcatcctcaaatacgtgcagcctggaaaccctatggtaggttcctctctttcattctgaatcaaaatcaacccccagcgatatttattgaaacttctatgtcaattttgttaggctggtggagagggtgagctcgttaccaccaccgtccgggactatgatgtttccgaaatctccaagttgatgcgaggtgtctacatcgtgagtgttacaagagtcgtcttttaaagttgtattgatacaatgagcctgagagaactgatgcaattcacacgattgatcgtacgttgttagggatgtgccatcatgtggtacgattgatgtcttcccgccgattcttcttatattcctctccatcagctcacttgtgtgtcctccgacttgatgttcttccttcttggcttgttgcagcttccttcacggctacatgaagtacacccagcccttgttcatccagtcgatcatgactctcaagggtttgtacgactccaagcccgccaaggtctaccttttcggccagcccgctactggagatctcaagcgaccttggttggccgctgcccctggagccggtctcttcggaggtttgtcttgtcgaactttcgctcgtcgtcatgtttcattcttggtctagtagcacggctgacctgcttgacgtttctcctgtctctatcgaacagccgctcctggtggaaccgatgcagccactatcaaggaggccgagcaggacgccaagaagaccaagtaaaatgagagatgatgtgaataaaccgtgaatgcaatagaaagattatgccgcttgcgtgtagggcagatgaatgaacgctttctgtgatctcccctgcggtctgtaagaagaaagtaacatagtataaagtgttgaatcgcttacgtaacgaaagaggccatacaccctggctgacgtcacacgatcccactccttttcaacaccgtacgtaaccggatgggccatcgcgttttaaacaaactccacgtttctttttaacatccagtttcggtcaactctcgctcgctttcttcttcttcttcttcttcatcttcttctccacttcgctctcgtggctccttctgttcattcactcgttgtaaagccgcctcgtacgcctctcgtgcttaagtagtcactagaaatgggtcttttctcgctctcgaaaaaacacaaaaagtcagcgtcctcggtgtctcaggaagagacctcgtctccacccgcctccccttcttcatcgacggccatctcatcttctcagcaacaccaatcagccaaccacatccgggctgatagttcgcctcttcgagtaggaaagaacggagcagtccttgatgagtctgttgattcaaagtctttgcctcaaacagcgaagcgactgcctctgccaccctcgaatgtatctaccacgcctcttccccccactcctcatgctgaggatacttccagaatctattcgttcacgtcatccgaaacgtcgtctcccacgagtgctgccaacccggatgctttccggggacaaaacgttcaccccactggagcttccatccaggagcgacctcgagaagaggccatgctggacggccggcgagatgccgattttcttcctgctcagaagtttgatgaattcgtcgttcccattcctgcttctcgatcagccggtggtgcgggtgtgaacgagctggcatctcagcttcggaaggcagagatctcagactctcgacggatcgccaacgctcctggagatcttcctgaggttggcctcgctgcggattctgtgatgggcgcggcacccgattcgacccttcgagccggtccacaaagttcgaccgctaaggccgttggagcaggagcggccgctggaagggacagcttgcctgtgaattcggctgctggaccggccgcatctactccggctactcatagagcagtcgatacagtcgaggtcccaagccatcatcaacagcagttggctttactagaaaagatccgaaagaaccaccacccagtctcggctaggcttgatccagccggaagagaactcttccagacggccggtatgccaccagttgaccttgaggggcaaggtactgtggactgggaggaagagtggggaactccgatcgtcaaagagacagtatttaggaatcagcatgtcgaataccagacacagattgagatcaatcgacatgttcaccacgtctagtatgttttctttatttcaatttaatcaacatgttgtctcatcacattccatttgactccaagactgattctgtcttctaccgaccctgttcatcgttttggtagccaaaaggttcagcctctgttacagccgccgtctgtcttgcccgaggacgaactgcattacttccaggatgcacagggcaactggcgcgaggttcgaggtagagccctcgccgaagagatactcggatctctctcggcttcggagcgagcgctcgatcagccctacgagtactgggattcccgggcggtcgaggccgagtggaaggagatgagagacttggtcgagacgggcaaacaagagtacgagactgtgatcatcaagaaaaagatgggtacccgggcactcatgcttggagaggccgaagaactgcttcaggacctaaaattctggaagaaggacgaagacaaaaacctctcagttggttccaacgtcaagagggagggagagcaagggacacgaacagctgccgttggccaggccatttaaactctcgtcgattgaagctagctaccaaattcgaatccttttctttatcattctctctttaccattgcattactctactctttttactctttgttccattcttgtcttgttccatctcaaagatacacatcctgaatgctctctgcatgatctttggcttatctgtatccgtctagcttttttaattcgcttgcttgttcccttttcatgctactcgattcatgctgattcttccgtcctctccgatcggccacgaccttggtgatcgctcgactggacgttgttttaacctgttgagccgagtggagtggtctgtctgttgagcgtgggctgtgactgcgcaggtcgcacacgtcactttgtcattttcaccattaactttcctaacaagtcgtgcaagacttatcatcctacaataacatcaacaaccatcgagatctttaatagttatgtctccacctttattatctgtcaaagacatcggtgagtcttccttcaaacccatgtttctgggttgtgcgtaaggaaaccgggctgactttgttgatgtgggcctggcgattcggatggacatagctgttcgaagagacaatgggtcagtctatatggataacttggtcttgatagatcactttgactgaatgttggtcatgtaactgaatacaaaatacacattaggactggttctgctatctttgaacatgtttctttcgatgtcgaggaaggtgacattgtggtgatcaaaggacgatgtacgtatcgttttctccttacctcctatgctcttcactttcgagactctcaaatagcgtttctgatcccgctcgattcaacaaaccgaaacggttttcttttcggcacagctggatcaggaaagactactctactaaaatgcatttcccagctgactctctaccaagccggatccattcatctgtctggaaagacacctcaggagatgggggtcccaaagtacaggacacttgtggcttatgttcctcaaaggccttccttgttaccagataatccgacgaaacacctggagcatgtcaagacgttcggatcaagaagagagcagagtggaggcagctcgagtgggtggttcgggtggggaaagaagggagtaaggttagaaggagaggaagacgaacgaaataacggtggagaccaggtgttggatccgatggagttggctaagcgtaagaatctcatcactttcctaaaggcttcagaaaaactccagtctgtatacctagacatcgaagctgattgcctttctttttttttcatattcgaaaatgcttggtctgatgctgttatccctcatgtccatcttttgatagaatgggatatccagcgtccgttgtgggatcgaaattggggagatctctccggcggagagtctcaacggatcaacctcgcctgtgcttttggacgaggaaacggtcttggatctggacctcagatcgttttactcgatggtctgtttacgcctttcctttccttcgctatgtttattcctgttttctttgcttcatgctgatgattctcccctcttctacatccatctctttcatttcttatttagagccgacctcggccctcgaccccgaatccgcttcgaaagttgaggcatctcttctcgagcttctccctccgtctaactccaacccatcgggcaaaggatccaagacgggtaccggcccaaaggcatacatactgatcacccattccgaggagcaggctgaacggttcgcaggaaagggggcgaaggtgatcgatcttggagatgcaactgggaacgggaatgagtgatagattgtgagaactggcaagacgagaacggatatccattatctaggccaaaatatattcatgctgtgtacgattcgatcttgttttcaacggacaatcaaagagaagcttgtgagagagagaggagcgcgagggaagaaacagtcatggcaagaatctgataattataagataatcgagataaaacaacatcttacaaattcgaacatctctttcggtctcaacctccaactttcctcatggtcgacaccattttgaatcctctcccttccacagcaatcccatcgaggctgatccaaacagagcaagatgtcgcccactggctcgcctcgcctgggtgcagaaactacctcggttggatccgactactctcacaaaaagtcgtcggcaagaccgttggtgattgtaaacctactgtggtaagcttgctcgttcttaccctctcgtcagtaaggccggtaatcttgaacaagctttctcaacaccttgtttctttacgggaaaccttccgaaccggccagatggtcagccgcctggaagatttcttgagcaaattagaagacatcatctctcttcatcccccgttgcagtcctctcaacgttatggaaacttagctttcagaacatacaccgctcaggttaataccgtacgcccgttctcttcttgtttaaactttatccgattcatatcattacaaacattgaagaacggtcttgtggatatctaggatcttcctgctctcctcaccgctctccttacatctgatgcgagcgataagcatctcgctttgttccctcaactccttcctcttctgaccgaaacatccttccttggtaattcgacaaggattgactatggaaccgggcatgaactcgctttctttctgtttctctatgctcttcgaatcggaaacgttctgggtgatgaagatgaggaggggttggtgctcagagtttttgatcggtacgtttgtctgtgacgattcgttgctccagaatattgagtatcaggctaaacaatcaagaggcgtttcttggtgtgcttttgaactctgaacagatacttaaatcttatatggaatcttcaggatacttacaaactcgaacccgcaggcagccatggcgtctggggtctggacgattactgcttcctcccgtatgtctctagtttcttgatcttttgtaaagtcgaagcttctctcaatgtgactttatttgtgtgggactcttttgtccatgtggtagatacctttttggttcttcgcaattgctcggttcatctgtttctccgtcttctttagttccattccagtcttctggaccaactcctaagcttcggtctgttcacgccgcatcttcttctactactcccttgtcgtcgctacaatcgtcggtctctgggctgcaatcctcaaaatctgaacctccgggaatgttgccatcgatggcgatagttgcgccgaattctacaccacttccggtgcaaagttcaatcgcacgcgatgagaacttgaagggaagcacactatatgaaaaggccatcaatcgggttggcttactgaaaaaaggagcttggcatgaacactctgtatgtcttgctctgttatactcttcgtgtcttcctgttttccttctgtcgaacgggatcaaggcaagaacgctgatctgctcgatgtctatggtgcgcgttctctactttcaagccgatgctccatacactctcccactcggttacccagggttggccaaagattcattcaggcttgatcaagatgtacgaaggagaagtactcgggaaacgtgtagttgttcagcatctgcttgtcggtggtctgatcgaatggtagtgtttgagcagagcatgtctctcggaatgggtatcgcaaccccaactgttgtagatggtcagagaacagacgcgtcatcatgtcatcatcaatcgtatccagttctacatcctctgggctgaatcgacctccatccaatcaactctaaccacatcatatacttggcttccttctgaaagactctcattctgatctgtttcgatcacaaacagataggcgagcaagaaagcaaacaaggcagataggcaaaaaaaaaactagaacaagtgtacacacacacacacagctagtcgctcatgtcttccttttcgtcaacctcccgctgggtcttggcgtctgttccgttgctggcagtcccattgtcaataccgttccttccgatctcacagccagataggtttcctcctcatccgacaacatcaaccgacggattttacacccggacccaaacaccctatggatcgctagtcatgatcatctgtcatgtccggtctgctcctgagcgagccgggatgatgcaccttagctggactccttttccagatggaccagcttcctccaaagcatggagaatcgacaagtttgcttctgaggggttgaagacctctgtcgacaagtctgaaggaagaggcaggtggacagggttcaacttggtctgccctcgtgccggaagcttccaggtggggggagagaacggtcggacgaagcacattatggaactgtcgtctgctgatcgtggaggtgcagaactcgagcatggccgtcgagagcgtttagtgttggaaacagaacaacccaggagatgggcgattggaggcaagaacgcttcggacccgactgctggaccagaaggttggatcggatggttgggctcacttctccctatccattgggttgtaagtagtacagggtcaaaggccaggtggtggatcgagacattagacgatcaaggggaggtgatctccaaggtgggaacaggagtcgagtctgaccgacagaacggatgggaaggagaaggaattgctcatatggagaagaaccagttcgtcctgtgattccgtcgtcagaacactgttggccatatctttttttttcaaactgatcagcacttcaatatttctcgttcgatagtggggactcttttcctccaagttggatatgggttcagaactcgactccactagatgatccttccccctttacctttactctcgcgggtggtcatctgcctccgatgttcccttcgatatccacgcaggctcttccagcagaagcttatttggcaggactacgtgtgcccagtcaagggatcgaatgggacttcaaaccacccacaactctcaggcttttcggctgggggccactaaatacaattcacagagacgccaagcagggcacggtcaagatcgacctcattaacggttggggaaccagacggaccgttgttgaatccaaagctgatactgtgcgttctatgttcgcttattgccttgcgctgttctctttttccgtggcccttcttcttttctttttcctttcatcaagtgttgatcaatatcgctcataaacatgctttctgtattctcaacttgtcaaacctgtcggtcgtaaaaagaaaacattcatccctctgtcttgtcccatgccaggaggacatactcttcccgaagaaggatatgcgctagagagtttttgtgcccagtcaaccgtcaaggcgttcgttcgatcgggtccgtgggctgactggagggaagtctggagaggcgagatcaaagatggcgggttggaatttggaggagcctggatgaacgatctggacggatggaagatgggtcatggaaagagagagggcgagaagaaaacggcttaagcccactttgagaatgagttattagcgagagagcttctctcggaactcgctgaactgactcgaaacaaggaggagctttgtgaacctccataatgagcgggttatcgagagacctggctcgacagcagcgcttgcacgagccgagaccatgtactgcctctgtaacttccagagagatctgtcggaatagaacagatcgcgaagatgttgatgcacgccagcctgacactgaaagccgagtcagattgaagtcaaagagagctggtagacttgattaactcttccctcaaaggtgttcggtctgcatcatgttgtgtcgtcagaaccagattttgtctagattgttacgttccaccagcgtgtttgataaacaagttgatacacctgtggaaggcaaattacccgagaaacgaaagatctgatacctcaacttttttccctagagaatagtacaatattgatatacaataactgagagggaacagaaagagagattgtccgagaagaaccacgggaagttcgcagttgagaggagaaggtaaatggaagtgatacggcaaggagaggtcatctctgatctccaattttactttttacgatggtatgagaggattacaaagaaatctcaaatggatgcttaaggcgcttcgtcgatgatctggaagcgaaaggaagagagctccatgtcgtcagcactagataggaaaagagtcagtaagctaacgacatagacgaacctgacacttgatcgctccactcgagatatcagccgccgtgtgaaacgcctcgaccgcgttttccaacttgaatctatgagtaaccaagctcttcaggttaatcaaaccggacgagaccaaccgaatggccttgggatattggttacagtatctgtactggtacttgacgtcgatctcgtgagcggagaggaacatgaaaggcatcgactgaacttctttgccaactccaatgatgaaaacggttccgccaaacttgagcgactggaaggattatgaccatgagattcagtgttaaaaagaggttgtcatcggtttcaggggagaaaaacaagttggagaatgacgtacaaagatagcggaccagattgaactctccacaccggtgcattcgagagcgagcgttagctttagcccaccggcggcggccttgatcttttccgctatggcgctatggtcgagtcctcgctcgacaagcaccgtctggactgagggaacaagagttttagcaaagtccaatcgggattgggcgatactgttggcgagaaagaagcaggggttaaaaggcgggcgcagaaaggacaggcccaagagcagaggagtagagtgacttgctcggtgataacgataggacaggctccagcggcagcggcagcagctagactaacaagtccgataggtccagctccactggaacaatcgaccgaattgagtatcatgattagcacgtatactattgcatcaggcgactattggttgatgctcaccagatcaccacgggatcacccagcttcagattagctctttcgattccggcaagtgcgaccgccaaaggctccaacaacgctccttcctcccaggagatgctgtccgggatggcgtgcagccagttttcaggatgaaggtggtaccgagtgagcgttccgtggaaaggaggagttgaaaagaacacgacgtccggacagctgttgtatcggccagagacacatgcttcacctgtaaagtagaggaaagcggcttgagcgatgtcgttcccgatggggtgatgaagaaagagggtttcacaaggaagagagatcgactgacaaacttggcaaggcactccggcctcgatcgcaactctatctccgaccttccatttggtcacaccaggcccgagttctacgacttctccagctgactcgtgtccagatccacactagacgttcacaagggattgcaagattgcaatcagtggtgttctgtgtatgccgagtgtacagagagagcgcgcacaacgcgtacttacctcatcacagacaaccatggtcgctccgatctgtttgatcaaagacaatttgacggaaaagataagcatgattcaagacaagagcttgtacctagaacaaaaaaaaactgtggtcgctcacccggccgtgcttccaaaagtgtacatctattggagtgagtgatgcatgagtacgcgcaaaagattttggatcagttctctgtgagactaaagcggcctaagatcaatctagtaagaacgtaccagagccacagatcccggtagctctgacatggacgacgacttgacctggcccgggcgtggggtgaggctttctgaccatcctgatctgcttgtgctggttgtagcagcacgccaggtttgtctttccatcttgaggaacgtctgcaacatcttcgtagatcttgaattctgggtgttgaagaatcttggtgggatcatagagcttctgtgagaccgatgaagaacaaggagagatgtgaagaaagatggagaaagatgggcgatatgttagttgagattctgcagtgtgttgcctacatgagaagcgcggaaagcgcacagaacatacaaagttggtgggagccatggtgacggatttgtctgagatttcttctgagtggtgagagaggtgattgcttttcttgagctttcgaacaaacggatagagagatagagagagacgaaagagaaccacaagcaacgagctgggtcgtgagtttttaacgactttcctctgcggctccggaccgaagattccaccggccggggataaattctcaatcaggcaagtgtccgcgccgagcttggtctgtgttgtctatcttcctcctcctccttcaacatgagggctgggtcgatgtggtccactgtctgctgtgtgtctagatctacaagcgctgtatatggtcagaccagaagtcgaagggaaggacagagaggaagaatggcaaacatgcctgatgttggtgttgcgaggcgagaggaaggttaaaccttggatgtctcgagacttgtcatacatttctatctccaccttgatatccatcctctctgtacatcctccctcatcatgttgggcataacaacaaagagtaacgtgctccaagctatgttgtctgcagacaggtcttcgtctctacgaccgatcatcgatcagtacctaactgtcaagagaaactctacaggaagaacatggggtcaagcgtgtgataagattggagatctcgagttggcaagtccgagattgtttgtgacgatcctgtgccatagcaccctggcaactaacaggagtgtctcacccttctctagtatctactagaacctgacaatttgaaacaactcgtagcggttggtatttcggtgagagaacaaacttgcaagctgctgaatccatctcgagtccgccattgctgaccagacttgtccacgctcgatcaaacacagtatgaaagactgagtaacgaggtatggtctcgaccaggtcttctctgtctatgttctcaccgttcagatgtcttctgtatgctaaaagacttgcatgcattcctgtgctctgctcatagttcgtcgcgttccgaaagctcaacgggcttcctcgatcagaactcttcacccctcggttctctacacctctcactcaactttcggccatggagcgaggaagattacttggatataccagtagaagagtcgtgccacctccaacgaggaagccgaacatcctgcctgcgtaccaggagactgagaacaaggatgttccacctgaatatagcaaaggcgattgagctttagtatatcgacacaagccggtttgccacagacagcgagcactgttcatcacatagatcactcgtctggtacatcaaacacatgcagtccataggacacatcgctgcaatctttctcgttcgttcccagcccgatggatagaaaggcgatacctgtgcgatgattgacaacagcttctagattgtatgtaatggttttttgaagaacgcgcagaagacgaatgaaccaagcagaagaacaacgggcgtgtgtgatgaagatgagaacaccacattcccgatcgtcataggactgccgacagctcacacagatcgtcggactacatgccgagtgtcacactggacagaaagacagacggacagagagaaagaaggatgaaaaaaacacgttggcttgtcggacaaagctggatgaagtcgtcgctcgccatcgttcccagccctacttaccaaccaccaccaaccagcactaccatcacctgtagtgatcatggcgatggcagtctctagttcgacactcccgcctcatcagcagtctctgatccctctgtcgtctaggacatctgctgggtttatccgatatcttctccagaacatcatcaacgccctcaagagactgaatactcagacctccccttcggtcacgattcagaaactccagagacacagatggtctctccggaaagattacccatatgctattcaggcagctgtctgggtattcagtctctatgtcatggaggcacccaggtttcccttcaagctgatcatccccgtcgtctatgcgatcatcaccatggtccctatcctcggacagtttttctttccggcaacgccaatcttgacttgtttgtttttcttcctttctttctctactttgacgatagctcaatcttcgacgctcatcataggctcgatcgctcacccgttcttcctcctctactcgccttcttcgtagggttaatcctattctattcgtctcgatacattccagagaactggcgacctgccgtacacgtctccctcttgccgacgctggaatccgtcctctatggagcaaacatctcggatattctgactagattcacccatccggtgttcgacctcctcgcctggtttccctatggtgtcgtccatttcgtgattccctttgtcgtggccgctatagcgttcgtgttcggaccgagaggaagcatcaacttttggggcaaagcctttggttatatgaacatggctggcgtgatcatccagatcgtgtttccctgtgcacctccttgtaaggcctcgtgtggatatgttctcttctgagctctttgcacgtatgacacgttcttattttgacgcgacatccaatgttttccttcgttctccgtctggtggcttcagggtacgagctgatccatgggttgacgcccgcgaactattcgatggccggctcggctggaggactcgcccggattgaccatctctttgggggctctggctacactgaaacgttttcaaactcgcccatggtgttcggagcgttccccagtttgcatgctggttcagctaccatcgaggcattgttcctcactcactttttccctcggttcaagtcagtcgctctctgttcttgtcttccattttcaaaagcacagtccagctgacttgtgcgaacctctttctgtccttgaacttgtcatttcggactcatcgtttgttctattgttccagggtgttttactggatatacgtcgccgtgctctactgggcgacgatgtacctcacccaccactaccttatcgacgccgtcgctggcgcttgtctcgccaccttttgcttctactattggctcccagctgaacttcgagagtgggagaccggaggggtcggtcggtttgatgagtacagccttgtaaacagtaggtcttttcattttatactatctcctccttcttctgtttgtgtatatcggctgacctcccaccttccttgttcatctctattctcactaattcttgatactttgcgtttaaattttgtgtcccaaaaaaaaagaccttagagatgcaccttcatcaccttcaggctctcatcgatcgctagacgacgagatccgaaaactcgaagagggggatccttcacccgtcaatctttcccacgcgcactctcactcgcattctctttcccaaggcccaagccagggccaaggaggaacgatctcaagacctgcgtcgagaaacacgaacgtaggcggaactagctcggggtcaggaggtgcaaccgatggtggaccatcgagaaaaggaccggacggagagatctcctagaattctctgacgtgcgtgggagagacgaatctaattattttttaaaaccccccaaacagaactgatttcagaaagaaagaaaaacaaagaagtaaaccccaaaggaacaaaacatgatcgagagagaaagacaaggtatatagacaaagaaaagagtgaagaggtcggagaccaaggaacggagaaatcaagaaacaagtcattgggacatctggttctgtcaacttctattcttttttttttcgatttctcttcttcttcctttttattttcagcgtaaacacggttctctcccctatctttatcttagatatctatcctcccttttctttattctcttcacctctttttcttttccttcacttctccctctatctccctctcttgacgcttgatcataatcctctttgacgtgaatatgcctctcggtcaaatctcccgaccccaaaccaagataaagacaaagactgagccagcgacggcgacggtgacgttgacagtaattaagaaaaggggaatgaacaaaattccaggcaatcccgaagaaagcaaaggaaaacccaaacattctctctcgtgaaaccgcgatttgatttgattgaattagtcaagatgaaaagaagatagagaaagaatatcttgggggcagggaaaaaactcaaaaataagtaaatatgtgtagatgtagattgtaggttgtaggggggagagagagagagatggaaggaacgaggaatattcaaatgtgattgaaagagtgatttgatggggtgctatagggttattaaagtttttttttggtcacttgattagcaaaaggagaagagaaagagtgatgatcaatgtccacttgaaaggcaaccaagttgttgaggaagggacggaagaggcaagaggcaagaggatgtcttccggaatcgtcgtctcgcccttttttatacgcaaactgacatgaagctttttcaaaaaaaaaattatgcgagaagataaagagcacggaaaggaaagggcaggtgaagaaaaagggagtgccttaagaggaagaagcggcagcaacagtagaagcaggagcagcggcaacaacagtagaagcaggagcagcaggagcagcaggagcagcaggagcagcaggagcagcaggacccggattggcatcgaccgatacagacgcggaaggagtcgtacttggtacttcagacccaggcagaccatccgggtacaactctttcaacaatctgtcgactgtttggatggaatccaggtacagttatccatcagtcatcttcgaacccaggaagatgtgaaaagaaagaaaatgttaggtaaaacgacaacttacggcacgtcaacggtttttggtaaggaaacgattgagaagatctcatgctctcaaagatcggctgaagctcgatgacaagcttatctctctgggccggctcggcagttctgagcgcccgttgactgaagagaagaatcagaagaattcagaatatgaacagcaatgcgtaggtcaaagttctatttcgggagcttgactagcaacataatagacgtacaccacaaagttcccgtattggtctttcatcaacaagctcaacgagtttccaggtccgctcaccgagagctcgttgatcaaactctccctttcctctggtgaggcatggacgagcactttttcgcacacgtttgaagcaaacttatgtctggccactagatgtgttcaagacaagtcgcgcaaggacacaagaggggattgcaaaggacgtgaaaattctgtcaaaacccaaatgtctggaagacaagcagaagtaaggggagaaaaggctgagaacgaacactggacgatgtgacctttgaaattctgaacgatgtgtgtcttgtcctgaagcgaacctttctcaaggacgaactggacgacttagagtcggaaatgtaattcgaaaaagaatggaaaatttagaccgacgactgagaagaaagtactaaaaagtcaagaagaacagagaaaggaaattaggccgacgaaccatagtttccaaactggtcgcacgcgaggtcccgggtgtattggttcatctcgtccgccaacgtcctcacctggtcggccgggaggaattccaaacacttctggaatactctgcatccaaacggatgggaacacatgttgtagactgttctcaagaaagaacaaagaaggcaatacttagaacttggaaactgcatttgacgtgttaagagtgatatacgacagaccttgaccacggaaggcatcggccagattcaacccagagtttgggatactcgcaattcgctggatcacatgatttgcgttgctcgacttgacacaagtcaatatatgatcctctagttctgacacaagcgagaccgcctgagcttccgagatgtgatccagtgcctagaaagagaagaaagatcagatcaggtcaggtcagacaagacttgatctgtgaacatagaaatgatccgaacgagagactactgaccttttggaccgaacgacagccgtaagggtccagagagagtgtcaacatcgaccctcgcatcgtctcggccaacgtcgtcttctgagcgggtgttccgtattcgaaaaacttttggacaacctgaaagacagaacaaaattggtcagccggcgttgcgcggcgcatacacatttcacaatgcggtcttacatagtttccgaacactatcgacaagaaaacagacgtagagcgaaggatgagtgagagatgaatgactgagagagtgagagttttgagacaaaccatcggtctctaatgtgtagacgttggcgaggacctcttgaaacacggcttgcttgactgcctccaaggctgtttcgagtttgagctgtatgaacctcgagccgtattgatcctgggcaaactcggagatatgtccgacaatatcctgagaggaacggacaaacatgagaacatagttagacatagttgcaggggcggagaagaccgcatatcaaccgctcgcttacctcaagttcccagactttggttttatcctccctaaagtttaccaacaatctcgatctaggatccttggtctgggcatgttgccctccctgagcctgtccgccaattgattgtgtatgagcatgtgatgacggcgtcggcggtgtccttccggcgttagtattccggttttgtctgccacttcgttttgagccaaacgagttggctccggcgcctgaggattgaagctggatagggatcatctcgactgctgatgcatcatgtggaaatctgctatgtaagagagggggcagtggtggtggaagcggaatcgatgacccaaatggtggaaacgatgaggtcatcaacggggacgaaggaaagccggcgtttcgagagttggacggatgataagccaacccaggagacaacggagaggacatgaagccaggctgttgctgtgcagaaaacctccgaggctgagaaagattggaaatgtgagaatagcagatcagatgataggaaagagaggtctggattaaagacaaagatttagacatacccctccgttctttcctagagggatcccgctcgagagtcttctcgaaggtagttgtccgtgttgagagattggacttccagacatccagaaaccggaaggaccctgtggttgttcaaatgtagagtaaggagcaagtcccaacgctccgccgagtgtaccggtgcccatcaatggcggaaaggttgacgtccagtcaattcctgccggtccgttattggcgccggggccaccgacaccagctccaactccagcggccgagcctgcgttcccgacgtttcctccgttggaccccatgagggaggacccgtagcggaaaccgtcaggggtagaaggtgaggggtgcatgtacgggaagtagggcgacatcgggctgggatacgggtgatctagctcggacgtcgagagcagaggggaaggatagtagacatagtctgggataaagaatgctggttgatttgtcgggatggaggattgacgggaagatcggtcataagacatgtcagggaccctgtcaagaaagtccatgtgtggtgcaattgagagcgctggttttgtgtttgacgttgtgtttgcatcagcagagggtgtaggttgagaggatgagagggaagcgtaagataccggggccggatctagtgtggatggaggcggagaccgagaggattcaaagtaaggaggcccagtagagttctccattgtctgtcgaggtttggaggacaaaggaagagagcgttaagttgaggatgtgaaagagctgtcagacgggagacaggtcactcaccatcggagggagagcatcgtaaagactggacgtggaccaggcctgcagatccaaggtcgagtcgtcagatcagcatagttacggtcaaagaaggaagacgaagaacagattttgttggatatagagcgaagggacattcacgaaccaggccatcatcttcgatctcttgagatggttgagtacgctggacgctacggctgcttttaggacttggtttgttcatgctagaacctcggaggcggaatcagtcagagctggataaatgcggaagtgggggggagagagagagagagggaacggaagtcatacctacacgatacgagcgatcgaataattagggaattaaggagagcgatcggacgttaatcttccagggtactcctatgagatagatccaaaggtgaaagtagagatcatgagggaagaagaaacagggagagaggtaaagagatagagacaaaggtctagggttgttagcaaatttgccaagagaccgaaaggagtgattgggtgcaacatggtgtggggtctcgactcggaagattccgttggctgttgcatttgaaattcgttgggtcaaacacactcactgagatgaatgcgctggaacaatataaagtttcgtaagattttttttttgtattcgttatttgtcttctccgttgttttgtcttttgagagggagaaaagcggaaaggttcgacggggattgatagagaaagtgattttcaggtaacagcgccggtcggatggtttgtatgaacaggatcaggagtgggacccaagagttatggacggcgggagagatggaccgaagaattatcgagaccgatcgagagaaaagaggatgccgggaaggaaaggagaagaagaacaacaaaagacagagatctatgatgagaatgagactggaagagatcgaaacagagattgacggacgcacggatgatgtgagagaaaacgagccgaggccgaggtgcagggtatttttcggagaaggatttgactggttcaaggaagatgagttgtcaagaagagaagggttctttcgtgtttgttcccgctatcttgatgactctgtacaaggagagagaaggaacaaaaagagtccgcaagatccgaagagatggggagagagagaaaagggaaagagaaagggaaaggaaaagagagaccaagggtaacgacagatcgtgttcttgcttcttggatcgtttctgccttttcttgttattctctggcgagtgtgagatgaccgattgggtgggattcaccaaagaaagagacgaagaaggaagagagagagagcgggtagaaaggatgttcggcagttgaatcgaagatcgaccgtccaattctcatacgaccaaggcggataagactgagttaagaagaaagagtgatggtgtaggtgtgagcgaacggttccttacttggagagacctcagcctgtatcctcctggttttttttctcgttgactcgatgacgaacaagaaaggaagaaaagaaaagaaaaaaaggattgggagagatccaaaagtagatgggaaatgatgccaaagagtgaacgacaacaaagggaggaagaggaaacaacgaaacccacgcgggttttctgggcacagggatgaccaaccgaactgtccccaatcacccgagaggagatgaagaatcaaatagatacacagtctctttctctttttgaaacggtgggggcacgctctcttttcttttctgttctttccttttctcttcctttttctggggtagatctgctcgtctcgtttgggtcaagtgggatagacagatgggtgggttatctgttcacgatgtgcctgacaagagaggcagtgaccgaagaagaagaaaaagagctcgccggccgatggagagcgaacgacaagatgatggagaagatgatttgtttaccttttgtgtacggtaatctctctttcgctctccgtcgagaagggaacacgaacaagtttagaaggaaacactctctcaacaacaacagtctcgaccgcaaatgatgccttgtttaaatgagacgaagacgagagagtgcatgtatgtagcagaaggaagaagggaagaaacggaagaacccagaagaaaagatcgcccgacggatcagccgcgagtgtttcttcgcaccccggtcagagacatctcctttcgacgcttaacatggtctctttcctatgctccacgctttcttctttacttctcatactctattggacgatcctcgctcgcgctctcgctcgattggtaaactgtacggacagcatacacaccggatgaaaagagaacaagacgaatgaaaaatgaaaatacgaaaaatcatttagagccggcacgacgagtgcaaatgaatgacgacaggcacacacacgtccgacgacgacattgtgccgtgctttcactcttctgccccatctattcgtccgttcacaatctgtgtcaaactgagttacatgctgtcttgctttgttcttttttcccttggatgtatgtgactctgtgtgagcaccagagaagaacaaacgtatgagggtggccataagaaatcacagtatcgtcctagagaagaagacgaaagaagaaagaggtagaggcataatcacgccacgttcgatcgctcggcctcgagaaaacaagccacacggtccaaactcgttcctggctgacctaatttggcaccggacgagggcggtcgggagccaaggccaagatggaccaaaatactggaatttgacccggcacctagatccggatgcgatggcaattctctgttgcttcagcgcgctcgacgtcgttactgatgacgtcagtggcttgccaaaagcccattcagattcgacaggaacggaagacgtcgactaaatatttccaatcgaaatgtaaaagacgcacagatcgcgtgtcacccgcgcggtgaacgaagagatctccttcgtctgtaccggaacttttgcgtgctcggccgccgatgggagaaatgaaaaagaaggaaaatagaaagacaaaaaccaggaaactttaattcccccttcggcaaagtgcctgagtgaacgaatctccgctatcacccacacgtgattcgcttaacttatcgctcaggaaaacagttcgagtcgggattctttggctctgtcgagtgatactagtatgtgcatcgatcgaacacaatcgtctgctggaggcccagaacgtgtgcaagatacaacaaaacaagccgatacgatacaaaatacaacatgatacaatgcaatacaatataatacaatataatataatacagtacaacataacacagcatgttgtattcagtatttattggaataagaaggtgaaaatgggctttttatcctggcacttgttccccaataaagccctcagtggttttataaaagcatctgcacactacccatgtgtttcagtcaaatcggataagaaacccaaagaaaacgtaggagaaccagccagaaattctgttgctcttcggagagaaactcttgggatttcgcgcaaaaggaaatctgagggtgttgcctcaagacaagataacaaattacagctcaaattttgtcaagactgttgaaatttcaatacgttacacaataagaatataaccagttgcatccctcccgtgttctgaacccgagtctgcacgcaagtaagcccagccgggctaaacaatatacaatgaacgttcaaatgaaaaaaaaacctctacttgccttgctgtcgcgatcctacgcaacatcattctcttggctctcactctttccgcaaactgtcgtgaaaatagagaagagactcgtaaagatcaaagaaaatcatagatcgtcgtctagaaagatagggtaaaggtaatgagaaaacaatggtggggtatacgacacactaaacacactaaacacacccaagacgcgctaaactggatcagaaagcaaaagctggaaggtgaaaaatctatttgttggagttaaagaaccagctggcacgtttctgactagcactcccgctcccgcttccgccgccgctctcatcctgtactctcgatagaggagatccagagaagccggtctgcgccgaaccgcctctgacaaagcctgctcctcctagtatcgggcctcccagattcactccgccaccgccgcctcctacagggacagggttaaggagacatcaatgtcaacgatcaagttctaccctactttctcaattgatataaaggaatcaactcacctcgaatcggtttagcaattcggccacctgcgagcgctggcatcgccgaggcttgagctgtagagaagaacgaaaagagggaagggagggaaaagacacatcagctgatcagaaacgttgaacgaacaaaattcaaaactagacctctgaactcacactttagaacctcgattcgatcgcgcagaaccctcagttgttgttcatgttttaagttctcctgcacaagcttccgatcggcttcctgcagaagttgttctagactggtcatccgctcatttcgggcaatcaactttctctcagcctgagcggcctccttcttcatcgccgtgttctggtcgaccaactgtttctgaacgagtgccagctggtccaggtttcgttccaagaatgccatcttcttttgttggttcttagagttcgcagccttgatcacagtgttgtagtgctcccgaagttcatccaactggatctccaactcgactaccttctcgcaccggttctgaagatccttcatcagacttcgtttggatccctcaaagtcggccaattgaagcgcaatcgcctttcgagttctctctaaatctcgagcgctttcagagagcgccttgcctccttcgatcccagcagccgataccgcaaacgctctctacaaaggggagtagaatcgagtgaaagggggaaagaaacgttgtcagtattatctttcggcaaggagtctatctctgaaacataccttcagttcctcgttcacgccctttagattatcaatcgttatcgattggttcttgacctcctgactcttggaatctatctgttgcttcaggttagcgatctcgcctgcctgagcgtcccgcttggccgcgtactgggcctctagtttagactatacgtcagagaacaggcagacagaaactcagagtccgtttaggctattcatccagaaaatgttagatggaaaagaacgaactttgagttccgacatgttctcagccacatctgcactactcgcttcctcctctcggatcgttcgttctatatatgcacaagtatgatatcgtagcaaacggatatagaaaacgggaggtcaggctagctcaaagaagagacgcgactggcaaacactatcgttgaagcaaagaggagaagaactaaccgagaagctcctcgtactcgacttcgagtgtctccaaccgctgctcgagttcctcccgccgcttgttaagctgctcggtctcctcctcagatcgtctcagacgatcatgtgaatcccggagaagaacctgtcgttcggataactgtcggtgaaggatcgtgatgtcttcggctgtaagcgcagttgatgggtcgtccgggtcgacggcattcagtttggccagtgtctctcggacagcgtcttccttctcagaaagagtaccctcctgatacgtagataacagagatcagtatccttctgtcatcctggcttctgatagaaggaacacagacataccacatcgaacttggccatcatcgccgccatcttttcggccttcttccgctccttttcttcggcgaccgcatcctttgccgtcaccttgagcgcttccacctgcttccttagatcctcaatttctcgttcgttttcctcaatctgctcctttagcgcatcgagctgaatcgcggcctccttgttttcgtactccagtcgttctttcaacagtcggagttcactcaactcggacgagtggaccttgagttcctgcttgggggagaagaaaagagggaaggagaatcatatgtagatgaatggcaatgagtgcgctgagactgagagcggatcgaagcgaaaatattgagtcagctcacattcgacgttgtagactcttgttccttcatgattgaaagctcatctcggagttccttgagtaacttttcttgagcagacagagccgattcctaaccaatcccaccaagtttagaacatcatcagtctgagttcacaaccgaggaaagtttacattgacaagctcagatggggacaaactttttctgccagttgatcgctcagctcgccctctcgcttcaagaatccttctctttcgtccttgtccaagatcccacttccaggcgtcgtgggcctactcgataggtctttcagaccgtccatcatcgggcttaccggtgtcggccccctacttgtgtaagctgatgaaccggctcccaacgaagatggcgtttgcggaagactagacccaacggcgggtgccgccccagactcgtttgccgaagtccaagccgatcggtcgaccgactcaccgtttctccacttgacgagctcgtgctccagccttgagatatattctcttgaccgtttgagctcaatcttgagttcaggtagagagagctctttgttcactctggcctgattcttgatgctctttgcccgcattccgaaccgaagagttgatagtgtctcagcttcattgtaagacgccggagaacagttgatgatcagcgtcgttcgagagtttcctcctagagattcctgcaaaattcgggtcaactttgattctcgatagggaatgtagtttgactgttgggtgttttagaagaatagtaaaatcacatctgtaagcgtagagtacggaggcatatatctcgaaagatagattgaaacgaacctttccgtcggtaagagcgttgattagattacccaatgccgagagtgacttgttgatcttcttagcttcctccaatgtctgtccggtagctccagtctttccgatctagatacagcattcaagatacaagatcagtcggccgtactcttactctacgtctgcatctaaaagagcaaagttctcctaccttttctgaaccagccaagtcgacgagatacagatgtccggcttttgcctctccggtatccagattgcgttgagagatcgaaatgacaaagatcgaatgggaacgtgacgattcagcgttcatatctatagatgaaaaggttggtaaaggcaaagttaaacatcatttctatgtagaagacaagatctttaacgattgacgtactagtagacctcacaaccctagaactctgtccttgtcgcatgatctgaaatacctcgccagcatccgagacgttgtattgagtcagacccttgacatagacacctctggacttttcttcatggacctgcagattgtcgttttgagctgcgccataagaaatcccaagagcgatatggtttgaatgagctacatgactgattgaaatccacactgtgagaagaacgtacgagccagcaaatccctgatcttctccatgtagatttccatgtagctaactttgaccatgtactcgatgttcgccgacgcacgggagatatcgttaaaaaattgctccacaatacggggggtgatacccttgagttcctcattatctatatcggctccctggaaacgacaaagtagacatgagccaggtcagagacgttgagacatgaagttggtttatgcaacacataccatcattgtgaacgttttacctgaagcgcatatatgcatggtagtcagccccgggttgtttttctttgcaacagatcagctcagtatacgctttgacttaccagatccagtttgaccgtacgagaagacagttccgttgtagccgttcatgacatcttgatgacggtcggttttgtatcatgtcagtaactttcatttgagttcaaggcaagtagacagatggaaacaacaaaccttggacgatttcctggactccatactcgtaaatctcaacttgccgggatacaagatcgaatgaacgatcaaaggtgaagccgtcctgtagtattgatatacgagacgttggagggatgaatgagggttataaagatgcatctgactgagagtatctgattcgaacagcccccgaagccgtaaaacgaaccttctccgcacctgcaagggcaacgttatcacccttgagactgacagtcttgaggttctcatcaaagtcaacgaccactttagaattttctctgatctcgatcgagttcagtggtcggaaactgagtagaaagaaattgagagatcaagaaagtatgaggttctgtttgggtctgtatctgttcgggctgtcctctatctccctcccttctgggacctaaccttcacgctcggctgaggtgactcctctgtccaagaaacacggttctattccgggagaatcagagacaaaaccacataccgacatatgactttgatgttgttagatgccatgacggaagaaaaaagactgtatctaaaaagcgcaatgtgtctactgttcggttaatatatgaaccagaaggtgcgagcggacgagtctatctgggctgctagtcggccgtctgaggataatctttcggattacataggaagggaatcaagacagaatgtcgatatatcagtttttcctctaacaccttcctctttaaaccaatgagctcactagacggtaacgatgactgcttgtagagaacgataaagaagcggcccactctctctctctctgacaaaacgacgatgggtgtctgtttgtttcctagggcaggaggtgtgatgggtaaggatggggagccagagggaacgcggtacaacaacatcacgtgcaagttgccacatcacatggttacagccctacgtaatttaaatttaaatttcatcttatttttgaaagattctctatagcggcagacgatccgataccaaaaatcccattgcttgcacatccactctgcttccttctcctgctcgctctttcaccacagacacgttctattgtacatacaggccatctgtgttaactgttcgctggtacgatgtcaactccagattctttcgcagcgctgcctgaaccggatgtcgtgtatcgagcgagatcaggtatcggtcagaaacgaccgaggtcgtcagattcttcagccatagaaagtcctgttcctcgtcgaaccaagagtgtgggtgcagacccgaaaggaaataacaggcagctactagcaaagtcatccttttcaaatggatcatcaaatggaaaagacgacagctggaagggagatatgtttcgaaagtttgtcaggaaagcattggtggatatggagaacgtatgttctccactccttggaattttttcctgaaacctctctcgccttgaacgacattctgaccagagcttcgttcgttcgttttgttcgtccgtttgtcctgttcatgtctcctagggtgactcgaccacctacgatgatctcctctctcagcttcggcccgttatcactcggcgttcccagtttcccgacccggatggcgaacctctcctcaagacgtctctaatccacccgctcctagtcgctctgacatcgaatgcttcccttctcagctcaacacacaagtcattgatcgaggccatcattcactttccttggatgacggctaatgatacgtttgtcaaaagttacatcatcctagtcggggtcatagcaaacttgagaatggagtatgtaggcgaattggtcaagaggtgtatcaagggtttcaaatatcgtttgtcttctttccacttgttgtgttcatgaccccgcgaaacaggcgcctaactgtgtactcatcatcggtaatgcttctgtcgtgcgctcaacagaggctcaatttagaaatctcgtcgatcgagagaccgagtcgaacaatctgactagaggaaaggtctttgagcgcttgcatacgcttcttactcatctgatttcacttatccccacccttcccggagtaatccagcctatcttagtcaagtcgttcccccacaaacgggagccgaagatcgctcatctgacatacatccgaaatgcgctccgagtggtcgaatactgtcctgttctgggagataggatcctagcagccgtggttgacagggccattcaaattgacgtatgtgttttcttctgccatgcacatacacgcatatataatttttcctaatcctctttcgacttggaatgtcgctcgattgattttttcaactcgatccaggtggagatccaggtggaatgggacgatatggacgaggatgccgacggagaagaaggcaacgaggatggtcaatctgatgctgaatctgacaccgatccatttgataggttgctcgcagacgaagtagacgatgaggaaccgtctgatgatgaggattcagattttggaggtggtgattcgtctgatgaatctgacgacgaggccccccctgtcacagagaatctctctctcgaagctaaacgagagcgggtcaaggttattaaagagatggtctcaaagctagatgtgattttgaatacgactttcgagcacttcaacaaactccagaaagctacagatccaaactattgggttcaaacgtctgcttccaacagtttgagcggcgtggatcctgtgattgggacgttagtcgaccccgctttggcgcttggcctgcagactagtgttccaactccaaccgggaccaacccgttcgatcggatcacttccttccctttccctcctacgcctgcggcgtctcgtccttctagtccatccgagatcgaacgcaatcgtacgcttcggctgtctcaatttcactcgttgctgtccatctttgatgggcatattcttaaaacattcaaatctcggtacacccagttcctcctcttttggtacacttcgcttgacgcagacttcaccgacgagtttcaagggcttctcgtgtctaaagcacttttcgagaaagatcagccggatgtcatccgaaaagcggccgcgtcctacattggttctttcgtcagccgagccaagtgggtcgatggtgttagtgtgagaaatgtggtaaaactgttatgccaatacctggaagctcagatggagaccgcaaagttatacccagagctattgtacggaacatcctccagcagtggcgttgggggaggaggaagttcccagaaaggatctatcggaggcgtaaacgggcagggtgggctcggtgtgttttatgccgttgcccagtcggtcttcctcattttctgcttcaggtggaaggatctggttggcgagggggatgagccaccgagacctgatgaggaggacgtactggacatggaaggagatcttggggaagagagaagaacaacaggttgggcaccgggtttggacgtcctgcagaaagtggtctccagtccattcaacccgttgaaggtacgtcttcgttttttcactgctccttatcagcttgttctgcgaagatagatgctttagacccttgacgaacgaactctctttttttccttgatttctgaaactcatatcaacaggtgtgctctcccaacgttgtcaagcaatttgctctcgtagccaatcagacccgattcctttacgtataccatatcattcaagcgaacaaccgatcatcctcttctgcctccgtggacgtctcactgccaagcccttccgtcgagcaagctcagttcctttccgcgggtaaagcgaatgtgccgatccctcatctccgagactggcaacactctacgatggaagaagccgacctcgactcattctttcctttcgatccctataacctacccattagttcaactttcatagacgggatttaccgggattgggagggcatgtctgatgaggatgatgatggttcggatgatgatgacgacgacgacgactcagaggacgaagatggggacatctccattcctgacgcggtcgagagtagtgagagtgactctgaggacgaacgaactagacgagagttgggcagcagcatccctgagtccaaggacaaggtctctcggttgacatcgaaatcgattgaaggtcgtcgtcccatcaagtttggctctggagggttgtcggtcagcgcggacgatcaagaaatcaacctgttgggcaaaagtttcgatggcggaatgagtatcagtccggcttttgcgaatgggctcgctggaaggatgcaacaacatcaggaagctcggtcgtagacacatggcaacctttccttctttttctctcctttattcgttcgaacgcaatattcgtctcctacttattaccatttcggacttggagggcgttctcagcgtaatcactattcacacactttatcattcctccctgcttacttctctcggattcagttgtattattattctgtcaatctcttcgatctgtcatccttcgtaccacactcgcatctcctttcctcctttgtattaccatcatattcatcccatcccactggttcttgagcattaatcattcttgtctcgcctactacactctcacagctgttcgatcggtagcgtatctatatatccgcttggttttccttgggtggcattgttatgtttatgcatcgcatgcatctgtattcgtgccagtcttcgaggttttgaaaattaaggcgaagcattacattcatcagggtcattataaacaggagaaacaaagaaagagagaattggaagaaagctctaaagatatgtctgaatatgttgttgccttcattttttttatcgaaaattcagctgttaaaacgatctcatcgagtgttcatcagatacactgagccgatcatcgaaagaaaagatccaaaggcatggaggacgaatactggcttactttaagtaggaacatcagaatgttcataagtacatgcgcgctggctacgcctacaagttcgaacggagaacatggcccatactgtcagtctatcaaattttcccgattccaaggtggtataatggtgtttggatctgagggagtgggaacgagaaaggttttgacctaaggcgaaggagaggaacagactaacagcaagcaggtacgagatctggataatcgcgcatgacgtctagaccaacaccatttatgtccatcgagaacccccatcgacaaattgcattagtagtaactgatgtgatgatttccgaggcctaacatcgcgtcaaccataggtgcaagaagcaaacgtacgaagccgtgtttgaagaaagacgcgaaagatgagcaaacaagttaacttgaggaaactttaactaagaagaagagagatgcattacccagatagcagaactggctgtgaacgttaaactaaaagtgtaatcatcgtcttggaacaggataaagatcaagtttgagcaaagaaaaaagatgagcaagttactgagtgtggaaaaagtctctgtgatagagcagggcagaaatagcgtaccggcattcccgaacttgaagaatggatagacaacagagttgggcccgctggatgaagatgatattttgatgagtttgaagaatatctcatcactggaatatatatgcacagaagagaaaaggtgctcactagtgaaggatggcagcatatcctcttggtgtgagaagaaagcgcgaaagagacaaaaattgagtcaaactaagatcttcaagatctcgtgacaaccagatggttttagaaagagcatacaagaaggcgaccatcgaaacctacacaatcaggtagcgtagcaaaagcttgtcagttctttgaaatatgcgttgagaagaacagatagaactactcacattctgcgcgacagatttagcatggagtcctggacgaattgttggttttgttcaagttgttcgaatcagaaaactcgaaaattgaagagatatcatctaagagaatgtcagaagcgaagaaaatgtagaccaaccaattgctagactttctctatgctccggcagactcttgtcatatcctcttatgaacactaggaacctatgaaagactgccgacatttgaagaggatagaggatgatgttgaccagcctgtaagaacgttaattaacatcaagatggtgttgaacatttcacgatggtcgtgaaagaaggaagagaatcccttacgtgctaacgaattgaacaagaatgacttttaaatgagaagtatgttgttagaaaagtgtcaagctgttatctgccaactatgacagatgcttgaaacaaagatacagaaagtctcacagtcggcttgttggacacacacacacacacacacacatgtttaatcggattgttaattggcgtcagcattgttttcacagaatagaacgacacggtaaattcaagtatgagagaacgcacacaaagatctcattctagcgaacaaattacgatactgaagtattccgtgattgatattgataagatatcagcttggtcgtctttctagcctctttactaaaaccaagacgtacgaaaacgaagctaaagaaggaacgatgattgatgagctgatcgagtctacaacgataaaggattatataagataggtatctaggatgagaagactcactaaactaaggctgaaaaatatcggaagagatacagcagtcctctacttcgaacttttcgctcgagaatggaagtggatacaattcctagacactgttgatagaacggaagaaagagaatatggagaatggttgtgtttgtcagagagcaaattttaggagtttcgagtacaaaagaagaggctcactgtagttgttcctacccactgcatacacaaatcgaaataagactgtgaggcccccgactgcaggcaaaaattgaggtatgtatatacgtacagagtaaacccacatggcagcatccaaactcgtatggggcagggtactcaggtatactgaggtataagctattagtaaatcctcaaactagtcagtcttctgtgtacaaaccaaggcgagacaagagcgcgaaatgcccgtattatatatacaaaccttgtccagcgatgagtgcgaacatggcgatccccaaaacggccatgaaccatagaaaacgaagataagacgcagggattcggccggtcaattggcgttcaagaaaagttcgctgatgaggggtgagggattttcggtattgatgtctctgatattattcgcagtagaggtaatgaagaagatattttaggaggttactgaatgtgcgcttgttctgtagataaaccagagtagactctcaaaccttgtcgcgcttcagtacagaaaagcatacaatagctcttttcaggagaacgtgaacaacaccgatagagaagagagagaaactcagcaagaaagtaccatgaccaaagcaaaggtcgtaagtgtgaagaagactaacgggcagcccattgtagcaaacgttagtacgatccagaaggctgagtaggcgtattgacaagcaaaacaagttttggatctcttcttcagcccaaattcatgatactaaggaaatgtaag

SEQ ID NO: 1928 - DNA, 6791 bp, Xanthophyllomyces dendrorhous
ggaaatgtaagtttgttctttcaaatggaagaactaactttttcgttcccagtcgagcccgccagcttgatcggacccctctctacctagaaacttcttgattctaccaacgagatcaaagtgatgtgatgaccaaccgatgcacaaagctgtagcccagaagaagaaataggatgccttcccaccgattctcctattccgaccagaggagaaactcattagcaggaatatgaaccagactatgataaccgaccaaagaagatgtaagttgaaagaatgagattgattacttacttgggccaccagttgagcctatagagatcgaatagcttcgtcatgaacaacaaggcgacatgaaggtacactagattttatatcacagagagcgcaatacatataggttaagaaagacgggtaggaagacggacccctcgcttgaggacagaagtcagaataacttaacaacaacatgaaactcacgtccataatagaagaacaggaagaagaagaagttgacatccaaaggaagttgctccagttggccctctgggttcgttccgtttgacgcagttgtcgtgagtgcgctctcttgtgtaagggagaaaagtaaagacgtgaagttcctcgaaggtatggacacagaaggtgccgaggaccaaggtgtccgaggccagtgaaagcctagttcaggtttatatctttatggaaaggggaaatacaaacaattggcatcatatcagacatcaggatcagttgggtcatgtacttgtcagaaacgatgcgacgacaagcacgcagaaggaaacctacgggtcagctacaggaaaaggggtcgctacccagagccagacgacgcaacatgggacgagtactaatatcgaccatcgtttccaccaggttccgagccaagactccaccctgcttctgctcggcttggtgaatgagaagaaatcaagatgtcagaaatcgtggtcagggtgtttggatggatcactatatgtttacgatacttggctgaaagatgcttactctcatgagcgagtaccaccagcccttttccgctgcacccggctcgcttatactgactcctctttctcttctttgcttcatttgggctctaactcctggctgagtaaagcgttgatgtggtccctgagtcgtggaacgaccgttcgagctggaagagcctggtttcgaatgctgaactcggtcgcctatgtctaacgagctcgagaattgagctggacctcgcagcttcgagggagatgcctttacatgggctttctgatgatcggaacataacacataaaaaatcaactgagaataaagctcgtttgatgctgagaggatgaggctaaaaacctacgaatctgccggcagtgtatcgatcagctagagtggtccaatgtgtattggccaagggaagaacgccagttcagacagagacgatcattttgattctaccgttgcttgccagtgatagaacgaaaggaacacagacctcgttgagattcatccccattaccactcgagaagggtacgaacatgatgagctctcaggaatgaccgacttgtctggacggtgtatgttgtgttgttactgagagttcactttcagctcgggacgaaacttcgggtaaaccctacggcgacattctacacatcaaccaccatcaatcagttacggacgacggtctactagccatgtcctcgcccgtttcagacaagatcgacacattcctcaggccgctaattgcctccaagcagccatattctcacaggccattcgtcactctcacttatgctcagtcgttggatggcaagatcgccgggccggatggccagcaggttcagatcagtggacgcgaaagctcagagctcacccatcggttcgtctgctcaggttgccttttatctgtctcttctacaggtaggcaatgctatctcatatttgatagcgctaatgttctatccttcctcttggaatgccaatacagattgagatcaatgcacagcggtatcatggttgggattgagaccgtcctaaacgacgacccacagctcacaggtatgtctgttgatgatttttgggctgttttcttctatttttattctttcatgtaggttgacctagtcattcttctgcgtatcttcaccaaatgtgtatcatcgcttcatctggctacagctcgatttgtgccgaatccatccgaggtatctcagcctattcctgtcattttggacgctcgctgtcgattcccgctgtcctctcggttgatgaagaattacaaagccggcgttggaaaacgaccttggatcgtatgtgattctgggatgagtctggctaagagacgaatcgagctagaggatgctgggtgtcgaatcctggtcatgcctacaaagggaactggttcgtctcttttctctgtatctcaaagtcaaacattcgtgctctcacaccttttcgtatcttctgcttaaaacaaaattaggccgatttgacctgcttccgcttctggacagactgaatacgtcaatgattactcatttaatgatcgaaggtggagcccgagttatctcaagcttcttgaatactcctaagaatacccttgacttggtggtcgtcaccgttgctccggtcttaatcggaaaaggaggtgtcgaaatcgtgaacgtgagcctctatgtttcgcctctgtgtttgaacgaattcggttctggcaaactttgcttgttgtatccttctgcggaattatcttgacttactctatccttctgatgtatgtctttgaacaaataggaaaactcgaccccttctccagagttgctttctctcggaacagagactttcggcaaagatgtggtgtttgcttgtaaagtccgacacagagactggaagttctcgtagaggcctcttgacagtgctcgtgttgggatctcatctactccaattcaatcatctaccatcactcttcctttctcttcctacacatctcgtttctctagtcgtcctttctcctcttaatctgtttgctctgttgttggctctagaaaatgctttccttcattttcggaatagataagaacatgcttctgtcggtcttgactgggtttatttttttattttgtattttgaagaaaaagaatgtcttccattctgtgatgggctggaggtaaaacatatatagactattcttcttttatacggagctttagctcttccatcttcttcaaacatgatgtcgcgcacaggttgataaaggaataaatgatactgggcaaacttcatcaagccattcgctcggtcgaatattgttgaagagactctatgaaactcgccagatcttcctttcggacctcgacgacagacgtatcgaacttgtcatgtttggcagcagcagccgaatcagaggctgcgtcttggaaggctagaccgaatttactatcaacatcaagaagttgaagaacgggagatcagttatgctgagacaagggaagaggtagaacgggaaaaggagaacccaggtatgtagtcttgttctttatcctcctaagaacacttactttttacgaacgtctccaaattcaggcgcgcccgtcacacccaccacgacatacgttcctgcgctctcatctagacaggccagaactacaggcagactcttcgatctcctcttcccttcttcgcttcttccgccaatcgaactcatgcctgccagtcgatctctcaatgcgtctaccaaccagagcgctagtcgagagagtgtcgagggattgacaaatagggagagatcgggtccctcggtaattactgctaaacggaaccatcgaagggatacaatcttggacttgtcgatgagagcagaaccttgtcggatgatagctttctggagtgacatgcataaagggagggaggcatgtaggagtgtaacacttgatgaaaagacacaggaacaaggggtagaaagatcagctactttgctgaacgaatggtgcttatgtaccgaagggcattatacagtacgatgaaggtcttactctccacctgatcgaagcgcgtcgaacgagctccagaaacacttctcccaagcgcgctcatctttctttctctttcgctctccgttcgtttcctcctctttgtcttcatcttcgtctttatcttcagcctctatctctgccgtctttttccctagaccattagcatctaaactccaaattctagagcttccgaaccactctccaccacctttacttccctccacttcaacctctacacggactcctactgctgcttccaaaagtgcgcctacactctcgacggcgtcggctgctgataacggaagagaccggaaaccgtacgttcgagtgaaggatggataagtaagttcgacaaggccgtattcaggcgcgatagaatccattcgggcgaaaagattacgcttgagacttatgtccatatttgtatacgcctggtggcattgggctaacgagaacctgttttgaaaagatgaaagaagacccaacaaatctgtaattagacctacagaacagaaagaaagaaataaaataaaaacgaataggtatataagacaaaccccatcttggctagcattccttgcagccgacccttccctttctccctccatatgcccatcttactggccacgtaacccgaatgaaacatcgagtcgtataagttccaatgtctatacatcatgaatctcaattcttcactcggacgaattgcgtgatcgtccggattggctagcgtggatgaaatagcaggttctgctgaggcatgaccattgcgcgaagtaggagcagggactgtcggtaggttcaatctggcaacttcgtcagtgtagagggtgtgaagaacgtcatatctgtctcggtcaatccgggtggcgatatattgatgcgtgaggcctaaaatagcgagcctgttcgtaccatgatgtttccgtcagccgattcgagaagagacagatcgttgagtcaaaacacttgtgtcttatcaaaagtataaagcagaaacagaaggtacataccaaaggaggtcgttgtcctctctgcccagggcagaagcaagcatataaactgtggcggcgacgctttgaccgaaatgtgttccagcctggtagtacctgttgatagtgatcgcgtgggcgcgccttttagaccgactgagtggtttgggctgatgtgatgatagggcaggtatgttttggtaagaacagtttcagatctgtctgttggggaaaaaagtaagaatgaaagatgatcatgatatgaacatgaacgaacctggccgctttcatctatctttcgacgacggcgtggaggttgaccttcttcgtcttccgagttactgtcttcatcgctccggtcatccctatcggtattatcttcttcagatgattcttcagggtccaggtcagaatcgtcgtcagagtcagagtctgattctggttcgtactatcaagaccgagtccaaatagtatctaacgtcagtttgatttaaagacgaaggttggccaagatggttgacttacctctaatgcttcaaatgcttttcgctctttttcccatcgttttccaccctgagcaatatcttgatcaaaatcagcgccctcatcgccccagacccacaccctctctctaccttcgatcccaccaccaaacaggttttccagattccatggtcgatgagcatcgagcacatgtagatgaacgttttgattgagcctcgttaaaaagtgggatgataacggaaggagcgagcctagggagagtaaaacgagcgtgtggagttcagaattggtttcaagagactgggttcgggtttcaagatcggcgtagccttcgacggggaagattcggtgaggaatcgagtctgaggtaagaagtgtggtaaacattctttgtaaatggagatccagtgagggaaaccccgacaagtttcgaaaggtaagcgctaacgactggttgaacgaagagagacagagagacagagaagagaacggtttctattctgacctggcaccacacacaccatcgacatcgttcgccaccatgatcactagtccattcccaccgccctgaccttgagcgatagcttttctagagcgagcgacgatctgggcgtaagcttgagggtaagaaggtgatagctcatccgagtaggccgagggaataggaagcacgggcatttgaatgcggatatttcttcttcctgttttcttctcttcccagatacctgtgtctggttcaaaggaggagtaaaagcaagaaggacgctgatgagagacttgggtagacacaagttcaaagagtcttttctttgctctcgctcgtttagttggatgatgtacgttggtcgtttgtttgtcagagttagggttaatttagatgacgcgtttcgttcggacgcgtttgaccacaaacgacgcgtcttagcatagactcgcacggcacgtatgacgaatgatgcacctgaagtgtagcaagggagaaaggacgatggtctcaagaggagaacgattgtgagtcaggtctatagtttgtccatacgcgatgctgatactaaggtgtcaagcctaaacagacacttgaaatcctatctttgcatgtttgtatggtggtttgattgaacggtgagtgtatcacatgtgttgtcgtatgagatcgaacatatatatatatcacagccaacgacacacactgtatatgcgcaacataaatgaagaagaggacaagactgttaaagctagatctgcgctgtacttggg

SEQ ID NO: 1929 - DNA, 25210 bp, Xanthophyllomyces dendrorhous
ggtatgcctcatccggatagttgtatcgttttatctccatccattcgtgtatgagagtgaggagccaagtacttaacctctgccagcgaaggcatgcgctgcttctacaactcggaaccacaactgaaagggtagcatgtgtccctttgtcgataaaaagaacaggacaacatgaggaagagaatacttataataaccgatccttattgcgctgacaattttctacccgttaaacatctctcttatattctcatcggatctctccaaaccaaccaagcaacctgtctcattcagtgttctcttgttgtcgtgtgtatcaccctttcacttctcgtttgtgctgtgcgttgaaccaagagcaaaccacacgcctacactctccgagcgcgtctcctaaatgatcggccacgtgtttttctttaggtcgggttctaggccttctgcttagtcagcggagtcaatcccacccgcctttctatcaatgccttcaaacacaacgcatactctcacttaacccccccgactcatcccttgcttctcttgctttcctctcttcctctatctctttctctcggttggatataggaaggacacatagtcatacacaaatactactttaaagccaaaccgggccagaatcgagtatatagagagagacaagagaatcttggaaggctttgtgtctgtagataccgcaacattttcagcagccgtcgcaccactactaccaacaacagaaacaacagccgcaacttttccagactcgtccgacaaaagtacccttccgtcaggtctctctccattgaacactgctcagatcaacccatcctctgattcgtctatcctaatgcatgtccgggaagaacttggtatacgttctggatcagccacatctgttcacatggaggagagagagaggtgctaccaagccgctgggcgtaaggatgagaatgtccagatgaattatgagcacgagatgacgagagtaagtaccaagttttcttcttcttcttttcttctttatactcttcaacctctgtcctattcccttggagcatccactacacaactcgactatgctctcgctcctggaagatcttccactatagagattgaagcgtggtttgagacgagaaaacgtctggcttcttcctcttcggttctctcctcttgtcattgagtttatagagtcgcatcggtatcataagcaccggactgatttcgctcttggccctttctcttttcgtgatgaactcttaaaaaatcagtctcatccagacactaccgtcgagcccgcccgactgaatccttatcatcttctttctcaatctcaggctgaacatcaatacatccattcacttgatcttccctcgacttctactcctatcttgcccgaagatccctcgtcctcatctctaccctcgacacgtaacctacccagccagaagatacatattcaacaggcttctaacaagcacggagtacaactctcgtcaggcaacccagaagaagagtcaaacagctcgagcgcccgactcgtaaagaagatcaaaggtatagctaccaaaattgatacctctagaggactaccaggatcgagtgaccacattactgttggcaatggatctcccatgagaaaccctctcacccatgggccggcaggtcctccaggcccccatcgcttctctgcaccccctagtccacctcctagcgatccagatcaatccagtgatgagtctgacggagagtcatccagcgattctagttcggacgacagtcaagatgaagacgaagacttctcggagactcctcggtaccaggcaaccacggtctcccaacctttgtcaacgacatcgccgccgccattgacatcgcggctgccgtcatcgtcaccctcacaactgccggtgcctgatacgtcatctaaggtcgactttgctcctccgctagctcccgtctttggccctagcttccttcttgaaagcgtagccacgacctcatctccatcttctaatgacatccgaagcgacccggctaccagtaatgccaatcctaggcccgacatcactaagcttgagcccgagttcacaacatcaccaaccgaaatacagttcaactcttccttgacttctgaaccagagcgagaggatgatctctaccctctgcccacgccaggtcagatcaaccaacgaaagagtagcattgcatctgctgcctctatcccaattccaggctattttgatcccgcaccttcaggtccggtctctacgctccccattttaccttctcactccggtccatcgatttcgtcggcgcagcctccgtcgaatttgattccctctacagtcgcacccacttccagctacccatcatctttaccacatcctacgatcccaagacggaacactacgggctcacctgttatcagtccgtccgtgccctctacgtccgcctcagcaaacttaatggctcagaccactaagtctgggtcaggacgatccatgtcagtctcaaaccatcatcacctacaaactcattccagaccgatcacctctcccgtgtcttcctctttaggccagacgacacccatccctggaattgatggcctcggcctcgactcggatattctggcacaagcagaaaagctccgaaaagagaggctgtctaagagagcaagaaaggctcaactggaagaagaggctgccgctaaccaattgggtggaggaatatctactggcgtggaaggagtgcctagtctcgtgtctccttcggctggaggtacatcgggcggtccaggaggacttggaagcgggctcgacggctcgctcggtctaggaggcgaccatgcgacgtctggagttcatgatggatttgggccagaggttgcccaagcctatgctcatcaacaacatcaacatcaccggacaggttcaaaacatcaccatcatcatcatcaccacttgcatcggcagaagtctcaacaacaagcccaaggagatgtcgaaggaccaattggagttgccgggtctgaaggtaccgacaatgaagcccgagcggcctctggagttgctggaggacgtcagatgtctgagaagtcacaggcaagaggcaatcatgatcaggaagatgcgaaagtcttggttggaaacttgatcggagaggaccatgtgaactatgtgttgatgtacaacatgttgaccggaatcaggatcggagtacgtgttctctgttcccctctgttctcttcttcttcttcttgccttcctctgttcctcttttggagagatgacgaagtctaacaagtcaatcgaccaacctgttcgcaacatgtatcataggtctcgagatgtcaggccaagattgctagaccgttgacggatgaggattacaaagctcgtcacaaattttcgttcgatatgtacgtaaatactattctaatgtcttccgatactaattactgcatggctgatgaaacacctgtcgaaatttcttgtgaactaacagtgttggaaacgagctcaccccttcggcccgatatgactgtgggcatctcttctctccttcttgattcttattcttattcttattctttctcttcacctggttgatatcttccttatggtttcacagtcaaattcaaagattatgcaccttgggtattccgagatctaagagacaactactttcatctggacgcagcggactacttgctttcgttgaccgcaaagtacatactctccgagctaggctctcctggaaagtccggctcgttcttctacttctcgagggactaccgattcattatcaagacaatctctcacacagaacacaagttcttgaggagcatcctgaaggattatcacgagcatgtggtcaacaacccgcatacgctgctctccaggttctacggacttcaccgagtcaaacttccgagaggtcgaaagatccactttgttattatggtatgttcttatacagttagctttcttcgagtcgtatccttgtcttctgacgttaagctgtattttggtgccatttatcagaacaatttgttcccgcctcaccgagatattcatgaaacctatgatctgaaaggatcgtcggttggtcgagagtacccggaggaaaaggcaaagacgaagaaaggtgctgttttgaaggatgtaaactgggttcgacgaaaccgatcacttcagcttggaccggagaaagcggcgttgctaggcgaacaactcaagagggacgcagagttcttgaaacggatgaaaatcatggattactcgctcttggtaggaatccacctgatgaagcgaggaaacagggacaacgtcaggcggaacactttgcaggtgtttgatgtaagtcactcgaactattttgcaattttaggagaaccagattctgatgttatcgattcgattgctcgtttgttcaatcgcggtttgctacaaccagccatctcaagcgcagccgatgcctaccggtttgaaccgtcgacggccctcttcgatacaaaattcggctgaccaggtcgcgcttcgaaaagccatccaacgagccgatccaaaaacgacaacgccggcaggaacgactgctgtcgatcatctctctgaatccgacacattcgaccgaaagcatttcctgttctaccaagacgaaggaggtctgcgctcgacggacgagcagaacgaaccgctggaggtgatttattatctaggcgtgattgacatctgtacgccgtactcgttgataaagaagatcgaacacatgtggaagagtttcaccgaggatcgccatgggatctctgctgtgcctcctacagagtacggaaaccgattcttgcggttcttgctcagtgttatgcctaatgccgatcccgaacttcgaccaataggccttcgaccggaggatataccggatgctgacgacgccaatagcaaagagcacgttcgggagaagaaggagcgacctcgactaaagggagagtgagattgacgaatcatccttcctctccctacatctttctttcgccccttagtttcttggttcctcaaccttcttcctttcttttcctcttttcctctttccttttttcaaccttggacttttgacaaaactctgcccttcttttacgaccatttcattcgcgttcagtaattttcccatctcatttcttcttttctactttacgatctctcccttttttactcataaacaactttccatactctccgttcttctcttcgacacatacagcatttctttcatcgttcctcctcattgatttcctctcctcttttcttaaaaatcgatatcaaaaagaataaagcatatagaaagcgagacgggcaagcaccaaaccttccgaaacatgaggaaaatgagatcggtctgacaaggatgcctcgggcatttatagagttcaacgactgcttctacttccttgcgcatggttctttcgccgtttgtgattctcttgtgtgaaacataagcatgaatatatggacatctacttttcgagcagacgaaaatgaggcacatcctctctggcgtatctagaggcctccctacgtttcttgaagagaacagcacgcagaattttgaacgctggccctcgagcttattcgggaaaagataaccgactgggctaaacaaggactctccctaggtgtatcctcgtgtcaaacatgaacgtcttcaatcctgggtcttgctcgatatcttgggtttcctggtcgtgaaggctagatgtggttggtcgggaggtcgattttggatggtcgggttcggtggatagatcatcttcggactggtaggtgaacgtcactcgaagggtaaactatttggaaaagaaaaagtcaaacatcgatagtgaattagaccagaccagacggcaaagaaaaccgacagatgatggaagagaagaatgaggagagagactcacatcgatatcacctacaacgtcctgccccaactggacatccaaccccacctttgtcatattccctttcttccaaatgaaacccttctccctctctcgatctctcgctatgagcccggaccgctgtagggagctccgtttccgtctcgatgcttcgctctcttctccgccaaggacgtttctgtcaagaattcgatcgacctcatctgaaccggatgacgatgaatcctcagctccgtattcccatgggtcgataaacgccgagacaggaaatgtagaaatcggtagactaatcaagtatggcgagatataaggttgtgaactagaatcggacgaagacgaacggggggaagggaaggatgggtggatgacttcaagatggacttgtatcggatcaaaaagggggttggtgaatgccaagtggaatgcatactgatccatcatccgaacaaggttatacaaggaattaatggatgcagaagaacgatgttcagacagttagcgcaaagaggaaaaggagggaagcggatactgggagaaagacatacgtttcctcctctatgtagttcgttatctgatcctacgattgcgctagtcccggcaccagcaccactggtagacgagctttcagccgtcatactagcccgtcctggtctgactccaagcttgctggctgatcggcctccaccgattttccgagagacctctacggtcgggatgtacgacgcagcaaggagcttgatcttgaatcgagttgattgggctttctggtcaggcttgatgaggatatgccggcaggccgagcatcgtttagtctttttggaacggagtgggatccgtagtggtttaagatcactaaggatgaatattgtagatgattaaaatgaacaaaacgcctcatcagacaggtctgctgaagtttacaagtcagacgggctgtaagctggagcctacctagtctgaacaggctgtctccaactgtttgtccatctggcctcaagcccgacgacgtcgcacaaactgtctttggcgcctaaccaatcgaccaactcgggctcgcccagccgacctgacccgatctgatcggcaggtaagtcagcgtccattctcgcttcgtacgggcgaaggtcttcgatcccaaacttgggcgctggctgccgactggaccggctggttgaagatgctgttctgagggagggaacgtcccgtcgaagggccgaggtggctgcgagcaaggatttgtttgtagtggctgttgccggatgcgaagaagctgaaagcgctttcagatgaggctcatagtgatcccggagatgttcgaactcgaggaccgcaggagaggcgtcttccaaccgctggagttgcactaagagacatattgagatcagatttggaccaacatgggcagaaaacaacatgggagaagtaaacacgacgaaaggtacgaacaggccacacccgtcggcttctcgaacgtgattccgttctctgccgagctgaagcgacaatggttgcagctcaggtagtagtaaggctctttggaagtctctgaggaggagtctttggaggctgctggatctgtagctgccggcttggatgcgttgacggccagcggactggtacatagcggacaaaggaagcagtttcgggcacatctgctcgtagcaatcaggcttacgcgtcagcaatcactctcttcttcgtcttctggttagccggagaggttgagtgaagcgggctagcgctgtatcaaatgggaccgacctgttctgttctgctcgaacgctggctggagggacttcaaatagacaatgggggcagtagtaacaggcaacctcctcttgaacgcagcgggcgcaccgaagctgatcgcattcctcacagaaatagagcgactgaagtggatggaacggtataagagacgatggacgaattggataaggcagggcggatggatatgagggcaagcatgggcaatgatatgcgaccaacggagtactgctgctgttgtcactgttgcctttgcccttgttgctgctgctatctttactgctgctcatcatctctggccaccgacggatggatggaggggcgagaaggtgaaggacggcatttagaaaagactacgaaccttcctaatgatcatcatgaaaagtactacaacgttttctaatgcttgcctcacagatctccgatagcatatacccatcgaccaccatcatcagcaccccatccgtcgagatcaagtgtctggagcatggataacagacagccagatcactttcggagatctcggtcgagatccccacataggttctctcacaatggacccccacaggctcaggccaggtcgtacaatcgaggtcctgaccgttgggccgaccaccagcagccgcaacagcagcatcgtcatcatcagccttaccaccaacaacagcacataccaccgcctccacatcatgggcagcatgattatcctcaccgaggagatattcactcagaagcaaagtatggcaatccgtcctatccgccgaacgaacacacatacccgtctagtcaagccagttttcatagccgagccggatcgagttaccaacgggctggacaccctggtatgaacaaagaggaccgaggagagcctgactatggagactatgtgccgccttcggaaaggaggtctccaaccagatccaacagagggagagaagactgggagggaggctatgaagccgaacgaaatgggtatgaagacagggggcgagacagagctggctttggcggaggagggggacgaggaggatttcactctcaagggcgaagcgacttcagccaggttcgttttcgttcagacatctccccttctggcttcctaggcttcacttgattgtgtgcatttcatgggaagcttactcttcttccattcttgggggtcgcgcttgcgattcatcctcacgaacagatccaccatccaggagagcgaggccaggcctaccagtccaatgctaatgttccttcctttccgccctctaatcacttaaaccgacctcgatacccgccttctcaggctgagccatggtctcaatctcagccttaccgcgatccgtcaccatctcgagcgtatacagcgtacagccaacactcggctaatgaccaacgggctccgtatgatcatcgtcagcagcaacctttcgatgaagtctatggaggctatgatgatgagtatggcggagcaggtaccggaggaaagccaaagagaaaggagaaagaagggccgtctgaagtttcgaggcacatcatcttcctaggattggatccagaaatgaaggaaacagatgtgagttggctggatgatcataagctcgtggtgtcatcggctaacgtagacctgttacgacatgttatcaaatagttgttcgacttcttgaaggaacaaggcgctcaagtggagagtaccacgatcattcgggacaagatcacaggtgagcgaataaacaacgtttcttattctctgttgtgataggcttcacttctaaagccgttcgaatgcttaatttatcgtacacgttgaaggcgcatctcgaggatttgggtttgctctgttcgcccacaccaccgctgcatctactttcttacactctcacttcccctctatatccattcccttcccttctgatgcgccccatcctcgtcgggttaaaatcgacttctccgcttcgccaaatcagccaggtcatcagcctcattccaagaattcttggggagccactttgtcatcaggctctagttctatgtctgacggtcgcgtaaggagaggagcaggaggaggaaacgatgggatgcgggacattggagggaatgaaggaggtgaaaacagagtgttattgattcgtggtgttgatgtcttggctcgatggaaggaagttctcgatcgggttgttcaggaggtctttgagttttcaaagagccagacccagacttccggccaagatgaatacaacaccgacagcacacggccctccactgaagtcggatcgactttcattacccgtctgataggtatcagggataaagagacaggtggaagctggggcttttgtttcttggaaatgcgcacggccgagcatgcaatcggtcttctaaacagagtactgtctccgacgattcacccaactgggtttagattggacccaagtccgaagccggtgtcaatttcttatgcgaacccagcggcgttcggaccgaagaaattatcgtcagtcggaataagcggtcagggcaaagtgatcgatggaggagggcagttcggtctaggagggacatcagagactgtcgcttattgggacgatggcgcagagctcgttgaagtttgggcggaaggagggaaagaggcagctgctggtgagtgtatctttgaggactgatgagcccaacaatatatcttcctttctcgacttctcatattgatctcttcttttcttcttacgcctcctattctttaacaccagccgacgccgaactagcgagcttcctttctggtctaaaggccgatcctaatttcgctttcctgaccagtaaagaaggcgcacgagtaaatgctcagcctacctccgcattggtgtcggcatcaaactctgcagagtcaaaaccaatatctagctctgcgcataagaaagaggagatcatggtgccgattgcaattggagggatcagattacccaaagcgggagctgaaaaaggtcggtctcctatcttgatcggtttgtatccagggatgggaagataagctgagaggcttatgctgttgtcgtttctgatgaaccttttctgtcgtttccatagtaatgaaatctgtctttcaatctgccgaagccgatgaggaagaggaagaagagagcgtaagagaagagcgggaggcagccgctgccaagggtacgactggctcattttggttgattgatagagaggcgctcagtttttcctatcaagatttcactgataccaaaaccgtgccttaaatcacagcgaaaggactgtacaaagttcctcctatggcgagtagtcggaaggtttgtctttttgcctatcttgttgattctccagacttattatctgataaactgattcttctatgatacatcgctgtcgtctttgtgcagattgcaaacagtatcaataagtggaataccaaacaatccgaattagcgtcggaaccggccccttcactgagcgcaccaagctcaatatcttcagaaaatctaactcccgtaggcgttcctcagtcaaatgtacctgactcatttcttcctacaaagaacttgccgaccctctgcaattggagaagttgtcatcagaatcatgctcatcaggctcgcttgactcttatctgtctcttcttatttccgggaaccctatgcgcagatcatcaaccacgaagaacccgatggcgagtttgagttctcggataagatcaagttagcctgcttgctctgtcagcgacagctgaaatcgctcgaactgctttccaaacacaaccaagcgtctgatctccacaaggtttcttgaatttccctctcgtatcgctgacctcctcgagcttctcttgagacctttcttgaggggttttactcttggtgtttcccgagaaggatctccgaactgacaacatcaattttccgaccctcgatctgttttcttggttaccatagaaaaacctccaagatgccaccctccgagaggtcgctcgaaatcgagtgaaagccgcccgagaagcggccggtctagcaaacccgcctacatcagagtacgtcgaccgggcctcccaacgtcgaacattattcaatcaaccggaagcacctgtaccggtttccaagtcggccaacacggtcttcaaacggaagttcgtagaaggtccaacaccgatagcccaaccggctccgccaccaccgccggtccctttaggtcaagatcagaataacgtcggaaacaagatgctcgctagtcagtaatatcattcacaggacgaccgatagacttctcctttgattttcttattggcttcactcttattcttgactcttggttctaacaaactgacgaattcattgtcctgactcacgttccttacgcttcgtacatcgctcttagagatgggctggaaggacggtcaaggtcacttttctctttcaaactcactctcgtcttccgttttttattttttttaaaaatacttctgacgggatgagcttgtgtactaattctgctttcaaccatatcatatttgtatccgttattaccgggcatcgacccttccattcgattttcccactctttaccacgaaaaaaggcttgggtatttctggcgagggaagagtagaccccgtccaggctcttcagtttgcccattcagcgggcttaggatccgtcaaacccaaggattcatcaaagaccgcatcaacaggggaggacacgtacagtgcgcaagttcgggatagcgttcgtatctcataccccgaaattatcatccatccatccacccatcgttctgcaacgagcctcacgcgtgtaaagtcgcgatcgtcaatcattctatcatcggatgtgctaacaaagtcgtttctcgaaacggtcgttctcttttcaaatctcttggtcggttggtcgtgaacaggctcggaatcggtacaattaactagtttgaacctgaagaacgagatcgagaatgggaaaaaagtatataactgaaaacgtctgtgaagattggggtcaatttacatgattttcttaacgtacatcaacatatgtgtgtgtgtgtcccgacaaaagataaaagacaaaagtgaacaagccaaatcgctgataaaacgaggcagattgtaaacggtcatgttccattgaggtagatcattctttcattccaggtcatcaagataggatcattgtaagtctaagtctagaaggtagagggaaggatgttaaagttcggaagcgtacgcgaacgaaaaatgggagaagagtaaattcgaagagaggaggggcagaatgcactttcggaaagatgaagagatatgaagagtgggatgatcgatagagaaaagaaagggaagaaaaggaggaaaaatcatgactgaggatttaggaagatgatatgaaataaaataaaatgaatgaatgaaagtccaagagaagagtcatcgagacgttaatataacatcgattaggaagtcgccgcactctgcaccaaactgccgaaacttccggacgatcgatggatattaaatggacggctcgtccttccggccatcatcatcacctgctgctgttgctgttgtccctttgatggcccatgttggtaaggtaccccaggtcccctttgagccaatccggtatacaaggaagcgcctgtggttgcactcctggctctaccgagagccaaagggcgcatgcccggtccaacaggtggtgtagaaaggagatggctagagtgatcgtcaaatcgagacatagctgtggaaggtcgtttggtgtagaggacatgtaaaagggtgacactgtaatcacaatggcaagggtcgagaaacagaatttaggtgaatatcggttagttcaatcctagcacgaggaaaagatataaccaaaggatgctggagcaactgacctttccatagacagcctcgttagctttccgagtccaagcttgatgcccttcttgaaattccgctgctcctcctcaaacgtgagcttcgtcactttagccactcggttgaccgtatggaagaactgcgaggcatcctcgtatagggtgtcttgttctgacggagcgacgatcgtttggtgaagttgacgggtgtgagatcttgcaacggggatgaggtccaagagttcaaacacacgcttcgacggaggccttgtgatcagtgtgctttgacgattcatagtagccgaggcggagcgctataccgagtaaaggaaacaaaatcaatacttcctcctgatacacgcctctcgagacgatttcaagccaaagatacagcacgcaagagagaataaaaaaagaccacgaaccacagcccagtctaaatcctcctctagtaatccccacacgttagaggccaactcgaccgcctgttccatcatcaccagcaacccctcgtcgaccacgtcgcccactttgttcgcgagtccacccatgtagggcaacggtctgttatcccttccatatgccgaactcgatgaaaacgaagacgaagacgaggaaggcatagccatcatcatcatcgacggtggtaccaatggtggagaaagcgaaccaaggctacctatcgagctgacagaagactgagttgaatgagacctaaatacagcgtgtccattcctatggccgatatcccccccagtttgaccagcaaacgtaggtttaggaatctctgctaaaaacaaagctgctgaaccatcaggtaaagatttagcgccggcttgcggggtagatgccgagtctaaggacgttcccagggtcgatgaagactggtcaatgagtgaagagctggcctcgttgtagaagacgtcaactacctgcgtttgtggggatgcgtctccaagcgtgttttgcaaagtagcctgagagattgttggggatgaagcagccgtagaagggttggtattggagaacgagcttctcagtgctgatcgaagtggataatgaggtgagtcgagagtcaaggctgacttggaagatcgtccattcatatccggcagagtatggttcaaggagacgggagatgtcgtaacggataacagcttagattcttcctcgccatctttgagagcgatgggacccgcgatctgtctccgaggttttccgcctcgaagaggaacctgaccggacggaactggaccgataaccactgtggttgatgccaaaggcgatgaaatcgatactggcgatagcgtcaaggagctgaacgactgttgagcagatgccgatctagatagtacaggtgattcgaaccgactcgaagaaggcgaatgagattcggctcgttcaggaatcggagagataggcgtcctagtcgttgattgagagacagagggtttatgtttccggaaatgagtggctcctgctccagctgttcctcctcctgaacctgatccggtgccaccgactggcccgttgaaagaacctccagagatagccgctgatgctcctatctcgcttttcactgtacccgctactgagcctaccgtctcttgaagatatggcttaacctcctccaatattggcaagatagccttccatgcggccgaaatctctgctagtgatccgtagagcatcaacagcaacgtcctcgtgaacctaagatcctcaaaagtacctcctggatgatggcttccgttgtgcgacaccgtttttgagcttgccacttgaagttggatctccaacacggctatcacctttccaaacgagctaaccgatcgccagcaggcttcaataaccccccgaatgaccctcgccggaggaataggggaccgtctggacatcgaatcaaatctgtccaacgcgttgatgatattgttgatcccttctgcagcaggaacaagtaccctagccaacacattggaaaatcgatcgtcgatggcagcaagagcgtgttgacggagcgaagactggatttgagtgagcgcaaagagaataccccgagcagaatccactagaaccagaagtgaaacaggaatcgtcttgggaagcgtcgaggccggtaaggttgataatcttcggaaataggacgctctagaattttcgatcacggccgaaggtgagtcatcctctgaccttcgtagaccagagtaaggatgattcattgatgaagacgtcgttgttactggtgaacccaagccttttcccgctctgatccctgcggacgctgagctcagattcagatgctcaggcaactttctcagcgttccatccgaaagcttcctctgaagaccatttctcgctgtagccatcgcgccaaatgctccggtctccatctctgaaccagtctttccacctccgatcgacttgactgaatcggttccgtctccgacacaagcctgcctctcgctgatgattaacgcgtggttgagtcgcaagtcaggtaaactcttctttggacccaatagctggctgagcctttgagattgagtactgaacgatccgttccttagatgggttcgctgattagaatatgctgtacgactcggtcgaggggtagccattgaggaagaccctagagaagtcgatgatggtgagggcgccattgaggatccagatgcaggtggtgtagaagaaaaagacggcggattgtaagacggagatgagggggacgtgttggttccttcggatggagacgacatcggcatcacaggaaccgatgaagaagaagacgaagagagcgaagccgccatgaacgacggtgggattggtaaagacgtgccaggcggtggagtgactcctctcatagacgacgaggccgaggcattagaacaattcctagagtgggtaggtcgggaaaaggaggaagagtttaaaggttgttttgtaggatgagtgattgatatcgaagtggctgtactcgtttgcctagaatgtcctgtccgattagttgagtcgctcgtccgactggacgtagaaagtgaaggtgaatgagtgtttctccgctgaggatatgttggaggtagaagcgccgagggagagacatgctgagaatggttgaaaccagaagaactaggtggaacccaatgggtagaagatgacgacgacaagccagacggagcgaacacaggggacgatgatacggacgagaaatccccactgcccttcgacgcctgccttcgatggtaaccgccgacattgtcaccattgttattaccaccactactactgctactaccaatcgtaccgactccgccgtcccttgatagcatcgtgttttcgattggtgaggtcgagctcgaagcccagccagcgtttggtgagccagaactctgatatgtcggccaagtagggaggattgttcctgtagatgaatttgatgaaatcgagttgtgtgaattcaaagaacccatcaaacttggtctagattgaaaatggtgtgtctggtcgtgcgcgtgagaggcttcagaaaaattctgagaggtagtcgataagaatcctggtctcatctgacttggttcccccatcccagggaatctatctgcacctctctcttccattgccgctgggtcgtcgtctgaatttctcaaaaaattccgtatgttctcgacccaagctttctcgtttgcgtcccctcttccttcctcagtgatcgtctttcgttcaagaatctccggagggggccactcgatgggattatggtcgattttgaaaaccttgagctcggtgaaggtcgatatgtattttggaagagcgcgaatcttgttttgagacaaagacaacaccttgaagtaatatgccccggacagatgaatggttagaactctcaagcaagcgattcctaaccggcatcaaagacgcgttcgaactcaccctcagagaagacagccggccaggaggagtgtccgggaacttccggattttattcctcgatagatccagaatctctaatgattgaagggatccaagctatgtgtcacataggaagaacgagagagttcagcgctacgacgaacacagacaagatcagagtaatacacaagaaagacgtacgactgctgggatttctcgaaggtcgtttcctttcagattcaaatatcgcagtcgggtgaggatgatgaaggagctcggtagggatgtcaacgaattgtgtgatagggcaagcctataaaattcatatcaaatagtcagtcgtttggtcgtcaaaaagaacagtgaagacagacagagtcaacgagtgatatccaagtcgacggtgtgtcctaaaagtgagaatggatggcagagcaacggttcctctctatctggtctgctcctcctattctctctcgtactgaagcaaacctgcccgaactccgtccgacgcacactcaaacaaagactagaagccaagctgaccaagagagaagatcggagggaatcccagcaacaacaacaacacatacagaaagaagaagggaaaaaaacccgacgtacctcctcaaaggtctaccggtccctaaaccagccaacaattcgactccctcatcactgacttcatctagattcagtctaccaagatctaaagtttcaccatgatctttcgatgcttgaacggctgtctggatgacttggtttgagaggccagagattgacggcgacgagacaggcgagatcgatgaggtcgaggctactgggaatgatgtggatgatccgccgctcggagggggcgggttcatctctttgtctgtcgttcgttcgttcgttctttcgtttccttatctcgtcgaatggtctaccgtgattccagatcaaagggtcagaccagcaggatgaaggaagctatagatatcaagacgtgtccgttcggaacaaatagatggagccgaggatgagagaaggatgaacgggtgggtggaaagactcactgtctctttgaggggaggaggaggaactttgtttaccttcccgagctttaaccggccaccatccaaattcacactttctttctcactttctttctcactttctttcctctcttgtcttttcttttcgtttctctctgctttcgttctacgagaggagctgtgcatgtgctttgtagttcatcgcgcttctctggattacactttcattgacaataataaattcaagagggacagagataacatgtgtgtctaccaaaaaggcgaagatcataagaacgtttagaatcatccgaatcatatttagccatcaaggagaaaacacagctctgcttaatcttgcttaggtcgggcccaaggcgagtagtttagataccagtctattgttttttttgtttttgtttttttgacaacaaaaggaagaagagtgagatgcaagtagaatggaactttggatctgagatgatgtgaaactcacagccggcattgagataagttgcatacgtcagccaagcacctgatggaaagagttcgcacaaggtttatcagtacatgatgcaatccgactcagtgttttaaagcgccgacaaagtagggtaaaaaaaacgcacaataaggcgcaaagagcaacgcaggcgtgattcccgcaggagcaggactggaaagtttactcgagacgttctggttttttcaagaaccagggtaccaaccgatcagaccgtcaagctttggcagacgttgttaggcttgaacttacggtgagggcgtatactgtgccggtgagtgctacgatatctaacagagcaagtccggtctgcacgaccccatttcgttcatccaaagcgagtcagagataattcgactaccgaaaagggatagaaggagcgatcagattcgaaagagacttgcctgcttcagctggaagaaaagaggagtccacagatagtttcccgccagctgagcccagtaaagcgtcagagccagctgggcgagttgtctagagggagaccgcgccagaagtataccgtttagatctctacgcccttctgtacaacaagatgtcagagataacgatcgaacgtacctggtggaagggtcaaacgaattatcaaacgtcttgacgatcaaatgactagcgtaacccatctaccatcgcccatcgaaatgataaagatcagcccaaaacttcaaagttcggacggtgagccacgccgaacgtcgagctggaaaacgctcactgatgcgtagagaataggccaaacgattccgaacgctctgttcggaggtctagccggtggtgggttcagattctgaggaaagttcacacatcaaacggttgagtcttccgtgatctgttccaacgcaaccaaacgagcgactgctctgagcgaagaatcgtccgatctaccttgtaccaaggccctctaacgacagacgctgttgccctacaagaacgttggtcaaagggtaaacctcggatgactgatcagcttgagtctcatgcttatcagagaatgaaagggtaagaaaccttaccatccggataacgagccgaagacaagagggaagccgactgataggaactcaacagaagatcctcaactttatctcagcctcctggactgtatcctaacctattcgatctaattcgcggcctgtaagaagctaacagagaaaaagggagacactgacctgcgacgacagaatttctggggatctcaaggaaaggattaagcatgtttgttgatgttgaagaaaagtgatggttctggctaggcgtgatgcgtctttaagtaggggggaaagatcaggaagccggctatgacgcggacggagttttgtgatcatccggccgctcgtcacgcttagtatgcttctttccgatagaccttcctttctggatatcttggtattgcaatgctcagagaggaggagagaagtgttcagcatggtaagtttccacgttggctgcacattgttttcgacatctcaaactcatctttagagcacacgtattttgcacagagttaaatagaacaacgtagaattcaacaagagggcaagagttcaatggggaacgatacaaaatagaatacctagacaacaagtagaggtgaggaagaagaacacaagaggagagaagaaggaaactacaacagagctggatagaagatcggacgaaagcgtctagtaaaccttgggggcaccgaggaaagtggtggactgaatgagacctgttgttcaaaagtgaaggagagcgcaagagatgaacatgcgaaacggtctatcaggcttggaaaagagtagaaacaaagaacgaaccagtcttgccgtagttttcggaagagatacccgagatggggttggcgttgagggaccctgggtggaaagcgagatggatgagagtcaatcaaggaagcagataggttggtaccgtctgtccgacaaaggaggaagcaaacaaggaacgcactcaagtattcgttggactttctctgccactcgatatccatagtcttgggaggaggaggtgctgtatgatcgcataccggatagccatgaagcaacgaccagattcagacaacgtatcgcagcagagcccatgttgtcgagttccacgcgaccaaagcagagagagcacacaataagcttcagtcgattttctattgttttctattgttgttaggaatcgaagagtagaagagtaaaaatcggactgaccgatcattcgcaatccgacccaaaggccgatcgcggtgataaacccgcccgagatgtagaggatgatatcccaaccctcgccgtgggcaagttggggagcacgcttaccccacggtccgtagttgatataccatactgtgagataggagaaggaaagaatcgaaagggatgtgtgtatcagcttgggttctggttgaacgtggctgagaaataagtgatggttgataggccagaaaagcaaggctgttggttgatcgatgggagatggaaaagcatgtcgactcgaagaccgttcggagagaaactctttatggggcttcgacatcacattttacaggcagctcgccgatagagtatgaaagaggatcttggttgtaggtcacagaatgatacaactgtccatctctcgatatggatacccaaagctggcctcgctccaaactggaccgagtctaccgtagaacggaatctccagagcgagtgaccactgacaaaaacacacacaaaacgatgcaaacatcgcgagatataacacttacaggcctttttctcgaccatgctcaagtctttccaatcaccctgactcctctccatcagatgagcggtaatcctgtctttagtgtcctggtcgattttatcccagagatactcgatactccagagatcaggaacctttccatctacaaaatgggaactctcagtgatatccacgttccagagaggaacaggtgtagccgcctgattgaccgcagacagggcatcataaggagaaaagtgtttttggccggccttgggaagcaaggatggatcggtagtgatgtttggctcggcgaacacggttggtttcgtggacgaggccggagaagaactagctggctgagctgcggcagaggaagctgctcggatcaagctgatcctgggtctgatagctcttgccagtgagctggatgatctaaacatggctgggtgtttctttgggtatgatggatagaacggatcaagacttgtaggtcgggcaaacagagacgagagggagagaatgaagaccagagatgagactaggagggaagatgttctggttacagtggctgctacagccggttcgagacggttcatggaggttgctggcggttggctgcggaagtaactggttggttccggttcaccctggttcatgctggttcatgttggtttactctggttaaatcaggttcacataggtttgcaccggttcactacctgtgcaaatctcgtgaccctccaccaacacccctattgccagcgcacagaccgcctcgctcccggaccatcacacctttcccatcctgcccggcttataaacaatctgctctttttttcttctcctcttccatcaaccatcactctttccttcctttctttcttttcttttctctcgccttcatcatgaagctttcttcctctttggggctcttagctcttgccgcagctgctactgcttcggctgcttccgacgttcttgatctcaccgctgctacgttcgataccgagatcactgactttgaaggcttgtgagtgctcttgtttgttttcgtagctctctgtacctagcatcagaagcatacttggttcatggcctggctcatccgtctgacatactggctcttttgctgttctttttcgtacagggctctcgctgagttcttcgctccctggtggtaggtctctagccgtcttctttctgtcagcggctgagatgatcattaaactctatttgttcctctctctttctctctctctctctctttctgtatctcggtttctgtctgtgctcgtttaatcgcgtctcacagtggacactgcaaagcgtaagaccaatctagatcacccgtctctccttgctcgcactgttgtctcgtcgctgactatcatcagcacccaccttctcttctcactcgttcacgctccatcagtctcgccccccactacgaggaggccgcgaccgagctcaagtcgaaaaacatcaagcttgccaagattgactgcaccgtcgaggctgacctctgccaggagttcggtatccagggataccctaccttgaaggtcttcaacaacggacaggagagcgactacaccggaccccgaaaggccgatggtatcgtgtcttatatgatcaagcaatctctcccggccatcactgaggtcactgctagcaaccacgacgagttcaagggttccgacaagatcgtcgttatctcttacggatctgatgcggctcccaaagagtttgcctccttcgccaacgccaaccgagacgctttcctcttcggtcactcgtccgacctttccctcgcctcgctctctgagccttccatcatcctctacaagacgttcgacgagcccaagctcgtcctctcctcggccgagttcgagtccctccgcgttgaatctcttggagcgtgggtcaagtccaactctgttcctctcttgggcgaaattgctccggagaactttgcctcctacgccgaggccggtttgcccatcgcgtatgtattcgttaatcccgaggccgccaaggagaacgctgcgcttgtcaagaccctcgagcctgtggccaaggagtacaagggaaagctctcattcgtcaccatcgacgccgtcaagttcatcgatcacgcaaagtccctcaaccttgatgttgacaacattcccggatttgtcattcaggacctccagggtcaaaccaagttccctctcaaattgagttccggagagaagctcgaggccaaggttgtcgaagactttgttgcccgacagcagagtggagatatcaagccggatgtcaagagcgcgcccatccctgccgagcaggtcggaaacgtctacgaacttgtgtctgatgagtacgaggaggtcgtctggaagaagggagccgacaaggacgtctttatcgagctctttgccccctggtgtggacactgcaagaagctcaagcccatctgggacaccttggctgacaagtacgccgaggtccccaccgtgttgatcgccgcgttcgatgccaccgagaacgacttgcctccctcggagcccttcaagcttaccggattccctactctcaagttcaagcctgccggctcgtccgagtatgtcgactaccagggtgaccgatcgctcgagtccttgattgagtttgtccaggagcactctcagtctgatttgaccgccaaggtcggaggaagcaagaacgagacgccgttggcccaggaggccgaggacgtcgtcttggacaagacgaccggagaggatagatctgttcacgatgagctttaagacgggcggttctagagaatgtaaattcaagagtaaagtgtagtttcaaccgagcaggggatatgaagattttgtttgatatgtttctgggttgagatttgtgatttctatatgtttgttatctcaccttgccatcgatcccgttcgttcatggaagaaagtgaaagagaacgaaagaaactaagaacgagagacagagaattctcatccatcggcagatcgtacagcccaagcatcaaccaactcaacgttctcgcatatctttcgaatagactccaagtcgggagcttgctcaatgtctttcagaaagggaagataaaatctagagcgggatctgttgcatacggacaccacaaaatagtatgggcaaggtcagcattcatagtctccgtctcattatttctttttttaaggcaaagaagaaaaagagaaaagacctacgcctgtagattcgtacgcgtgaaatccttgacgtgccgctttacgctgaacaagggtacggcagtcgagtaaagatcgacgatgtctaggtattgggtcgtcaactctagagggttacatggaggtttgtttggagtgaagaacctgtttttatcgatcagatcaaccatggtccgtcagcgatgacaagtaaggtgggac

SEQ ID NO: 1930 - DNA, 4444 bp, Xanthophyllomyces dendrorhous
cgagagggtctacctgaaatcagcacttagttcttcgcctaccatccacccatcaactccttccctcctcgttagttcccctacatcattccacgttctgacccctccgtttcctacgactcctactccttcgaatccagcttcgaccaacgttcttttcacctcgcctacggcacccgtcctcaaatgtttgagatctcttcgtttagtcgatgatcctacggggcgagcatgaagtgtgatggttgaggagcctgcttgagcaaggtggagagcataggcagcaggtgttaatggggatggaggtatccgggttttcgtgagaagagggataggaagagtcgacaaatttgatactaggtgggtaggttgatttggtcaacagaggcgctcggtcagcgcacagtctatgctgtcctctctctttctttctctcccagagacagcatagatctgaaaaagtaaggggactgacctagctcggtgacaagaggtaggtcagtcttgttgacgaggtagcctccgtagtgaccttcgagcgcacgttgttgagggcagcctgggatccgtccgaacgtcaagaagggttgagaagaggcacttgttttccgagaaggtgtctccgatgggctgaggagacaacgtgagtggacttgcctagattgagctctttatgagaaacccccaagatcggatttcagcccgagtttacgatctagtaaggaggattctgatgttgcgaaagagaaaaactaaccaatcccatcaactagactcatcaccacttttcctgcttgcataagttcctctgtttgattccctgctagctgagcaacgaccaatggatctctactcgaccctccgttcgaaccaagattatgcctaatggcgcggccgaattcgaggtcgagaagggtttgttgttggaattcaagagacgtgagcagatgaggagcgacgagcatttgagtgtctttataatgatgagataaagaatgtgcacgagtccgagtttataaaaatgatcagaaagatcagtccacagtgttcatgtggaaaggaaagagcatgtgtacttgcaggtcaatgtgcaacctcaatgagcgaccaaaagacggaacggaagatccgatatgcctacctgaagattgatccaaacccaaggcgccttatcttaagttttaccgatagacctacaccaagcaagcacacgagcaaaaagaagcataccataggcgcctgaacatatttaagacagtctaccggaagagacgggttggccgaacccataatcaataaggaaaagctcaatgcgctgaatggaagtattcatggtcatgcgccaattattagttatccaacgtcagcactacacacatctcatctgtcagtagcagtctctggttagtctggatgaacgaacggacggacggatggatggttgtggttgctatgtctggcttatttcttgtccgctgcggttgttcggaaaaagggaagaaaaggccaatgggaagatccgcgttcatttcttgaccgacagccaaccaagactttcattcttttcctctccttctacttttcttttccttctccatcctcatccttcgtcgagactctatcaaaatggccaagaacatcttcactcctcagccccgagtggcctacttcacgtgcgtttcttgtttctcttcttttcgcctttattgatttttcttcttttttttcacgttcgaacgggaccgttcaaagagtgggtaaagaaaaaaagaagaatcttaggctaaccgttctctttttgacaatctcgatcgggatctcgcttcacacagtgccgagtacgtattcgtctttgatcagctcttttgtttgcatctaaattcttgttggcattctaacatggcgttcgatccggtttataggaagatcatgcgattcgttccctctttgggtgtttggggtgtcggagccggtggtctcatcaccttgcttctctcgtcgactcctatcttccaggtttgttcttgtttgatcggctgtgtcggctggagtttatgaagaggaagagaaatccttgcggctttttctgcactccttcctcgatgagcattgcagagactgatgtgagattcactttttccaccttggtccggtaacgatcttcttcgatctgctggggactacctcgatacaaacacttccgggttatgtagcaggatgtccttgtcaaggttcctgtcgtacgtcactatattctctggaatgcctctatgtgtttatctgtttcttgctcaggtttaccacatgcattaacgttactctgtcgtctttattgtttgctcttattatctttcccttggcacttttacagctcaccgagtactacactgacaacactcccgcttcggacaagcctttctaaagtagccgactcgaaacatatattctttttagggagcgatcagaatgaggagtggatgggacagagttgggtcgtcgatttgacacacatacatgaatttgatatttttgccgttcatcccttatttgtttctttctatccttctctctgacgtatcgcaagagtcaaatgagatacatttaaagactgtacacaagctttggagagaggaagagcaagaggagtacacttgaaggcaaaagaggacgttcagcggcacggccgtcgggtagtcgtcacctgggccgattggtttcacgcgagaaccgtcagtgttacctccccctcaaccaccatcccttcctagccatcaaccatctatcttgaccgtctcttctttcgatacacttaaccaacgtgagtcattagtttctttgtatgtgcgagaacagacagattgctgctgttcttcttctcttgatccaacaccggctaccaaacaaagtttcagaaacacatcaaggagagataagagccagtggcgatgagtgtctcttgctctccgtctctcctcttctttccatcatcacccttcttccatgtcgagataatagagaaaggttgctctgcttccacctgagatgaagctgttagcctcatagagagacaagaaacagatgtgacagtaggaagaaagggtgtcgcctccaaagagaacgtatgctgatctggcccgtttgttatgttttccttgccctttctttttccttcttgttcctttcctcctccggctcgtttcgatcttccacttctgatctcgccatcgtgacccatcctttccactgtccttgttgtggttcggctatctgttcccgtgatatctactcggtctcctgttctggccttcccttcggcgttcttttttttccttctcgtgctggactcgtccgaccggtccatctacacgttctcctttgtcatcctctccttcgaccgtcattcatatctgctttccttttctatttgacaacgaaacgttgaccgaaccaaaaacaagacaatgtctactcccgaatacgattacttgttcaaactccttcttattggagactcgggtgtcggaaagtcttgtctattgctacgatttgccgatgacacctacacagagagttatatctctaccatcggagtgagtgtccattcctgctatcttcaattcctttcggctactctagtgtgcgacgaaatgggctgccggacctggatagaggaaagggtagagtcagttgttgagtgatgacatggtcggacaaaggaatatttggagaaacaaggctatgttcgggtcgcccttttatcagcgcatgtcaaacaactccatcatcctcagataggttctagaaatgaactacgatcggataaactgacatgtctgcgtacctctctgttctctccgcttgtcttgaccgacgaacaggttgacttcaagatcagaacgatcgagcttgagggaaagacggtgaagcttcagattgtaagtttttatttttatgctttgatttgttgatgtaggaaggaaggagatgtggtatgaatgggttgaaggaggcatatagaacgacattcgtatcgatcattgaagtgagattggtgtgttgacgtttggctctgtttatccaaatcctcctgatgacagtgggatactgccggttcgtgtcattttcttctctaccacatcatgcgtttcaacacagacctgacgtcttttttttcattacaaatggtacatccttaccgaatcatgtgtgtgtggggtggtggtgatcggtctggcttcatgtgtgtttatgtgtgtttatgtgtgttgttgaggggtgtaggacaagagcgattccgaactatcacttcgtcgtactaccgaggagcccacggaattattgtcgtttacgatgtcaccgacaacggtttgtctgtctcagattgatccttttgagtgttcacgttgctgacttttggttgctgtgttacactgcacatgtgccc

SEQ ID NO: 1931 - DNA, 49235 bp, Xanthophyllomyces dendrorhous
acactgcacatgtgccctatcgctcactgccaacctattggtcttttgcagagaccttcaccaacgttaagcagtggctccaggaaattgaccgatacgccattgagggtgtcaacaagcttcttgtcggaaacaagaacgatttggtttcaaagaaggcagtcgagtacggagcggccaaggttcgttgtcatctctttctgattgaatctggtttctttgcaaacgcaagtactgttcaagtggtagagcagtcagagaactgatacgattatattccttctctcttctctctattctcaggaatttgccgactcgctttctattcctttcctcgagacctcagcaaaggaggccacgaacgtcgaacaggctttcttgacgatggccaagcagatcaaggaccggttcgttttccttctggcgtttctctttttcaccctctttcgtctctttcgcacgtgcggatggaagaagccggtgctgactctgaagatttatcttgtattgttgggaaaccatagcatgggatccacctcgatgcctacaggtgctggaggcaaggccaacttgaaggtcgctcagggtcaatccgttcagcaggctggaggagcgtgctgctagacgctttctctctttccttttattcgtccatgtcgtcgcccctttctgttttctctctttcttccctagtcttccacgcccctttctgtccagcttgatcgcttgaccatctctacgtcctctctctatctatcttttttctcctcgcgcgagcgtttgttctttcttctctgccgatcgatgtttgttgtaggtagctcggtcgattttctttcctctctccttgttttgtgttttacctctccccgtacattcgtgatcttgacgaacttttctctctctctcgctcacgctcacgtactccctctcccttcaagtctgtttgcaagttgatacaccagagcgagacaaactagagcgcagggtgatgggcgataagagtgacagtagctacgtgacacgatggttatgcgtaaccatcttactgcgcatgatacccttccctcatcatcagtccgctttcggttctccacatcgaaagcggccaaacccagcatacaaccaacacccatcgttcgacatctgaggctgtcctcctcatcgagtcgtgtagatactcatcaacaagagagagtgtcgtactaataaactattaaccaagagagagccaaactattatcagaaggttggatctatatcaatcagtcaatcactcatccatggcacctgctctatccttatcggcctacgcctcgaatttcctcaagaatccgatcaacacgaccggaccttatgacaaagatgtcgacgaagctgatgctgatcctgtgagagctctgttattctttttgtttcgacttatcctatgatatacgtcgtcctttcttctggcagtcgaagatcaacagcgggtatcaggacgaggactgtaccgtgtgagctatagtaagcaagggccgtagggacgggtatatgcggatgatccaccttggtcgagatgtgaaataatcatcaatatgaaagaacaagagttcttgtcttcgtcttggatgctgtgggaacatattgatttagctcctgggcgcctctgaaaggtcgctcttgtggtctgaactggagctcggtttatcattctctatcgacatgcagtttcattcccctttgccgcgaaaggctttcaagcgcattcggtcgtccagagaaactttcggctgatactctctctctccctttttcctcttctctcttacaaacagctcttctactcaactcatcgcccaacccctttgtcgagaacgaaaccacttcagacactagctagttcttccacactatcccttccacatgtcttcaactcgactgactcgtttgccgggcccgacgagggctcggcaggagaaccatctcgtgtgatctttgacagtcggttcgaagagggagagagatccggtcgggatatggatcattcccgtggtggttacaacgataccaatgacgatgatgatgatgacgatgatggtggggaatatctacatcgagtcgagagggaggaaagagaacagcgtgggttactagctcagagctcgaaatgtacgtccatctatttccagtttcatcagtcgtaagacgacaaatcctcaagggcactcgactgaactatatgcgccttgtgtgatgaacggttctctcagcgtctctgtctgtcaatcaaccgctgccaccaccaccaccaccaccgccacagctacccacagcaggtccatcaaggaaaggctggcttgctcatcaatcccatcacccccataaccgctcccgttcatcctccacttcgtcttctacgtccagtacgatctcatcctcgacgacttcatccttgtctgaccctcctatcccttcagaatatctggatgaatcccgaaactcgattcatggtctgccaccgccaagagggattgtcttgcccagaagcgaggaggttagaggaagcgaggtgctgagggaacgcttactgcccagtggtgacggtatcaggagggtggaaagactcatggctttgggaagtgaaggcagaggtttttgggaaggcagaggcgactggagaaagttcagaggttcgtccatggcctttttcaattgagctcagaataatcttgctgtactccttgactttcagcaagggcgcaagggcgctctcgtctgctcgagtgtacatatgacttcatagagcatccaacctaacagtcttccatatacgttcgtgcttctcagattacccattcctcgcgctctacctcttatctgtcacagccctcttcgtgtttcttccgtttacattgttcttccgcccttcgactccgagccctacaaaccctcctgccgtgcctctgccaagtcctctgtcgactccattccgaacgcttcttcatacgttaccgctgttatctctcttgttgtttgtctctacgatgattccgccactgatattgctcgctatgcggcgaggggttagagtcgtcttagtcgctgtcgctgtgggcgtacccttgggtttggccggtgtaggctggtgggcttttgtaggtagtttcgaggcaggggaagaaagaggttggtggggcggtacggggtaggtctactctttcttttcttctctttccttccgtttcgcaaggaacatcacgcgtgacatttgtttgatatctcattcttgggtcgctacatatacagcttacggattctatccatcatccccctcttgttctctggactggcgtcccgtttgttgtggacccggcgagctaaactgtctcgtacagtttccgtcgtagaggtcagtatagtgttattctcttatcgcatcttctggctctcgttttttctcttgctaatggtctctttgaatgatttttcttcgatatcttcagttggctagcgatgtcttgctgaagcatcctccgcttctggcactcacgccggcgttgttggtcgctttcacggtgatcagtattccgtttatcacagtgctccttcggctgttcctcttagggtactttgaatatccgtgagtccggcttgagcaaagatgcgcttcaatgtctgggttctaactggttcttccatctctctgaaaaataaacagagccgaaggcacatatacttatcatcttcaaccgaaagctgattggctcatcatcttggtcatcggtctatgggtttggacatggggcgtttttcgagggatcggtagggtgacaatcagtggagtcgttggagagtggtattttcatcggttgcgtctccttctttttgtctccggtttttcactccgtgctcaatttactagcgctcacttggttatcgtgtctttttccattctttatggcagaaacgaccccattgcgctgacgtcacaaagagagttggatccatttgggcttggattcgagatcgagacgacaaagatagctttccagcgggcgaccggacccagcttgggtacgatctgtctgagtgcgctagccatgacgacggtccgagctattcgttatctcgcttaccggacaaagaaggtgaatcctcgtgtctctgtgcaatccctctatcaggtttggcttttgtgctgactttatataccttgggctcctatcagtttacctcaccgacgtacctatcgtccctgcccagttttctccatcctctgaacattctgtgtatgccatgtgagatcctcaccgcttggctcgatcaattgaactcgttcgtgcttgtctatgtgggtgtgactggtgagggctttgtgacctcggcaaaaggcgtggcggctctggttgggcgaaggagtcggacgggagggcgaaaggtcctagattgtgagtgtctgttttttttttgctttctgccttctattcacgtctgtctgagtagacatttggagagtaagggaactgagaattatggtgattcaattttatgtgtgtgtacatgaaagacacgttgatctccctcttattaaacctggcctcggtatccatctctgcgttcaccgctgcgatcggctacttgtttgcccttcatgcgctcaacgcgcctggccatgcacctctcgccggattactctgtggaggggccgtgtttttagctgtgcgattctcgttggatggacttatgaatgcgttcgtccgttcttgttcaagggtgtgtataggtctgttgtttgggaggaggttgtttctgacgaaggttgaatgtatcaataggtccgacgcgttattcatctgccatgcggtcgacgctgagcatggagggacacattgtcctgaagcaggagaggctgttagttttctcttttgttcctcttctataaattttctaaaaactgattctgacttgagctgattcttgggtctgcaactgtgtcgaaaaaaccagtttggaggatcgaagcctcgtcggggagcggaagcagcctgaacgaaacttttcaacgcaatttcttctttccatccatgtctatcttttcttctctctccccttctgtttgcctagtcatccccttttttttctgtttctacccattgcatcgcgcttccttggtgcacctcttcctgttctttcctgtccctttcttttcacgtgtttattgtagttgacgttttcatgactggttgtattcgttcatttctctcctttctggggtggtcaatttattcacgtcctctaaggttcgttctgataaatcctccggcatattctctttctgtccttctttttctccctcatacaaatactcctctctgtttacttcctttggcgcgagtaacccaagatgtgagaaacctcctcatcttccttgtcttttatcttttcctcttccttgtccttctggatatcgggaaatcacccccttattcttctgtcactctactgttctgagttgattttcttttcttagtcatttttctaatctcggttttttggttctcccttcttcttccctccttcacttggttagtcctaaaacgattgatcgattttattctgtttttattttatcctattttatctcgccgctctctctttcgctctcattctatctctggtatgtgatttatcacgccttcgctcaggtgtcacagcggtcatcccgaaagataagagatgagaataaatgaagaaaggacgaatcgctagatggaaattagatggataacgatagatcaatagtgcgcgacggattatgaacgatctacgacgaatgatgatctatgacggatatatgacgtctcgcgcacgacaagctcctagccttagtcctagtcctaatccttatcgagtcttaatcgatgtgttagtccggtcgtgaatcccggttgtacatagtctgattgaacactgggcgtcataaaccaaacgaggagcaggcggagcaggaggagcatagtccggtggataaacatagcaacggggccggccaaccgaccggcggctatgaacggggctatgagtaagtaccacggccagattacgtgacatcacgcgtcccccctcctctcacgaccctgttttttaaattacataatattagtttgccccaacgcgacgcggacacgcgttcagacgcgacgcgacgcgacatgatgtgatgtgatggttgggggctttcttctcaaagttctcctttcttgacacctagacaccgttctgttattattttcattttcagatcgttctatctcgaatagatcaaaggaaagaagaagaagaagagaaaggaagaacgtatatatgctgtttaatatagctatgtaggattgaaagtgatgtagagtgaaggaaatgtgggtgggaggagctccgcgataaagaataaatggatggatggatggatggacgaacgaatggttgagaagaacaaggaagacataataaaagctggaagaatggaagaaaataatgtgcaactcgggggatgctcagagtagatagcaaaaaggaagaagagagaagttgaatatatgggaaacaaccagaaggttcaagaagacagcccaaagaagaatatttgtttgtagaatggatgaatgtgtatgtgtgtgcgcgcgcaaggaattgactagacagctctgaatctagagggtcatcggttcaagtctcgattgatagcatctaagcaaatgtggaagatcctccctggaccctccatactcgctccccaggggaagcgtagaatggttcgccttggtgtctggattcttttgtcggtgtcgactgcccagacgacgaaggggtcaatgaggtggtcgagggcagccagctgtagtgtgagcttggggaggacgatgggctcgacggggacgctcggtggaactaatcatgattatagaaaagaacagataacttgtcaggaggaaagtcgaagaaagcagggaatcgagacaaacaagattgagcaacttacaagagactcgaggtcatggagaagaccggcgtgggaagtggatgagatagaaagaagcatggtagtgtgtttttgtgtgtttgtgagatgtcttcaagtggacacagagcagagaatgagtggtaatgagaaggaagaaagaaggatgatgaaaagaaggaaagatagaggccttatataatccagggaaaggccgaatgacggatttagaaggaggagggagagaatgaggagcgcttagaaggaatcgaacgagggaagatacagtcatcgagggaaagcgtgagagtgagcaggaatcatcgggaaaacacgaccaatggcgagattcggggggaggcgacagccggcggtgaaatgctcgaaagatctaatctgattaacaacaaacatccttttcccttggcgtcccagccgcggtctctctagtgccttgccgtgccttaccgtgccttgccctgattgcttccccttaggttgaacttgctctcactcaccgtatggtcttatctgtgtggatgtactctctacatatcatgttgcctcagtgccacgatgtcacagtgccacagttgcgaactcctccggctcaatagcacgcctgtcgggctttttctctgtgcgcgtgtgttaatcccactcctcccgtcctcctcctcctcctcctcatcttctgatttgctcctcctcctcctcctctcttactcgctcgttcactcctcagtatagttctcgcccgctccaccagcaatcgaacgacttatttcttactttctcatctctggttacgtacgtgttttagtcttttgccttttccgacagctgggccgtatgccatgacgacttttcccgcctagggtggtcctaatgagttgcaccccaaatgaacccccaagtgtaccccagaagcaccactaacttacccacattcactctcagctgacgtaatctcatacatgcttaaccctaacctcaaccctttcccttctcttctcaatcacactgaattctgcacacagtgaaaaagagaaaagcacaagagaacagacccatcactcaagcagacatgtgagtgtccaaagtatcccgttgtcttctggctaacagaggatatgcttgctcactcacgtttaatacaggggaaaacgtaaatcagcaaaaaaacctcagaccgggaaacgaggcccgggtcctctaggttcgtttgaccgttcactcttcaatcttcctgtttgcagcccaggatacagacatagatatcagaagatgaagaaagatagaagaacccaatgctaaacccgatccggtctctgttattatcctaactcagaatccgtgtttacgtgtgtgttctgcaacaatccacaggcaatcaccgtcaagatggatcagaagctaggcacgggtttcctcgcgtgtaaagtatgtggccaaaagtttgcctctgatatcaatggtgagttgttctcgcttcctttcttctttccttgtccttgtccttttacttctcctttatgctttgctttctccgtctctgcttgatcgtcgatctgatgacttcttcaattcattgtttgaatacatgtagtcctatctgcaccgatagacgtctagttcgttcattctccagtcctctttctcttccttctcctcgtgtatttttcttaccgattcatctctatgccttctctactagcaccgactggttggacaaatgtcacgagatcaacgaagcccgccaacgcgagattcccgctcccgcatcccgcagagataccaacgccaattctgaccgacatggctcatcctcccctgcccctccttcggcccgaaagagaagagatcgctcggaccgctctgacgatgaggaagatcgacagcctgtgtttgatagagacgaggaagacaggccgaggaaaagctcgagtggaaagaagaggaaggtcgaaaagaaaaagtcgaagcatacgacgtattcagactttagtgacgaggaggatttctaaccgatgtccatctagagacccgatagtgtacatttgtagttctatatagcattcaatatcttcctctttcttatcctgaatgagtaaaaaaataaagatcgtcttggataaatggatggatgatccagacgcgtcaggtttttacgtagcatattcttaacgttttggtcacctttcctaaccgttctccttcatatcttgatcacctctctcccttttcttcttcccttcttcttttgttccttccttatcccagtcgataatctctgagggtatctcctccagtgaatcatgtccgactcgatatctacacccacacccacatctacgcccgtattaccttcatccgttcctcctccagctcacctactcaaaccggctcacctgcaatccctgtccactcattttcacactgaattagacctcctagatagaatcgtgtataagaaccaatcccagtttcgactcaatatcttctggagaaaggttacagaaattagaaggttgggcaggaaggtcagagataattgggaagaaatccggggtaaaggtctcttggagtccgtcggagaggagacaaaggcaaacagagaatcccttaaacgattcgccgtcctcgtggaaaaagtttgttctcatctatacatctgttcatcttctctgtgtgtagcatatatttgctcacgaacgaacgatctgtctctcttttcttcattcatttgtattttgataatgacaaaaagcttcacctggcacttccaaaattacacaacgcactcaccctgacgatcgaactcactcatttcttacctaccgtcgtcgtcctcctcgggataacctccagactgtgggccacatctttcattctttatgaccatctggtttgcctttgggacaaatcgtttggcaagggaaccgacggaaaacggaaaggactcagaaagttaccagagtggagccgctcagggtctgaagctgtctgtaaggatacaaccggacttgcgagaatgtctgtgggagcaaccgataaggatacaggaccaatcatctcggttccatccctgtcctcgacgatgacaaattcgagcctaccggtggattctccgcagagtgaattaggtcaagtcatcgaacgtataccgagtaaaacggcccatccttccgtctatccccctggccccatcacgtcccaccctggttcatctgaggctggagatgaggacgatacaggagtttatatcgatggaattggcgaggcaggcgagaagatttccagggattatttttcacttcctatcaaccgctcatcgtcaacgtcactgtcactgtcaccgtcaccatcaccatcaccatcaccgttcgttcctgtccgcgcctcgaatgatagccttgacgccaaggtcaatgtcgatttcaacccagagtccagtttgaaagatcaaaagaagttgacagatagacggaaggtcctcaaaaacgattcttctgtccctctggtttcctcacccttatcccgatcgactgtattttcacctcctcttcctcttcctgcccctttgcagtcgtcatcgtctcttcaggacccatctggtccgagtgtatcgtcttcatctacaaatcccacaaatccaaagcccgtcaaacgctccaaagtgcttggcgaaccggttcatggtacatcaaagatcaaatctcaagctcaagattcgtcatccgcttcatccacttctaattcgcctagcatctctatcacatccaccaagtctgtcaagtccatcaatccttccactactactgctgccgtcgccgttgcgcgcactgtaccaaccaaacgcaaaatcgaccttccgctagacaactcctctgacgcgccaggtggaaaagagataaagaagaaaaagaagaagaagaagggggatgagatcgatgatatctttggctagaggtcggttatcagtcgtcagtcatcaggtaggatatctggaaggctcagtatgcctagatagtatgagtcaatgtaagatagacagagctgggggcatatatgttgttttccctaataatcaactagatgtttcttcttctttggatctggttgtcctcatttctcgtttctcaaggaaaaggaaacctctccgtgaagagtgtggcaaatctcattcgataagagtaagatcacaggaggaaaattcatgaagagagagagatatctggccatgccagagtatatcagaggggctgattgaatcacaaccgagtttcaagaaatggggaagaaaaggagagcaaaaagaggttatcagtttctgcgcccttgaacgcaagcaagaaagcgaacaatgaagaaacaaggaaaaaaaagaagaacgagaaacgagatcttaccccccaagtatctgaggaaccagtctctccaggtcttgaactttgtttcttcccagttctgaaggagcttgggtcagaggctggagtatcgtcgtaacctcccaacattgctcccttttagtcagttacatggtaacgtttaggatcaaaaaggtaaacgatggtgacggaggaatatgatatgatacgttgaagtgagcattctaccctcttgagaagatgagaagaaaacgaggagagaacagaagacagaacggaccatagagctaggtcctccaggaccatgcctaactcttctagttggcttccagccccccctagaatcacccacatttactggatcatctacacttccactgaccgaaccaatattagcggtggtggtgatagcggcagaggccatgttggaatgaggggtaggggtagcggctggtttgatagatgctgggtcgtgagtgtaatgcgggtgggaaggagtaggaggaaccgcttgagaacgagggggcgcatgaactgatgcatcaactaagtagaaacagagggttcgagcaaaccgtcaatgcttcattttgatttatggaacctaggaaaacgaaccaatcaagcaactgacttaccttcgtcatcgtctccaaaccgaaaagtctgctttccttccggcggatcacgaacccgtctggtaggtcgcatgtcactagtagcgaatacagaaccaacagccggttcggttggttcttcactcttgaaagcggccggatttggcttggcaaggtctacttccatgtcagtcggtgatggagatgaaggtataggtcctgtcgatgcaggaggaacagagagacggccaaacgtagcatgttctgatagagtaaagtagagaaccaggtttggtgttcgtacgtgggttgatgagatcgatagagaacaacgaagttaaacatactaggaagcttattgacctcggtaaagttggtgccaaccttgatatatataatgggagaacatccagggtgagattgagtgtctcaatagcagatgaaaggagcaacaagatcgtaacgacatacactgattcccacgttcctgatatagacaaaaattgattcttcagcattcttgagcactcctaaacaaggatagactgatgcagagaatgaaaacttaccgaaggaagttgatcaagtttcttttggtgaagcagatctgagtggtgtctgaggcaaggagggatcgcattcagcaaccaagaaaaaacctatggaagcacatcaaacgtttctcaccccagtccatcatagcaatctcactggcccaggagcgagggtcgtccatgttgaatgtattaacaggagtgaagctatatgatcccccaaggtgcatctcgagcgtcaggaactgctcgtcgtacggtgcaaggagcaagaaagcagaataaagaaccaacagttgtggagcagacatgatgccgaataaatgagtgcaatgagagctagagagccagttggagagcgcaagggttcaagaattcaagatcaaaagagctgagagagtcgaaagagtcgaagatggtgatggaaagaagtggcctagaaagaaatcaacatcgaacgcgttcaaaaaggcgcgtcaagtttttaacacagaatgagatataatatataagtgcgtggaatcgtatagcatttcaccgtgtatcgcattcctcttttctacactcgcttcctctaacctccttctccttctatagccattcgggcgaacacacattcatacatccactcgatcagggaggatatgagcaaaccaatatctatgtaagcatcctcctctgttaaattctcctgacgattcgttatgtaggactttgttcttaaacagagttgtggctcatccatccgtcgcgtccaaacgatcctcagtgatatccgttcaccagccaacagaggttttgttcaaggttaattagattgcagtctgtaagatacacacgggctgtaccaggctcatcatggttctgtacgttgtccctttcatatggactacaggatatccgggaataccagtctcgtccagaacggagccacggcggcctccgtgtacggtttctggggtaagcgtttatgtctttatattttgtcttgacgtctttcacatacatcatgtatatgtatatatacatatccaatacacactcaacctatatacatcaggactgatcacaaactttacccaaacaacagacggtcgaagtacaaggtggcaaaggactgaaagcggtctctctgaagatttcattagtcaaaagggaaacgttgcctagtgatggtccgtctttacttctcaaagtcaaagattgtgtgcccgttttattcttgtgctagtattcacacatcatggatgcacacactattgaatacagttggagtaacctcgttctgtgaggatgtgtcaccagctatcaccctctggtcctgcccaccgagcgaggatcacggcattctcgattctgttgttcgtcccggagctcgccaaatcaatcttctcctctggtctacatatagagtttcatttgcgctgatagaaagctgtgtccgtttctgcctgttcgaaaccagaaagtctttccgttctccattggtctgcctccgttcttgccacccacagtcgacctagtccctcagcccaggaccagggcgcctaatggccgtccgatgagtttcgacgtgtctcaaggtaacggacgaccgcctgggataggttactatttggaagtgactctactagaaagatcaaagaagaagggacttttgcgcaaggagacccaagggacagaaaaggttgttcagccgatcgaaatctggcctcatgatttacactccgactggccaatttacaacgtgccgtgagtgggtctctatccgataaagataaagatagatctcaatcgaaaccatctttcgagagctaattcataatctgtatgcggatgggagagtagaaagactgtgagcgctcaagggtcccaggtttacatggctctcacattaccccaaacatctttctctccttcttcaacattatctttacccttcgtactacatccgttacacactcagacccaaccgatcgctctgaagcacatcacattgacattgttggaaaccgtgacgttccgaactcctttgacaggctcttttcctagttctggatcgagcaagcctgaggcgatgtcagggatgttgtctgggaaaaagagcttgagccgaccaacgagctctcctcaggtcaccgttgttgcacagtccaggatggaaattccggatgattttctctttcccgaggacaagaacggaaaagtttggaatctgatgctcaagcttcccccgtccgcttcggccgatgctgacgctagcctgcctggaggagggggaagctcgtcaagaggccagattggctcgaatggaattcgatggacggttcgaaacggaagacatgtggaggttaaattttacatagggattgaggtctggggaatcaagggttaccagacccagctgttgggctcgatcaaagacgtagaggtcgtgatggactgggaggaggccggagaggcgaaacaacggatagcagagattggatatgttgagtcgttgtgtggccgcaaccgtaatcttccaacaacggcatcggcatcgacatcgacattaatacctccttcgagatcctttgagcctccagtcttagtatcacccacaccaccatcagccgacgggttctttccgcccggtctagcatcccaacctatttctctatcacctcgttcttcccctgttaaaactccctctcagattccttactcgactggttctccacaaccaacccctgtactatcacgccaatctctgtctcagagcggcaagaaccaaatgtctgccatcgtgaactctgtcggttcgccgtgggaggcagcggcagtaaaaaggaattcgacagaacaaggtaccatcaccggtctgaccgccgttagcagagatgggcttctcgaatcaaacaactcttcttcatcttcgtccaccaatcagagagtttcgttgatgaatggttcatcaagagctgtctctggaccgttagcggctgaccgaatgagagatcagagtcaagggacaaggcgatctgcttctatgtcaatagggcggccacctgacttttcctcttcatcttcgttgccagtaaattcgccattatcatcaccatcgatatcggcgacgacaaaaacggtaacgacattaggcacagatttggatagaacaggctctccaggcccaagacctccgatgttcaacgaagaagacggcatccaaccaacgtatcaaactgccgaacaggaaaaagcattgctcttccaacgagctcagttggcagcttccagttcgagtgcgaacccagcttcctcctcgactctagtctcagccatccctccgttttctccccagctcccgcctccttctcctggtccgtcatcgagccaacctcagccgcgagttcggggccagtccggcctaattagtggccgacagaactcaccacagattttcgaaagtgctgaacaagaaaaacgaagactgtttcttgaagctcagcgaagagtgaccaaaactcatgccagtgctgctgttgctcatccttcggcaactgctcctaatggtcattcttcacgggagactggatcaatctcaaacgttagcgggtctgagccgggaccatctcgacagaaatgggagacagccgaacaggagaaggcgagactgtttcaggaggcaagaaatcgagtggctgctacccaggccggaggagagaacgacctggtgatcgcttcttcttcttctccctcatctttcccacttcaagtacctctgtctcctatttctactcctggtggcagagttcaggttgtccctcatcggttctcgagcattttacctattgtatctcacgtcccattgaacgaatcgcatcgtttgtcgtcttacgttgggtctacatcacagccgggctctataccggataacatgagctcgatcaaagccgggatggaaagcgtagggagagaaccggccggtctgacggacgcttcggaggaagggagagggagagatgaactgatgagctatgagagtttatttgggaagcagaatgagaacgaggcagagggatcgggcgaaggtgggtctaaaagtaggaatacaggtgatcggatgagcacctcgaaggtgactagcgagaaagttcggccttcctttcctctttccctcctatcttgtctttgtttcaccgtgcatggtttggcgcgcttgcttactttgcacttgctcctaaaaatacgaaccgaacgaacatatggataactaaacaggaccgattaaaactgtttcacgcagcccaggaagctgtggccatccgacagtctcaagctactgcttctgccgctactgcctcctcctcctcctcctcctcttccttttacccgacagcatatgatataccctccagtcctgcaggccatatctctacacccgtacatacgcctgcacctctagcgacgacgaacaaggcgactccggtagcccaaaagactatacccccggtgttgcctgtacgtccgccggctgaatatgcggccaaatacatcgacccggcgcttatgggaaccgtaggcaagtagagggtctatcatttaaatccgaccgaagtggaagaaggggttatatcaacaaatcgatgtgatcatttccatcatctccactgttgatcgatgagtctcaatcttgccaagtattacggggtctatttaaaaatacaggaacgaaaaaagagagaaaaaagggggtgcttggcttaccttggtgacagacaagaaagcggatccggccggggaagcgtaaccatgaactgtaaccgagtgcaagactcaatcgctcgaccgccgtctctcctatccctgctcttttgaacataccgaaggagtttctatctttgattcaatacggtaccaacaagaagaccaacacaaaatgcgattccatcaacctgagaaagactttcgactacaacaggtactgacagaaaccgagagatgaacacaagtggtgaccgagcagcacgccgaagacaagatattaagatcacggtgacaatgtgtagccaccgcgcagatcatctgcttacctaagctaatttgtcgatcaaggttcactcaactctgcccttctgctgattttcttttcttctttttccctccttcttgttggtgcagctcgttctctttcctatctccctctcccaccaggtcgtcaggagtaggctcatctcatccagctcacaaagcacacccgtacacacacacataccctttctttgggaacttgccacatacactcctttctctcgccttccttcccacacactctctcttacagccggtctctgttttttctttttcttatcctcttccctgaagtggcgcgtcgctcgttatagcctagagagaggaaaaaaaaaacaagggacctacatcaatcatgaagttctctacatgttcactattctcgctcgcctcactccttctctcctcggtcacttcggcttatccgtatacggaggagtatgtcaaatggaacatcaacatcaacaaagctgccggctcggacgtgctctcctatgcttctgaacgtggagccggtaggaacacgtcatatttccatagcccttccaactggcgagcccttccgttctacaacattcttctggacaagtttgctgtaagtcctatactcttagatctttctttagataaacatatgcggctagcttcgtggatttgaatcactcgataatcgacctttggaagggacagcagtggcaacagtcaggcctattggcgtaaactctaaagacatctcgtggcgattagatattgttcgagcccacaacacatatgttctccttgcgcatacaactcatcaactcattctttctcgttcatccggccgtcgacgtatgctcatcttatctctcttgttcctcctttatttcttctcggtccacttctccaacatcaggacggagacccaacaaataacgatttcttcaagtcccagtacgaacacgatcttcacgaggtcaattaccggtatggaggagacgtcaaaggacttaagaaacggttggactatattcaaggagctggatacaaagcgatctatatcgccggaacgatcttcgtcagtcctccccatttctcattcttgcttacccttcgttctttcgtcatctctggccggagagaaacctgaaaagctcatcacaaaactgtctcatcagatcaacatgccttggcaagccgactcctactcgcccatcgatttctcattgattgatccccattggggagtcttggacgactggagagaccttgttgacgagatgcatctcagaggaatgtacctcatgttggatttcactgtcggcacgatgaatgattatatcggctttgatgggtgagtctgaacaagtttgcttccgagaacttgtcgagataatagttgacgtccatttatcactcaacaattgtcgtatcgatggctggtagctatatgaatgtgtccactccgttctctacgaatgagtatgagatgaagtggaagcacccagtccgaacgccttgggatattcagcaatatgtcgacttcactgtgagtttttcaaattggtccatcagaaaccctcatcgtatcttttaaacttacaatgcaacctttttgattacttcactcgttctcttcacctttagtacaccaataaatacaacgattcgtgcacgctccctgaattctttggagacgacggatatcctgtcgatgcccagcatcaagggtgttacgcctcagagtttgaccagtacggagatatggaagcctttggagttcagtacgtctagatatctatccgcaacgaacactcagtatagattttgattttatcgtcctctttgccctgtttattttttcagtcccgattggcagcgacagctttcaaaattcgcctccgtacaggaccgtcttcgagaatgggagcccagggttatggacaagatcactacgttctcctgtctcgcaatcaaagcacttgatatcgatggtatcagaatcgacaaggctactcaattgactgttagtgggttggcatcctggacatccaagacacgagcgtgtgcagttgacctgggcaaagataacttcttcatcactggagaggtcaccggaggaaacacattcggtgctctctatcagttcgtatctcatttctcttcttaagcccttagataaaaacgtttccttgcctgaacacccctgattgatttgaccttcctttctatcttctatccaaaccaaactcacgtcttgatttcataggggccgaggacgaatgcctaaccagacctcggactcgttcgatttgggaaccacgatcaaagcaaacgacaccgcattcttccttcgaccagaaggcgactatgggctggacggaactgcgttccattactctgtctatcgagcgcttactagatttttaggaatggatggtaatttggccgttgcatacgataccgacatcaactttgtctcggcttataacaccatggtcgttacgaacgatttccttaacccacacacgggcgagttcgatatcagacacatgtatggatctggtaacttcgatgtcttccgttggggagcactcgagtctggacaagagcgatcgattttgggttcatttattactaccatgttgcttcccggagtgccgcttcactactacggggatgagcaaggtttctatctgttcgataacggagcgtccaactacttgttcggtcgacagcccatggctgcctcagccgcctggcaacgacacggttgctaccatctgggagccgatcagtactacaacatgccactcgagaaagcgctcatcggatgcgaagactcttggaactcacttgatcatttcgacccaaccgcccaaatccgacggatacttcgtcagtttaaccatctccgtacattctaccccgctatccaggacggagtatctgttgttcaacttggaaattggactcgggaggagtatttcccaggttcaaatggaacggcaacagagtttggactctggtctgtccagagaggaaacgctgcgggcgtcggcgacaagttctttgacaatgcgactaatccgtctcaagtttggatgttgtacacaaacgagaaccagacgaagacctacaaatttccgtgtacttcagatcagtggatctctactccatttacaggaggccagaccctccaaaacatcatctacccagttagtttggtttctcctcttgttcttactgcgcttgttgtgtttccctcttttctgatcaaccttccgttcgatctttaacatagtatgacaacgtcacacttgaaaactcgcaaaaatactatgacggcaaacatgagccttatacaggctgtttggccgaacttagcatggatgcctacgggttcaagatctatgttcttcaaaaagaatggactcctcctgcgcccgctttgaccaagtttactcccggccatgatgccagaattcttgctacctctcgcgagcccagtgacgtggacatcacgctggaatacaacgtccctatgaacattgacgacgtgttgaaagcgatttcgtttacctacggaaacaacacaaatccaaacatcaaaattaccaatacgaaatctgaaattattgacggatcaagagacggtcttctgtttgccgtggacaattctcaatggaggttcaccgccacattgacgaacgttcccaatgggatcatcgatatgcaaatcggcatcgtcactgcttcagacgctacgtttggctcgacgatcgcggtcgatcatctgatgattcgaaaaggacttgccaataatatcctcgttttccccgatcaagattacgacaactccatcttctacaccaccgacaccgggtacgccgttaaccatactgctgttggagcagacttgatccgatacaccgcaaactatggtgcgaactggacggactggttcgtctgggaggacacgacggtgattgagaagagcaagttcgacggtaacagttgggcaggccaacacatcattctcgaatatttctctgagacggccgccgcctcgcccctccaggtccacgcggatattggctatgaacaccagcgtcgagttcctgcgttccttgctagagggccgtacaacaactggggttatgattccggagttacaaacaaatttacccaatctgcggacgattctcaggagtggtctattcaaatttccgctagttggccaactatcattcagctctgcgtgtttggctatgacgattatttctacggcgatgttgacggagacggtgtgattgatcgactgcctccgaactcggtcgccccgaactatctaaacatgtctgcccctccctcgccttacgttgcctggaagatcatcgtggacgacgttaccggcgcttggcgcatggaacctcaaggaaacgcagcggtgtcggctgtgatgtttgctttgctcatagtgatccctgtattgacggctgtcctggcctgtttattcttcaagtacaagttttacggaatccacactaatgaatggggagtcaaggctgagaagacttcgtacgtacccattattggtgctctcatgggcaagggcaaggaccaagtcaatggagagaagaaagaatttggagctgctggagaggtcatcccgaccaaaagcggagttgtcatcggttggccagaggatccggcgaagcctcgacggaagatgcttatcgcctcgcttgagtacgagatcctcgattggaaactcaaggtcaaaattggaggacttggtgtgatgtcgacgttgatgggtaaagccatgaccgatgtcgatctgatctgggttatccccaaagtaaaagatttggagtacccgaccggagactatgccgatccaattgaggtgaccatctttggagagctttacttgatcgagtacgtcctttcaggattctttgtttttctctttttgtgtaaaatctatcactgtggatcttgagactgatcagaggcgtttatcattcctaaagggtcgagtctcacgtagttgataacatcaaatactacattcttgacagtcctgtgttccgtgctcagacaaaatccgatccttgtaagccgcatttgcttgatagtgtattcttggtttgttttgaaagagcttgaactgaaaatagtttcttttcaactcaactcatctctcgttagaccctgcccgaatggacgatttgtcgtccgccatcttctactctgcttggaatcaggctattgcggagacaattcgtcgacaccctgtgattgatatttaccacatcaacgattatcacggcgcacttgctccgctttatctgctccctaagatcattcctgtctgcctgtctttgcacaacgccgaattccaaggtctctggcctctgaggaccaaggaggaaatgaaggaagtctgtgcggcattcaacatctccaaggaagtttgcaccaaagtacatctcatctctttcctttcttcaactcgctttgtatagatctggtgctgaccttgaacttttgtagtatgttcaattcggaaacacgttcaacttgcttcatgctggagctgctttcatcagcgtacaccaaaactcggtcggtgtggctggtgtatctgataagtacggaaaacgatcctgggcccggtaccccgctttgtggacgcttcgaacgatcgattcgctgcccaatccggatccgactgatatcgctgcgcttgacgaggaacccatcgctgtggacaaggttgtgattgatgaagtcgctgaaaagcttcgaccggagaacaagaggctttgccaagaatgggctggcctcaagcaggatcccaaatcagatctctttgttttcgttggtcgatggtccaagcagaagggagttgacttgattgcggacgttatgccttcattgctggacaagaagccttcgatccaattgatctgtgttggaccagtgattgatctctatggacgattcgcggctgagaaactggccaggttgatggagatgtacccggatagggttttctccaagcccgagttcaccgctttgcccccatacattttcagtggagccgattttgcattgattccttcaagagacgagcctttcggtctggttgccgtcgagttcggaaggaagggtgccctaggagtcggagctagattaggaggtcttggtcttatgcctggatgggtacgaccttttgttctcttcgtcttctctttcttcgtttccattaaaagctcaaacacactaactgattgttttgtatatatcaaaattaaattacctagtggttccctgtggagtctgatacaacaaagcatatgctttctcaattgaccaagacaattaaacttgcgctcaagtcgaccgaggaacaccgagcaatccttcgtgcccgatccggagtccaacgattccctgttatcgaatggcgtcaacgaaccgaggacttccacaagcgatcgattcgaatcagtcgagatatggcgaaatcaatggcctggtctgctgtggattccgagaaccatggttctacttacaactacgccgagatgtatccccatgctcctgaacttgagaatgcagagcatggattggctcgttatcaaaactctggacgccgggactcagttacttcgatcgcgactagtgcaggcgcctatgaagacaacggaagcatctatgctggttacgaagacatcactccgattgaacctgctagccctcacggcgagatccaaacttacgatgacttcttggcccgggctaacaggcagattgctaaggataccaagggatcccgggatccatttgtcgaaggcggtgatcggaccccagaaaggcccttcaccatcaactctagggtttccagtgtagacagtatttcctctatcatggacgacaaggcctccagttcgcctctgaataaggctatcgtcgatgtgagttttctattgttggtgtctttaaatgcatcttactaattctcatgacaatctttttctttcttcagttcacggactcaaatggagaggttgctcaggacttcgtccaaaagcttcagctcctcaacgcaggcaactcgaagggtgatctctgcatcgaacaattcttgatcaagagcgagcgaaagtacttcgcgaccgtgaagaaagataagatcaacgccagtactgccagttataagggatcctctatcaagggatcttcacgagactccatgttcggaaccccatctccgtctcttcactacagttacggcgaggatggtgagcacggcgagcttgaccggtcccccgatatgggactctttggttccgaaggtcacgatagcaacagcgagccggcccattacccagagaaaccgatgactcgactgcagatcactatgcaacgtcagatcggcaagtggccggtgtactgtgtcattctcgctgctggtcaaatgctttctgccacgtcctatcagatgacgctactgtctggatcaaattaccagaaggacgctgcgctctacacgctctccggtatcttcctcggcttctcgttcgtctggtacggcctgttcagaatgaagccctcggttttcgtgctctctattccctggatcttcttcgccatctcattcttcatgatcggcatacccgctctcgttgatttgtctgtcgataccaactcttgggtcagtaacggagccagttggtcttatgccatcgcctccgccgctgggttcctcttcttcggatgcaactttggagaggaggccggagcgcccactgaggtttgggccatgcgagcttgcatagttcaaggcttgcaacagctttggacgactgcactctggtactggggtaacaagctgagcggaaatgctcccggagttcagcagccttggtggattacgcttattgtctggcctcttgccgtcttgtgcttgctcttctttgtttgtctctactggggacttcctgattactacaaccaggtgcctcctaaggttcccaacttcttccgcacgctctctcgaagaaagcttgttctttggttcttattctcggagattttgcagagttactggctttctggaccgtatggacgaaattggacattcttgtggagcgacacaagtgttcctgcttggggcattctcatcatggtattggtcttcttcatcggtgtttggggcctcgttcttagcatccttatcaagcttagcaagacacattcctggatcctctgcgtgtttgccgtcggtcttggttgcccgagatggtgtcagatgctctggggtacgtcaagtttggcgttgtacctcccctggggtggatccgttggtccgtacctcggtgtcggtctctggttgtggcttggagtgcttgatgcaatccaaggaattggactcggaatgattttgctccagacgctatcccgtttgcatgtgtgtgcgaccctggcgctcgcccagatcatcggaagtatagcagtgatggtggccagagcgacctctcccaatcgaatcggtcctggctcggtattcccggatgcttctttctggtcgttcgaagatggcatcaagggttcgcccatggccagcggggctttctgggctggattgctatgccagatcctcatcgttgttggttacttctggttctaccgacgggagaccttgtctagaccatagatgcttttctttctttcctttttttttcttcccttcactctcttattttcatttttcaatctcatcatcaatttccatgtttttagtgttcttccttatactcccctccttttcattcagaaagatgatttactttcttgcctcgtgtcttctttttgcattcatcataagtcttatcatcaattttgttcgacgtttgtccaatcgcctcctttcgttttccaatttcacatctctatcttttctctccctctcaaatggacatatcctttacgtcgctctttctctttttgaacgccctattttacgatgatcagactcaagaaacacatattacttgtagatattcacttcccttccatttctcctttctattggtaattgctggattttcttaaaggggtttgaatttctgtgttcgtgtcttgtgcctgcgcctctattttctgtggctcgtttctctgtcttcttacaattatcaaatgaaattcctcttctttttcgttacctcaatcagaaatgcgttcatctggagactggatatgaggttggttcctgatttgtatatcgcaagagatatctatgcaaaagctctttgattccttccctctgaggcatatgaaatatattgcgagacgatgagaggggagttcttctcccttattaactagtctcaatcatatcgacgctctgcctctcgatcccttgagattcttcctcgagggatttgtcaagagcagagacgacttggcgaacatcttcaaacgtgttgtacaaaggaattggtctgtttcagaaagcggaaagggaattattagaaggaaataacgaacagatggacgaggataaagtcaaataagaagaagaaaaaagagtttcgaaagaaaggacgaacgagattcggataacttcaggttctctctcatctcctacgacacctcttctgactaaaccttcgaacactctcttcatccctcctccttctctcccacctcgaccgacgatcttcagacttaattgtgctcccctctcttgttcgttctcaggtgtcagtatagcgaatccaatcttaacctctcgacctttgtcttctttggcgttctccgcaaggaagaatttggatgaccgaaggagaaggagaagatatcctgtcaacaaagtcgaccgaattctgacagctgggagaccacccgctttattaagtgtctcgagagaagcaataagaggaataagagagagtaaaggtgggttcgagtgttggtatccttgtgcaccggcgataggtttaaaagtggaaggcatagtgaatcgggtagtcttatcgtgaccccaccaaccagagaggcttgtttcgaaacgaggcgagaagagaagacccagaagaagtgaagtcagaagaagagtcagcaatctgacttgtatctttctgtaagagaggtgtgaatcgacttaccgaggaagtttcgcttcatcccacttggagtgaacaaacattccgccaaccgcacctggcccagaattcagatacttgtaagaacaccagaccgcgaagtctgttgaatgaagatttgagaaagaacaccaggaacttgagaattcgttttatgggaacagacaaaaagaaggatgatataaaaaagagacagaggaatggcgcataccgacgttccaatcatggagcttcaagggaacgtttccgacggcatgcgcgagatcgaatcctacaatgcagttctgttgccagtgatgatgattgaggaagagaatatacaaagaaacaagatgagttgaccaatgttctggcgctgggtgaacatttgtgcctgtgcccaaggatacaaacaaacctttgtcttgccggcctttgcgatagattccatatcaaacacctgcccggtatagtactgcacacctgataaccagaccaaagcaatctacacatgagaattcacatgcgcacgcatggtatcgtaagcctgcagtaccatcaatcaaggaggaatgaacagagaggaatgatccaacctcgtctccttgttcttcgatcacggacagaatgtcctctgtccgaaggttaccttccccttcacgcggaaagagctcgatcaaggataacgagtcaaggctgtgaagatcaagctgagattgaacggcatactattcgagtgttcggtcgaaaagcagcagagacagtatgatcagttttctctttgaaagaattcagagcgcgtgagcgcccatggaagtgtcgcaacgaatcagacatgatggcaccgacctgatcactaggaaaagccttgccttcaaccaagatcttagttcgctttccttcaggtcggaagaacgtgacgaacaaattgtgtaggttagatgttaacgtgctagtgcacgctacttctgactctgtcgaggcgccgacgaccgccttgagggccgggacgactttatcgtcgattgatttccaagggcgatcgtgaggatgatcgaaatggccaagaacagctctgagagagggggcgggtagcaatcaatcgcataagactgaagttcagtttctttcctcctatcaaactcgagtcggaagggcatcagcgaacggatacgctcactttgaactccatacatccatttcctgttgaataagttccctggcgagggtaggttgaaggcccaatgagtttccggccatgtagacacatggttcgtctgcaaaacaacaagagatcaggttagttagtgagtctcctaatctgaaagacaacaaggtcaaagacctaccgaggtcgcccaaggaagctcccatgtcttttttcttaggaagctggaaggcttctcgggcatggccggtcggaccggcccgctcagctagaagagctgcaaactgtggagagttcaactcatgggacgatttgcttaacagatcttgtaccaggtccatctagatatgtgtcgagtgagtgaggataggtgaatgagtgagtgaggtgagcacgagaacgatgatgatgatggtgatggtgatggtgatggtgatgataagtttgtcaaacatcttgactgcttttaaaatttccccatccgaacgttcactcgcttcgagttccaacatacatccctcgtctccaccctcatagtgatcttgtagatcagaccaagcgcatcgcttgtcttgcaccagatagagctcagcatagttcgggatatcaagaagaccaggaagcaagcatctgcacgccaggactttatcctcgggacgagacacgcagtcccagctgccatctcttccgttgaccatcacccaccatctcttctttcgtctctttctctttcttttgtgtggttgaagaatggaggtcgatcatccgctcatccaagagcttgtcactctaaggcaggctctcctaaagtatcaagtaagcgttctccatagtctggaagaagcatacgcgtatcctggttgaaccgaaatccttctgatgccttcctatccaggaagcagcccatcagtcagggctcaatctccaagggagccggttagatgctaccattctctcaggtatgtttagaccaaagactctgcttgtcagcagggttgtttcctgtatgaaccgttgatctgtctggctgtgcagacatatgaagtcctgaacctttgtcctccttgcttctcaccccacagacgaactcaaatccatacgttatacctattcgcttctgaaaaccgaggttgaaacccttcgagccaacccatctccctcgattccttcaaacgaatcgcttactctcaggcagctctctcttgcccatcggaagctatcccttctcttagacgagaccgaggaacgactgcgagagcgaaccgacgaatgggtgaacgagcgagcgtaccgtggccgggctgaaggcctgctggatgacttccgaaggagagaacgaaaaagaatgggccaggagattggtctaatcgtcgacaagaaaccagacgaagaggaaagcgagaactatgaggtcgaggatcttcgaaaggaactcgaccgagagcgagccagaggggatgaggagagatctcagaggtccgaattagagattgagttagacagacgcaaacgggaggaccgctcggccagcgctgtagtcgaacgatacatggcgttctctcaatcgtcctccctatcacttcattcgagtctggagaagctccgaacccggcacacagcaaccgtcacgacacttcaggcagagaatgagaagctagcgtacgatctatccatcgaacgcgaacgcaaccgaagccttttacgaagtttgggcgacgccgggaaagaggccggtagggaagcagagggccgacggagggagatcggattgtacgtccgaacgttctctcttgaaatacatctagactattctgaacaaatcgctcaactcttctttgccgtattctgacatcgcagacgactaaatgcattagctcgggaggagcgcatcctcgaactcatccgccggtggtcctccaaggctagattagcactctctcgactagatcagccgtcttctgccaatgaaacttcttcgttccctccgaacgcagtcgtctccgaactcttacaagaagcttctcaaattctaccaccttctcctgctcgacccacatcgacatcgttttttccctcaattttaggcatcgctcccagagtatcactcgaactcaaggctgacgcagtatcaccggaagcagcaaaggtatttttggcagaagaccttgttggtggactgataaaagaacttggcgaagaacgggaaaagcgaatcatgttggaacgaagagaatgggagctctttgggtgtgaaggtctggatgagggttacgactctggttcgaaagcagatcttgtcgagccattaaaaccagatgtcgagccagacagaatggagggatcgggcggtttgagtttgaaaaaggagaagaaggaggaagaaaagaccgaatcagtcatcgaagattctgcttttgagccaggttctctcaacacgctcgacctcaacagatcctcatcgatgtccagcatctcgactttggcatccgtcccttcttttggtgctccacttcccaccactaccatcaccaccaccaccaccactactaccgagcccactttgcctgtcccctcacttgaaacaaacctaccttctgatgtacatcctctgattcctcttcttgactcctctccagtacagtatcaagccatccaacactcctttcttcttatctccggttctatccgaactcagattcaatcgctatctactcagttaaaccaaacatcaaatgctggtgatggtgacgaccgccaagaacgactgatacctcaagaagtgttgagatccgcgctggaaagactggaagatataacagaagacgccagagtcgaactggagatctggggagacgatcggaagagaattgctgaaggctataaggttggcttaggtcttggcttggatagtatcgggccggagaaaaggaagggcaagcaaagcggtggtaacagttcattagagaaagaagtgcaagcgttcttggaaggtaaagggaagcgaggattagacgtatttcaaaggaggttggaggatttagaatgggatctggcagctgtacgttaaagtgttcttccttctgtatcgctcgaaacacaatgtctttaccgaaactcattccttgtatctgttatcctcttcgcttcacgcttgatagatcaaatcagcgatcaacaacccaacattcatcctttcaccctcatctactccctccccaaatctacctacccctcccaacttttcccgctcgctctcaactcccctcctattctctcatcaagtttacaacaacaaccacgccgtgtcgaatccatcttctttgactcaccctctttcgagtttgaaccttcgcaacatcatgccttctgcgttcccctccacatcatcaccgccactgtcagcgctgtcatcatccttgtcgtcacctatgcctcatcatcccttatcggcatattcttccaattccaacggttcttctcctgcctcttttttccccaccttccctacctccgccacgatgaactcgagtgcgatacagatccataacggcgcccgcggcccatcgaggtcgtccgcagttggacttgcccgatcatccttctcaaatctaggaagaatgttccgagatccaggatcacacgtcacctcggtgccaaacacgatgaggtccgtctctgtaggagagaccagaggaggtggcgaagggaaaaggatggccagagtactcagtaggactcgagcaggtgaagacttaggaggttctgcagaggaagaggaagagactgagaagacgcttgaagaaaacagaagtgttgacgatggtagtagtgggggtagcggcaacagtgatgaagactctggatcagagaaagaagtcgagtgatcgagttaacggttcaagaccattcccctccctatacacccaatacgctgccattgttacccctgcctcctcttgcatttgcttcattttgttttccttccggtcttcttttttcaatcttttttctgttttatatctttggccttggctttttcgcgcttacgttgttgtatcatctcgaacggaaagctacattcacgtttattcttcctatcactttgtgatcaactctaatggatttcttacatgcatatctcatcccactctacctgcccgtacatacattttcttcatcaaagatgatatcaaaagacattactttgttgttgtgcttacgctgcctcaaatatgtaggaaacctggtggtctaacccttgtgatgtccgcgcatgatcgagggcaatctgaaacgaaccagatgatattgccattcccactcggagtacagacagcacatctatatctaaacctgagcgctgatttcccccctcggacagaagattatttctctattctgttcctagcgccctccaagaacgccccggctccttctctgagaccacctctgatacctctctccgccgtcaatccaacccgttccccttgctctctgacgtttgggtccttacttccccaagctgcgtcttctgctaagcgttcgcctacgtggacgagttttgatcgaagcacaggttgacgaacgacagccagacgagatgtctcgatcagcttcaggtgagatagaagagcttctagttgaggagctactcgggggagcgcgacaagaggagaggtctgagatggtggagccggaggaggggagagcaaaggaagaaggaagggaaggataatgaatatgatgtgcctgatcgtttctagtttgaccgagagctgtttgagagttgagcagagtgagagagtgagagagtgagaactttcggtcagcatgttggcacgtccgacaaagatcaacagagaaacaagggaggaaaggacatgatggagaccgacctgctcgccgtctcctcgagtggtttcgattcccttaagaccagccgtggcaatctctagaacgaaccccaaaccgatggcccagcccaacaccactctccaccttcctctccctatcaaccctgcgagccaggccaaggcgatgccttcgcctagataatctagcccgatgctggtagctctgtaggcccaccaatctgtgaactcgacaggtgaacaccaagtacatcctcgaagagtgtcatgtccaaatcgtgcgtagattgctcgagtgtcatacgacgtcaacttgcccaatacgtattgcagatgcgacggaagagtaggcttgctggcgagtcctgttcgatcagacataagctcagggtaggtcgaccgaataagttcctctctgatccgacgaatcgaagaggagaacaatgggaggccagtttgagtgaagatgttcaacggtgggcgaaacaaccggtaaacatggtagacactatgggaaccaaggagagcaagaacagatggagatgatattaaaggacggagaagtttagatgaggatagggacctggtgtatgctatcaaccgaggcactcgagggaggacgaatggtaggataaggatcacaaaggtgatataagaagagagtgagttgatgagtcccagcatcttgcgcgtgtaaatgtagatgcgtgagtgttccgttcttcttcggtcaagacgatagatgggaagaagaagagcgtgaacttccgggagaccgatgtttgtcctgctttcgaacagagaaggatctcagacgaaaactctttgtcgtcggacggtcgctcgatcgaacggttgatgttgttgatggaagaacgagaagacacgaccaaaagaaagaatactcttcgatcctcatcattccatccatcccatcatcatcatcatcatcatcatcatcatcatcatcatcatcctcgtccatactagcagccgatgccatcttccatgcctctgccgacgacaacaacaacagcaatgacaacgacgaaaaaggcatcgcccttgaccgatacaactgacaagccagatggaaaactatcaaccgcagagggcgtcagctcacctgcagagttgatgaactttgtgcgttctcgtttctttccatgtctctctactgtgttatccaaagtcaaacgatccatcgggcttactgtcgagtgttgtatcgaacaaacgaatgaaccaaccgagaaactcagattgattcaatgatggctcaattagaagacaagtacaacgaaacatcgacagaagtcctgtgagccttccttctgtcccgtttccatctatgacggactacctctctctgtttggttggtcagtgagctgacgatgtccgagatgatcatcgaacgatcctgttaactctctccgcatactcagagagaaacgtgagtcttgtttccgagtttcgatgctttgtagagccttgtcgcttacttcgagaaacaccaaaacgggtattccaaacataaagtcaacaagatgtcgacacgtatagattcgttggagatctcgatttcagagatcctcagtacaccaattgccccatcatcgacatcaaccccgtctttgtcggcaggtcctacatcggctacgtctacttcttccggtctggcttccgctcctgccgatggttctgcgccatgactagtttgggttcatacctttgtacagaaccttgaaaagatgaaggaaccatgtgccctcatgctatcccgatgaccttctgtcttgtcttcattagggctttcttagtcttgtagttaaaatatcatgttccgaacgatggcgagttgttttgtaaaagtttctttacgtgtatctaggcataggatagaccaggctagatacgatatgatgcacttctttatacagtattccaacagacgctcaggccattagaatttatttaggaaaagaggatttagagctttcattttcctttttttttctttttttcttttgactacactggtacacaagagccaagccggttcatagccaaaaggcgcgaggagagagaaggaacatcatgcctggtcaggatgaatgaggtgaccacgaccatgacggacaaaggtacactcactatatcaccctcctatcgagcagaaaacgagcttggttgaagaggacagacaacccagatgtcctaaacttcttccatatcctcgtcatcttcatcgtccgaggcggatgcgctccctgtcagaccatcttgtccttgtccgagatcagcgtttgaacctgacggttggctatccgagtgcgccgtggtggtactgctggcggcggccaacctcttgctctcttcctcttcctccttccttcttctttccttcccggcttgcttgtatacatccatcaacgtccaatatccagtgtacggcccagactttacggccaccgctatatccatcatgacctctttgaggtagatctctggttgagcggttttttcccgaagtcctttgagccgccagtactcgtgcttgtcgaaatgagaaaacaacaagtccaacagttcgttccgaggtagtcgggtcgccttgtccaacgactttttcgacggcggttgctgtagtcaaatcgagcaaaaactatctttagaaaggaaaatagaggaaatagagaaaagggaagaagaaggataacactaggaattcggcagaaagagagagagagagagagggcaagaactaaagaaatactcacgaaaccaccaaacttgccctttgttcgatcggctccggtagccgctccaccttgaacgaacccactggccatcatggccatctttcctgcgccttctttctcttcgtccagcaactttaacgtccgctttggcttgtccgctctcgcctgacggtctctcatcattgcgctgtatgctggtccggatctgggacggagggaggcttcgtgatggattttcgagtagatctttgggtatactgaaagaggacagcgacaaaagttagtgaaacaagagcgagagctaacaaggaaaggcaagaagggcaaggagaggatcaagaagagacacctaccccgtcggtggtcatccttgggagtctctttaaagatgaaacccaaacgcttcgggtcgccgtcatccgtggtggctggtgtcaacgagagttcatactctgtgaccagtttcgaggtgtcgtaccctggttccggtggaagaagaagcgagatctttggctgagtctctcccggttgtctgtgtgaaggaaacaagaagaaatgtgatgagcggttgtccgattccggatgagtgtttggatagaaaaaactgagctggacgagaagaaagagcaagagaatgaaagacaagaggtacatacacatcgtataccctcatggttgccaggtgaagtccggcttcctggacctgtgcccatcgttcctgtagaaactttgggacctaaggagagacaaggagaacataggcttcacatgtccgatctttcctagcaagaagcgaatgcacaacgaactaaccttgaccaaccagatctttctaccgtcgtaaccgttctcgagttcgagaaactcttcgacctggccatcgttctcaaccgagccgtcctcggcgccttccttgtccatatccatgacaaatccgtcgttctcgtccgccatttgtgtgtatatatgagctctgagctagatgtatgagtgaaggtgtgagtatgctgtaggatgagctgtgtgaagggcgagatgaccaggtcgataaagagagggagagagagagctagagagctagagatctgggaagaaagggtttcgattcgttgagactagcaggtgttggccggtgcaccgctttgtggcaagacacctcagagggagcccttgaggtcagagacagagacattgaccacagagagtcaacgacggtagtgtagagacttcagagaagcaagcaagaggtcgttcaaacagatggctatggcagctcgatagaaagagacgacagagaagacatcagaggaaggcagtatcggaggactacagggtgaacacactatagaaggtattagggcaaggaatagagacagagagaatacaaagccagaaaatactacagaaaacactacagttcttggtagaaaacgtattagggtgagactacaaactcttactaaagacaccacgcccaacaacagggtacagatcagagagtaattaaggaaaggtgccgaaggaaccgcagcattgacacagcctgagcgcagcgtcttttggccaaagcgggcaggcgatcaggtccgatcgatagaattaaccacgccgccctggcgggctggatccttaatctgccctgccgttcgtcacaagccaccggatcataggccgatctaaatgaaaaacaccgacaatcacgtgacccttttgtctaccgaaccctcaccctccatccatccacccattgtctcgctctcgctaacactcccgttggtcccactgggacagtcactcactcggccttcgttcaggatatcacacccacccacatacatacacacacacacatagagatacacacgctcaaagagcctgagcgatcatgcccactcatcttttttcaagagcaggtgtgggtgctccataccaaggagacgatccagccaagatccagctctgccaatcataccaaccgggctttggttagtgttttgtgggctcgcgttcggtgtgcttgcgtgttattgaccatttgtcgttctctttctgtttctttcatcaatcgacgcttcctaaagtcgtactcagtgtgctcattgctatcgttggctcggcgtcgaccattgaactcttgttgcgcaggttggctctccgggggtttcctcctctctctctctctctctctctctcactccattcgttcgtagtactaaccatccgcatcatctcaaatttatcttacagaacggccaaccgaggtgcatggaacattggtctcctcataggtgctggagtttctttcggagcagtatcaacatttgccatgtatgtcccttcctctgtctgtgtttttctaaccgtccagactagatattcattacgttcagtttttcttcctgccttccttgtttcccttctctccatcttccgtcccctcccccttgtcttttgacttcaacttgatgctatatccctgtcacaggcactacattggcaacaattcaatcactctgttaatcccggcatccgattttcgagtttatggaatccaccggatcagattatcgtattctcccggttacaccgtcctcagtcttatcgtcagcgtcgtcagcatgtgtgccgcgtttgccgtgaacggactcgatgtcgagggtctcctcaccgaatggagagagacgcggaaaaagaagaagaaacagcatctgccgttcgcctcagagatggtacagacggcacaggctccaagagtaaatcagctagggaaagaacaaaatgaaaactcgacgataaagagtggagtgttttctcagtcgatacctatgaaacctacgcttcatcattctctctcttctctctctcagcctcagcctccgccttcgcctctagtttcttcttcttcttcttcttcttcttcttcctcctctgttcatccttcgcatactcttggcgacccttttccttcaaatgaatacccaacttcaaacccaagcaataccccagtcaccatcatcgaaaataacaacaacaacaacaacaacaacagcaaggtcgatgaaaacgactctccccttagccgaactcctgtccagactcgaaatccatattcttcatatctctccgttacatcgatcccgttgtcgggtcgacggatgagctttgaagagtttgcagactctgctgtgggcggagggatgctcaatcgaattccctcacaggatgttgtacctgtactctcaaattttcaatcagggaagtacaacagagggattttctccgcgctgttcgaagaagaaaaagggatgggattcaaaccgatcagcgaagagaagccgagttatgttgaagaagaaatcatgaaggacgggaatcaagttcgaatagaatcggtagaggcatcatggtccgagccgcacaaaccgctgagcaaaaaacaaggcgacgacgatggatcggaaatctctgaacctgaccaaaaactcgaccatgatcatggtcaaaaggaacggatcaatcacgagtaccaatccaccgaatggacaaatcacatagatctttccaaaagatctcggtcgtctataggaggatcaacgacagatagcacaacagatcaagagattggcacgaaaggcagaggcaaaattgtgaattggtggattagggaactcggcctgagggacgtcacaaggttcgaggtttggaaggtcgtcatcgccggtacaatctgtggattcggagtcgccgggatgcgtaagtctgtgctcctctttcctcttcctttctttcaacatctttctggccagactgacgcctctaggattcctcttcctcttgcgcacaacagactacctcggccaaagatcaatcaactcaataccctatgtcgcctattctccatttctagtcgtgctctccgtcttgattgcctgtggagcggtcaccgtcgggctgtgggtgttgtttttagtgttgagaccaaagttgaagcactctctgttgaaacgcttagctacaagctgcatccttggaggagcgaccagtttgatgcactggaccgcggtgctgggaacttcttatgctgtcaatgccgatctagtcggtatgtgttaattcctccaaatctgatctatcacaagcccactttctccccttctttcatccaataacgccgaattcttcgtctcttttccttctgttttctctcgggatcacagacattccgtccaaaacgacacaagggaccgctagacggctaatttccggacttgtcgccggtttggccgtcgtcgcgtgtgtggtgaccgtcgcgtctgttagcctggcccaccgaaggatgattgcccacaaggcccgtcgacgaggtgtcgtcctcgctgccgctatattcgacgaaaagggacatgtcctcgtcacgccggatggtgtccttccgttgtacagtcttggaaatttagatcaactacagaccgttcatcaacacccaaacgctcacaaacgatcaagttggaaatctcacatgcctcatcgattctctggtactaggtttgatgaggagagtttggattcatcgagcgtacaggatttcgatctgacaaatagccatccggcattcgtcgcctctcttcggtccacatggagttggaaacaacccgggtcttatcctactttatcatcgtcctacaacagtagcaacaacaacaaggcctcaagccgacgtcaatctactatgtctctcgatatagaggctgataattcacccaccggtcggtcgatgttggaagaaagcggagatgtcacatcgtttgtctctgccttctcaccaaacatcgctcgatcgttcggctcgatgagctcaacaacacccagaccgttaaaagctagcgcgaggaggtttgtatcaaagttcacagaggcagccgccactttggcggtcgaattgacgggtagtgcaaagaatgctcggatgctgggtgtcctgtatgatcgaatctttactaccggctttgtctcgttctcctctaccccagaaacgcatgaaccgtcaggtgcagtcaacacagtttccagaggacaacttcttctcttggcagggcgttgtgagaaccacaccgaccgggcgctctacaacagacgagggtacacctttgtagagtcttcggcgatgtgcagaatcatgtccaccgtgctctctgttcccctagccgacatgttaccgttcgttcaatctatggagattttcactaggctgaagccgacggtcccgaaggcgcaagggagagtctatgtcggcgcgctagccgtacagccattaccgtttgaagggttgaagattcttctgggagaggttgacaggacgaatatcccgatgaaggagtttggagtgactctggccgatggatcgatcgcgtcctctcaggcttccactcataaagatatcaaacgatcccacttggctctgtcgatcaacgaacttggagaggcaattgctaagatggacggatcgactttagaacagatgcttcatgaagcatcatcctcgttcaacaacactgagcctgatcaactacagatcgtactgattgattcgatcctgtcgatgctcagaagactaccacaggatgttctcaagatcctcgtcaagagcttcgttatctgtccatcaatcatcactctttcacccccctcatcgactaccaataccactactaccacacgaggattcgtccatgtgcagggaaaagaaccttcgtatatggttgtgttcagagcaatcttgccaccaacgatagacgtcagctccgttggtgggtcattcacatgggagcctttcaggctgtttagaaccaagaacgaatgtgtccttcaagaagctcgtctgagtgctggtggggatgcccatacgttaggcgcaggatcagatgatccgagactcggtggacaggctccatcgagaagaccctcaaaagttcaatggggcgaaattcgttctccccaaggtcctatccctgccaacgatacaaccagtattaacggtcaccgatggacaaagaaccagacacaaacacagccaggctcgatgttttccgaatcgttctcactctgtccttcagcgacagccacgccgatcacgccggtgacgacttaccggccgccccacattcttgttcgctcaccgacaggcgaccccacagagggagaaggaggtgagaccgatgtgaaagacggtttggatagaatcagtgagaatgaagatgagaaggagaaggagaaggagaaggagaaggagaaggagaaggagaaggagaaggagaaggagaaggagaaggagaaagagggcgaggtcagagcgtatagcgatacgtggttaagtcaacttcttctcgtaagaggggtgaacgtttgatgcttgatcctccgcccgtctcggctccttctctttcgaccccctcccttgcgatcctttctttctttttgtttctttttgttttgtttttgttttttcctttggagaaatgttgtcttctttagtcatcctttgtcaatgttgtgcattccacagtttctttccttttgctctatgttttgatttttttttcttcgcttcaaatctatctcgggcttcatctttttttcttcgcactctgtacttctcgctctgcttcctgtcttttcgtttctttgatttctgtgccaacttatccgacaagaaatcaaggttaccgtcccacctctcatgtctttgacctaaaccaaagttgtatttctgctccttgcaatacgttgatcgttccaatctctggagtctccctttcctcccttcctccctccctcatttatctctttctatagagaagaatcctcctctctgccttcccaaaaaagatctcccttcgaatcttgaacgaaatctgatcctctatatacttgcatgtatacgtatctacttttatttatttattctgccccctttcttttcccatattctttcattcttgattctttatttattcgaatctgtgcttccatctagaaggatagaaagatatctgtatgattactcgagttaaccaagggaaacgtgtgctctttaatttttgtttgtcttctaatttgtctcaaagagaaaaaggaaaactgggacatctctggtgttccccgacgggatcaatcatgatttctttattaaggtgatggtctgctgattgttcggtctgcggacaaagaaccaacgatgatctcatttattcgtccatcggttcactcacaaacaaaccgacgtatcaattcatacgtataaccaaaaggaagcaccaagacaaatacacgctacacactacacgctacacacacacacatgtcaactctacctttcctaggtaaacaaacttagaaaagaaggtcatctctcctgggcgcaggcgtatccgcactatacccatctgatcccagatcaaatgcgctcagaccggcatacgcatcccctccgttgagagtcgagcctgatcgttgtctctgctgttgttggtgctgatggtgatcgggatcttgttcgggatcgtcttcgtcgatcatgctagtcgacgtgttcgtccgaacaggcaacggcggtggtctcggatgctgctgtccttgttgaagacctcctcgttgaccgttgacatcgtctgaagccgagtttgatgggatagaagggagtgatgacgaattcgatggaagaggaaggacggctgagaatccgttggctgattgaagatgttttcgagttcttgttttatccatttgtttagttgagagagagaccccaggcgcgagggatgatatgtcaaaaaggatgagtgagtcctcacgcgcggtgtataggcaaggcaacgtagaaaagaaggacacgcacgtcgggttcatcgcaggggaatcagagagatattttgccttggccgtccgaataaatgtttgcgggctctaaatgtaagaagtaaggcacaaagaagcgatatcagaacacaaccgaacacaaggaatctgatctcttgaactttctgaacgagaggaacgagaacaaaccttgtggtagatactcgagagtgttccggtgtgcatcaatagttgatccagtaaacctctgtccattcgatcggtctctgtcgagattggtggcttttctgccaagacgatatccctcgcgcccgtcgggtcggtcgacagcagacgccagtagaagaaaccctttgatggagagcaagcaagcacgcaaaggtgatatgttcaactctgcattcagacaaagccatgccaaagagttcaaactcactcgatctcggaggtcaggattctcagcctcctcggtggccaacttgaggaccttgggcaacaattcttgaccggcaacaggtcgacggatgaacaacttgacagtcgctgtcagcagagcgagttggacctgcaagtcgatatattcatagacgtatcagtacacattcccaagacgcctcaagagaggacggacaaataatagaggggaaaagaaggaaagaaacgagagtgaactcgaacggacctcggccggctcctctacaaaggtgaacacccaatcttccaatagctcatcagaattctcgatccgatcggcatactgtcctacgatccagatcattgccgcctttgcctctggttcgtccaacacgtccagattctcacaaagcgtgccgatgatactctcatactgattcgggtatcttctgaagatgtctttgatcactactacagcctcctgggtgacatacgaaatctttgtctcgatgaggagcaggagaccagaaatgcacttgtcggctgcgctaggaattttgattgccagacgaccaatcgatcgaacagcttttctcacaaagtcaacatcaacctccgaggcgtatcttttttccgtcaacgaagtgagcagagaaggatgttaaaagattagtcacggagaggggaattttcgagaggattgaagaaagaaaaactgactctttcaattcttccagaacctcatgagcgttctgctctctggcgagtctatacatgatctcgagctttgcgagcttgacatagattgggtcattatacttgcagaagaataccttgacttcgttttgcaagatccctgggcgacgctgaatgatcagcagaatgtttcgtagcgcaacatactgaacctcggggccagatgacagtaatgtcactgttacaattcaagaaaagaaaacacgattaagagaacgcaataaggaaaaacacacagacagaagagggcacacatgcgggtcagtattatcgatcggacatttgccttctctatcatatacaggtacatcaggaacagagcgcacgaacctaagggtggtcccatctttttttcgagactgcggattgtgtctttatcgtccatatagttcatcagatagagcatgatcttgatcgtggtgagcacgaccgcagaatttgcatgttgaagcctaaccgaaattcgttctgctaaggtctcggcgtccaacgagtttgtaggcgtgtaggcaagaagcgagtcaagaatgtaaatctgtccccatctgttgaagatcagacgatcaccggacgagttgtaagataagaagtgcattagagtcgagaatctgttaagaacaaaggctcactctgaacactcgcccaacgcagctaccagtttaccggcaacagtaacattcagcctgagcgcaatctcgtcgcttctttctgaaatttcaaccagcgatgccaccgcgttggcgaccaccgttggatttgagtctgccagcaggtctcgtaatgaagagatgaacgcgggcgatcggtcgagtgcctgtcttccgataggggtcgagtatagtttggcgacgctaagaatgcatggagatacgttgacaaatatacatcatcaggaatgaaaactcgccgtgcgggctgaacattcaaaatacagaggccacgtacgaaagcgctgctgtctttctaacatatggatcggcgtctttgaggccgtgtctcaacggatcaatcaccgcggataccatagcgggcagcggaattgaggtcattgtacgaagtgcgagcgcccgaatcaatgggttccggtcttcacaatcggcgaggaagcaaggaatagcggctgaggtatcatctggcttaaatctgccataattgatcaggaagaggtagaccactgaacgcgtagaacaagtaggttgtgaaaataatggccggttgatgactgaaatcaggacgcgagtgactgttcttgggagagaagacatataaggaagagaaacaaggacgcactctttttgatctcaaggacctggataggcatcgattgaatcacatccggaaacaaaggggacactgtacatgacgtaggagtgaataataagtaaaacgaaacgcatatatcgatcccttactattctctcaatcgcgctcgagagattcaaagatggaaagaacaaggcttactatcgttgcccatggtcatctgcgaaggagaggaaggtgaatgttgaccgaaggagagacaaggttatcaatacttgccgttatcgttccgatctatatgttccttgataggttggtctatactgaactcacgttggccacgacctttttcaacacaatctttctctttaaccatgccttgtccttttttgtgctcccgctgtcgccagactgttggagctccatccggagctcttggatcttcccccgagctaattgagagagatgacggatgagagtggagcaatgatggttgacggagaattattagataattgtgtttgaggtcgagagtgcgtaaaggagagagggaaagaagcaaataggattagttgacaggtttcggagaaagcccgaggactatacaagacagacggagacgatgggagaagacttactgaagaattttgcatctgatccggaagtggatgctgacatgaaaggattaacacaaaagggtgagagaagaggaagacgatgaaagagactaagagagaggaaagagagaaggagagaaggagagagatagaacgagagagagatggcaaagtaagcaggcagatggtgttgtgtgtgggtgtgaatgggagggcgcgaggaagagaaaaacactacagattggcactatagcttgtactacgaaagcctcaaaattcctaatactcctctaaccctaccagtctatgcaagtctgtgttgacccactctgatcgtcaggctatcaccatatcgcatgttcgccgagtaagtagcgacaatgtctcatgagccagctagcgcacacacatgtcgaccgcatgctcatccaattgtctccggtagtcttcaagggaggttcataaaggcaagcaccacagggaccttgcaagtgtaggtcacagtggtacaacggatggctcggttagtcacttcacttaacacagccctcccacgggcttgtgaacgctacctaagccaatcatgtattctattccccagcgacttcgtcccttgtctccatgccctgcccggtcttttccttcattttgcgtctttttttcttttaatattttttctctccttttccttctctacaaactcgtctaaacttcttccctctcagcctttcaactctttccccctttccttcttctccttcctccttctcccttcccctcccttcttcttctccttcttctccttctcctcttccttcccttcctcctcttccttcctctccctctctcacatagccatgtccgcttctggtgagttttgttcgttgatgattcagttctagtggcttcgttcctctttcctgcctaggttcaacctagtcccttgaaagctgtcaagggattcgatcaggttccatcgttccatctacaactagaccacataaaaagtacaaaccgagatcaatgctgatccgttgtgtcattgtctgttctccttcgtccttgttaaaactttccgttcaacagctaccgaatccgcccccaccgaccccgtccagggagagaactctccggtttccccttccactgaggtcaagtcgaccggtgaggatcgctcgaacgaggacggagaacagagtcagagtaatctcactctccgagccttggtatccactaaggaggccggtgtcatcatcggtcagttgtcactctcgtttcagtctttcaacgcatccagcgcaggaacagacccattgggctttgcatgcctgaaaagccagggcgagaggtcgatccatcgttgtatgcgctcttactgacttgaagattactgttcggccaaatctttccatcttttcttatttaggcaaagccggaaagaacgttgccgatcttcgagacgctaccggtgtcaaggctggtgtctccaaggttgtccacggtgtcaacgaccgtgtcttgagcatcagtggatccgtcgaggctgtcgctcacgtacgtcttgaaatattctctgtcatgatatctgttgtcattgggtagcaagctgtctaatcttcagacaaacataatgaataaatgctcatatctcacttgttctgttaacccttcgccaatgcctcccttaggcctactccgagatttctcgacagcttctcgagactcctctttctc

SEQ ID NO: 1932 - DNA, 12626 bp, Xanthophyllomyces dendrorhous
tttcacctcagttcgactgttgatctcgcacaacttgatgggcacaatcatcggtcgatccggacttaagatcaaggccattcaggacacctcgggagcccgaatggttgcctcaaaggagatgcttccccagtcgaccgagcgagtcgtcgaggtccagggaacgaccgaggccatcaaggtcgccgttctcgagatcggacgatgcttgttggaagactgggagcgaggacaaggaaccgttctctaccaccctggagccggaggagacgccggtgtgctcgctggtggaggagctagcgctcctggagccgttgttggtcgacgaccttccgctggattctctaccggtcctatggccggtgggttcgttgccacctctgctcctactcctcgaagagcgagcaatgttggaaacagcgattaccaaaagcccgctccttcggccgcccagagcgccaccgccaacgcccctgagggttcattgaggacccagaacatctctatcccttccgacatggtgggttgcatcatgtaagtcgttcaaaattccttgaactcttctgttcttctcttgattgtactgcagagatatcagtaaacctgacaaatcgcctttcttcagcggccgggccggttccaagatcaccgaaatccgacgactctctgggtccaagatctccatcgccaaggttcctcacgacgagactggcgagcgaatgtttaccattgtcggtacctccgagtccaatgagaaggctcttttcctcctctacaaccagcttgagtctgagaagactcgacgagtcgagggtgccgagcagggtgagggagatgagtaaacctgcggttcggcaatgaaggagagatgttcggatgatcgggcttcgactcaaaggggaagcgcgtgcaggtgaataggttgggttggaaggtcaaagagccacgtcaggtcctctttactgatggtatctgactgctgtatcttggctttggcaactcatctctttgcttccgcaagaaagtatcttcaacaccaaaagatttaactgcacacaattcttcctttcgactcgcctgcctccggtctcatctctttctatctctcctcttttgtttacctttttcattttaaaaaatctctccccccctctctgccttccccaatcacatgttctcttgtattggtactgctttcgtcttagtatattcatttctagcctgtatggcatgatgctttttttttcttggtttaagggtgtttttgaccaactgaacatgttcatcatatcttttgagactcgttcgggcgccatcttgtctagtcaatgactatcgaagacaaacgaaacgagacttctttaacgaactgaaactacgtatcacgtgatccaattcgccacaactgacaagacaacatggctgttttcgccggtccatcaggaatgtgatcgcatcatcaacaatcctagaagaacacatatacacacactcaaacatacatcaacatcatcaagctctgaatatctctgtgtatctgggatcttgatatcggattgatccggttttgttcgagtcgaattctctgcttgagcctgtggactattcaaggataaacagacggaacgtgtgtgtgcgtgcgtgtgtgtgtcctgggtgtcgagttggacgccgactgtacctcgtctgagtttgtcaatcgggaagactttgaacgcactcaagactcatcaccctattgtctcaagatatagagcgagatcatctgatacaacaaaatccccatacggatatatcggggtcctcactctaatcaggcgctctcaatacaatggagcaaccaacacatccgcatcagcatcatcggcacccttccgtaaggtcaatctcacctccaagaatctcggaggtctccccatttcaggacgaagaagatggtgcaggcacagctgtcaaacagatggttagtaagctgatgggacatgtcaaaaagacgttctcatcgccggtggtctcggccacgccatcgatggaggatgaccgaagcttctctcaaggagatatgacaagaggtggaaggaatagatcgattgaccaagatattaagaaggaagatatcatgactggaaaggccagggaaggctcaggagaggtctcagccttgggactgatgccagctatcgtccttcatccttccgcgaatggaccgtcctcaccttcgtcctctggttcacatccaagcttgactacgaccaggctcaattccatatcaccgagaccgaggcctaatcttttgacaggtccggtcaaagtatcgagttctgatgctcattcgaatcggtcatcgatacgatctccaccaatgccgttacagactagatctgggtcagaagacgtttcatcagcgttcaagttgagaccgacgtcggctacgtccttgacctttgcatcctcctcatccgccaataacacttcctcttctacctcaacttctaacaacgcacaacttaaaacacacccgacattggtcacttcgctgtcaccatccttgaagcccggtctctctcgaccaacctcggctcttcaacggcaatcatcgtcagggtctgccacgtctaaattatcgtcctcgcttgcgagcggtttcagcgacgggacttcaggcgttccttcattctcaacaaggttgatgggcccatcatcagccgcgcctgtgacgagtgtagatttggcgagaggacggtccgtgtcggcatctcatccattgaaaccctactctcacggccaaacacaggaagatatccatccaaccacaaactcggttccacagcaatcaagtggcatggattcaggtgtaggaggagcacagatggttgaaacggaagcgggagacaaactggttgaaagctcttctgaatcagcagcgactaccgctcgaacgaatagtttcaaatcgatgtttgcctccaagttctccctctcatcatcaaatcacctggcgtcaccaccgcctgcacccggtccttcgagacctcgaaagatcaaccagatgtatctctctcattcggttcatccctctctggactcggcattgggtctatctccctctttcaccaacggaagccttggttcatcgttcggcggaggcgggtttaatggtgggggaggatacgacgtcggattcaccagtatacctggttatccactagctcctgagggagaaggagactcgaggagtatcaggacattgaacagttcagtcggagcaggcagaaggagaagtgtaggcagagtaattagaaagttgacacagggcgaggttctgagtaaggattactggatggcggacgagacggcgactgccgtatgtgctctattctcttattttttccgcttttttttccttctcattcaaacttctggtcattctatgttctaacaaactgttcctttctaacgatgcgcatatatcaattcgctcgtgccaacagtgctacgactgtactagagtgtttaccacttttactcggaaacatcactgtcgaatatgcggtcagatcttttgcgcaagatgcgcgtccaatatattaagagccaaccgattcggttcagaaggaaccgttagggtttgtaatttatgcatgaaaatcatggaggatagtacgtattcgtttagtctctttcgtttcaatattcgatttttgttttggcattgaagtgatgttttttgtctcactacctcttgctgtctccattttttcaatcaataaaaagccgattcggatgacgacgacgatcaccatagtgtaggatcctatactcatcctcatcgatcacctctaccaccaacactcgagtttgatctcccaccagaaggttccttctcccactctcacagccatgctcatctgccctatacccttctctctcgacctttagaatctccattgttgtcagacttaatatacaccactccattcatacataagaatacctctcccgacagttctcatccggacgagccgctctccccggaaaaacactttcagcttttcatgaattccggctacggatccccacagcaatactatgacgagcattccaagagctggggaattcatatcggtctcaatcaactttcgacgggtaagaccgagccagcgcctttcaggagaacgattggggacgaagagatggaggaacaaggtcaatcgagtgtcaagatgaactcattggatgacaaggacgagggtgggttaagccaaggaccatcagccgctctcaaagcgacgtcctctctggcgacaacggcaatgtccacgacagtagccacagcaggaggaggaacattaacgacgatgcgaaactcagaagaacccagcgcttttgcagtcgcttccggagcgggtagagcggccgatatgaacctgtcgccctatgtaacgggaagtcgaccagaacttcatcgcctagttacttcatatctgtccttttctcccaccggtcaatctcctcaaacggccatggcaggacatgatcatctaagcgaacgagacgatgaatcgttaggcttacctgttttcccaagaatgctctcgaggttcgattcgagtactcggatcaggttcaattcttccacgcggtacgattcaaacccgccgttgccttcgcctggaatgaggacaatgctgtccgccagattcactcaatccggtgggctcatggatgatctactgggcgtcagtggagctaggaggtcaagatcttcgtcggttaggtaagcgtttagcgcattgtactcaagcgtctgggcctcattggtcatcctgattaaatctgatctttctactgcctgctttgggtatatttgtttgtttcttttagtcaaccatctcaaatcatctctggatcttctttggaacacttccgacgccttctcagagaatctatagaaagatctggaatcccaaacggtgcaaagtggcagtccactttagaaagccttcttcttcaagtgtcgacttctgtccaaccaaacatcaaggctggagacgatattgacgtccggacatacgtaaagatcaaacgtgttccaggcggacggatttctgaatcagaatatgttgacggagtcgtcattaccaagaacgtcgctcacaaaaagatgcccaggatatataaaaatccgaggatcatgattcttacattaccgctcgagtaccatcgggttgaaggtcagtatatggcactcggcccggtagtcgctcaagagaaggattacctgcggaatttggtccagcgaatcgcggccaaacgacctcatatcatcctcgccggcaacgcggtgtctagattggctctggaggggctactcgaggcaaacattgcggtagctagatcaatcaagccttcggcgttgaacgcgatcaccagaagcactcaagcggaagatatatcctcaatggatagattggcagttgaaccaaagttggggagatgcacagttctgagggttcagacttttgatcacgaattgatccccggtaggaggaagaccttgatgaggttcgaaggttgtcataaggagtttggatgcacgttggtcttgcggggtggagacatggatacgttgaagaaggtcaaggaaatcacggactttatggtctacgcaatatatcagtcagtttcgcttttgtgtccagctggtttttcatcccgagtcgtctacttcttgatctggtcattctcaatactctcctctatctgtgttcatttcgtagcctgagactagaaatgttcctctggcacgatcaattcgggattcccccgcccccatcacctacgattgtcgttccagagatgcctatgttcgacgccggagaagttcaaacacatgagtcgagtgtctcgacacctactctcagtcatcccttgcctcccacgtcgtctcgacgagttcaacaggaagaacaagttctttcgagacggatctacgactcccttgttccctatcacgaagtgagcttgtcgatctcgactagtgttcggttcccgcctccgttcccgattctcaagatgagcaagctcgacctcagtcttcatctacttcgtcatgctcgggatgaagaggaagcattgcagattctgaaagatgaacaagaggtgttagttgaaaagaggggattgggtctttcggattcggaacctgggtctttctctgaaagatcatcgatatcagaaaagttaggtaataatagcgatctgaacatctcaaatggaccaagcttgccagcgagtgctcctgctacaccggctccagagcttgcttctgtgcccagtgtcatgcaggagaaacctttacttcgatccgctcgcaatcctggcagctccaccgttccatcgcttgaaagtatccttcatgctcccgaaagcgtcttacgaaacagcgcgctcgcccaggttcagcatgaacacgaggcccagcgccgaatttgggaatggtacagtggaaagttcaagcattcgttgcgtcctcaaaccaatcaaggactctattatttgacggctaccggttgtggtgaacatggagtaagttttcgcgatatctggttgtctctaaatcaacgcttcaaatgttgaatcaggaacttctctcatgtcgtgtttctctttttagcattgtgttgctcctcatttagacaaggtagtttactatcagcaaaactataatcccggtgatgttactcttggtcagtggcttaacaagaaggcggacacggcgctcgacccatgtccggacaagaactgcaatcgtccacttgtcgatcactatgaattactctctcacggagagactcgattacaagttgccatggaacgttcgttgattccagtggaggaaggaaaaattgtttgtgttacttctcaagcttctccgttcaatctcgagtgattttctctttgaatttggttcaatgactgatagcaggtttgcttatcatcatttctagatgacttggacttactgcatgctctgcgagtgtatctatgggaaagcttggctctcagagcattcctggaaactctcctgggggaaattcctcgaaatcaatttctatccagatcctgatcgatctcctctgcctggatgcccacatgactatgttcgaagtcatatccggtactttcttcgccgaaacgtcactattcgtatccacaatgaagctatcgagaactttgagatagtcttacctagcataaagtcatacggacgagcagagacgaatcttttgttgaaaaattcagaggctacctgggtctatgttcaagccggtgttttctgggactcggtcgagcatcgtttgaagacctttgaggtcgacgtggtcgaaccttctaaaatcatggatttgaggctcgcgctagccgaaaaactcgatcaagttcaagctgatcgactggcgttcatctcaaccctgtcgatagctgtttcagaggtttgttcttcttccggtattgtgtagtctttccgtatgttgatcttccttggtcttgtcttggattcatcagtcatcttcaaccgatgttctagcagtaaacccggtcttggtcgatcttcaaggacgggtggtgcaatgggacgagatttttgcagagtgagtttaggcaaatacctgtgactgttgactccatagcaatgtgtttacattccgagttcttatatatcagacttgagaagactttccttccttcagacaaggatcttcgtcgtctgactgagaagcggatccgtcgactatttgccaaccaagagattcttggatcagagcgaggcgcaacatcattgaccggctcgaccgtttccgaagtggacgaacaggatgaacactcgtattccgataaagctttcaacttgaccgactctgcagatggccgaagcgacatgtcttcccctgaccaaagaaatacacctgccatgtccaacctacttcgagaacctatccaagacggaatgaacatcttgactccagaatcatattccagcccggatttaacgtttgagaacggcgatactcctcatcactcaaactccctggtcatgtcaggcatatccgtcgagtcgtattttccatctatggcaacccccatcgctccagaaacatcgtcgttcggattttcgatgactgcagttccttcatcctcccatgatcctaatgacagtgattcgactatatctgccgttcccactagcttgcgcccgctttcacgtttgacggtggacgcgtcttgccgatccaatctcccaaccgatgtcgtttcggcccccaaagtatttgcttcccgaatacctcgaaagatccctcgtaaacctcgtcctccattaaatgttgttgcaggtttggtaaagaaattcgaaccagagagagacactgaggatgaggaggaatccacttcacttgggcgaacctctcctttcatctctcatcgatctgctcgagcctccgatgtatcctcagagagtgaagttgaatcggatttgtatctccggccaaaagttcgtcgagggaagacagacagcagcttagttgtgcgtaggagccagttgtcactgggctcattctccgatggagagctcgatgttagggaagaacaccacacccctcccctcttgatcccagcctcgtcttctcctatcaagagagttcggcaacttgcgtcgaatgattcatctcgtcgaacaagcccatccttatcaacctctcccaagagaattagtttcactcggtcttctacgtcaccaaaaacatctaataaaccacggtggacgagttcatctcccaatatggatgttgggaagataagaaactacttgtcttccgctcctattgctagtggtctacccagttcttttgccaaacgaccaagcgcgtcaggaggaacaggagctcgagtaagcacaatcacaaggcacttcgtaagtctatcatcgtgctttgttacctcttgtcatttagatacaatttctccaaagtcagtgtttcagctactcatcagttctgatggcattcttgttctcttaaaggatcggctctcaagagaggctgagcgggacagacagaagcgattgactctagctcgcggaaagagggcaaggcctgtgaccgtgaccaaagctatcgtcaagtccatggatcttcgagaggcagtcaaagacgagtcagacagtggctcatcagaggcagatgatgaggacgatagtggagatgagtccaaggagacccacaatcgacggagagctcaagaccgagggctgaggaaaccatctccgtcccaagaccgagaccgtctcttggtaccggacttcaacgaacaatcttcggtctctagtcccattgagacactgctatccttggcagaagagggactcaatggatccaacgttcctccttttggccttggtatctcgactccttctttgatgctccaggcctccgaaacaaaagctgtttctcctacactccgagaaaccgctcaacttgatttagctccgtttgacacaatcgcacccgtagcaagtctgcctcctactcctcttcagccgaaagagccgttccctggagcttcatcgactggccctgtggctatatctgaaagcgagcttagttatggaggaggcactgaacgcagtaccttgatgaagacgctgtctggtttgtgggcctttcgtaccggagattttgcgcctctatcatacccaatgcaagttctcttctttccccttatactttatcccccgatgatctcatcatgctgactggagtatctttgatgtcatagaccttctggaacccatctgttcaatgattcccgaattgtcattcgagagtgtgaacctacttctatcattgcgttcactttgaggtaagaagattcaactcaggcatatcttgttgagatagctaacagttatgtcatcctctgcacattcagctcaaagaattatggtgattcattgaggaccaaacaaccatttgtaccagatatgcgatccgaaagatccagcactgtacacagtgacgaaggggctgactggagtttcgttgggcatcacgaggctcgagaatatgaagaagctcttaatgtggctaaagacgttcatcttcaatacggttagtcaaatacctcgaacgtatatccacaaggtgccgtccaaggttgtctgattaacttgtttgtgatctcagatttcgagtcaaacggaacatccatattctgcagagtgttctttattgagcaatttgattctctccgccgacgatgtggattggcttatgaagaagggtttatcgagtctctggctaggtgcatcaactgggagtcaagtggaggaaaatctcgttcgtctttcctcaagaccaaaggtaagttgatttgatttaaaattatatgcgagcgtgtatatctcaaattgtagcttaatacatgtgtttgtcttcagatgaccgattcataatcaaagagatgtctaggcaggaaatggatgactttaccagattcgctcctgcgtacttccgttatatgactggtaggtgatctcatattgattggctgtgtagtcgatgtactatattttgttgatcgttgattcgcttttgtcgggctggccgttactcaagattcgcttgacaatgaggtatgttgcattcggctcttttacgatcataagaatatattactgactgatagagtattcttacggactatgatcataacaaagcgccccactgcgcttgcgaagatctttggtgtatacaaaattggctatagaacgcctactcgtggaaatatgagaatgaatgtgatggttatggagaacctcttcttcgagcgtcggttccaggtggtaagtgaagagtatttttacaagcgtagcctgttgttcattccgttgacaacttcatcttccggacaaaaacagatatatgacttgaaaggaaatacccgtaaccggttcgtcgatccatctgggaagctaggcgaagtgctactagacgccaacttagaaggatgtacgtatcttcataccgagcctgtcagactttccgagcttctcaagctgatgttttgaccttattgatatgtcatctcagccctttggaaacaccctctctatcttcgagactactcgaagaagattatgcggacagcgcttttaaatgactgtatgtagatgctccatgtactatatctttctccggtgtgttgctaattttgtcaggactgtttgaacacctttagccaaattccttgccgtatgtaccgtcagatgatacgggacttttctttgtctatgctgatggcctatctactctcgtacaggatctcaacatcatggactactccctcgttgttggcgtggattacaacagtaggttttgacttgtccgccgagtatgcttctctgtgtatctgatggtaaccacatgttgtatttcttcaatgactagcttccgaactagtcattggcataattgatttcattcgaacgtatacctgggacaagaagcttgagagttgggtcaaggagaatgcattctttcccggtggaaaaagtggaggagagcctagtaagttcttcgtttctctttttcagctcccgttctgactctcaatgccgtgggccgactgttttcgtgtgcttgggaaacaaaaagctattgtgggccctaaacagtacaaaatgcgcttccgggcttctatggacaactactttactctcgtcagtcttttctttttttccgaaacaatcaaacttttgggtagcaccagcaccggatttggttggttgttctgtcatctcattctcttctgggcacatcctttcccatcatgcgttctgtctttctagatccctgatatgtggatggactacgattcgatcgaccccccggcggacacttatgttccatcaggagccgggaacgccaaaggcaaaactgtgatcgaggaatccatggtcgaactttaacaaacagaccaaacaaaacaaaacaaaacaaaacaaaacaaaacaaaatgaacttgaaggacggctaccactatcgttctccttctctcctctttcttgcttttagaggatgtcttctcctttactttcttcgtgctgctcttttttccttcttctctcgtttttttttccttgctggacgggtttttcgtacttttcttctcaactatatttcatctaacgaaagttgtacattacgcttgtacgttttctttcctttccgatcataccgagatgtttgcatggccgtctgctgctctcgattcaatgtatctttcagataaagagttcggtcgtatgcgtgtgagagaaaccgagagaaattccatccatctagttggtctacaatctgagctttccaaaggggagaggaagatagagaagaaaaatagggaaggatacaaagaaatctcttcttaacccaagagatgataggaaacagacagagacgaatgatgagtagagagagcacaatgttgagagaaagatgaaacaatgcattgaggaatacagttaaggatctctctttcttttctttgtatataatatatatatatat

SEQ ID NO: 1933 - DNA, 7150 bp, Xanthophyllomyces dendrorhous
atatatatataatatttgagaccaaggagagaagtaaagatgagggggtaatggagaaagaaaaagaaagaaaagtgaacaggagaagagaacaacacgggaaaccaaggagagtacaacggaacaaagtcggatcgttcatctctttagacatccaaaagaccagcggcctccaagagaaggacgattccgtggacgacctcgggcacactctggactgcaaggtcgacacggaggtcggcatcggtaggctcctcgtagggatcgtcgattccggtgaaccccttgatctcaccggccctggctcgggcgtagacacctcttcggtcggtcttctcacagtgagcgagaggggtggcgacgtgaacgaggaagaacgttccaccggaagctccaccggtcgactcgacgatctctcgagcggcctttcgggaacgagcgtaaggcgcggtcggcgaagcgatcacggccgcaccggctcgactcaactcggcggcgacgaaggagattcgctgcaagttcttgtgcctatcctcagcagagaatccgagctcggcagacagttccgacctgacggtatctcccaaaagaagggagacacttcggccaccggtctggttcatcactacctggagagccttggcgatcgtgtccttgccagagttgtgaagaccggtgaggaggatggtgaaaccctgcttgtttcgaggggggtaagactctcggaagaccttgacgacctctgggtaactgaaccaggaagggatgtgtcctccggtcttgagtcgtcttcggagctcggttccagagatatcggccgtgggggttccctcggggacttggtccctgggcatgtactcgtcggtatcaggaaggtaagacatctgctggaagggaaccatctcgatatgaagctcgtccttgtacttgatgacgagctcctgggcgtcgtaaggtccgtaaaagtccttgccggcagagttctttcctggtccggcgtgatctcgaccgacgataaagtgggtggctccgaagttctttcggatgatggcgtgccagacggcctccctgggtccggccattcgcatagccaggggaagaagcgcgaggtgggccattccgttggggctgggggaggagcgaggcgaggacgagacggccatcagtgtctagcttgaggaagcatttgtcgatctacagaacaaacgaaaagcacgtactacttagccatcaaagcagagtaagctcggactcgagtgtggtgatcgacatctccctgtttttttgtgtcgtgcgcacaagtcagccaaggcggacatgaaaaggaaggacgacaatagaagcagactaacgggcttggtgagtccgacgacagggtggatgagcacgttggtctgtcgctctcgagcggctcggacggtaagctctcggtgagctcggtgcatcgggtttcgagtctaacattcggatcacacgtcgaaaaagacaataagcgtctcgtactggtcgcgcaatgaccgaggaaacacagtcgtcggacttacctggaaggcgacaacctttcgccaagccaacttggtgaagtgggccctcaactcggaaggagtgaatcgaagcgcaacgtagtcgaggtgaagcgcgggctggacggcctgaatctttccaccgacgtagagctccttggtcttctctcgaagatatcggacggcagggtgagcaatgtcgtctgctccgtagaccttttcggactcgagcgacttgtcgtaagagtagatgtcatcgatggtgagaatggcaagcacgttatcgtctcggggatctcgaaggttgattcgacctccgggtgcgagggacagtcggtcgacgtccgcttgggagacgtcaagcgtgatgggcatggggaagagggcgccggtggtcaatcggagagagtctcggacgctcttgtagtccttctcgttcatgaaaccctcgagaggagagaatcctccgttcatgatgagctcgagatcacaaagatgtcgctatggtgtgtatgtgcgtattcgtatcaagagaaggattgagagagagagaagaaaaaaaaaagccaagagtaagctggtgaggatggcgcaacatcaaaaaaaaagaaaaagactgaacgaacctcagtcaaggtaagatccttgaggccgagggcctcctccttgagctgctttcgcaaaggaagatcccgagcgataaggtcctgtaggataagatggaatagaacgaaacagaataccagtcaagcagagacccggtcagtcagatgtcatgctgtttaccacgctctctccgacatgatcagccccagaccagagcgaaagaatgaacacgagagacagagcgatagatgacgttggccgaaatgcaagagcctggcgcgagactgtagtgtgtgttctcctccaaaagaaaacgcaccttaagttctcctccgtgtggtgagtttgccatgattggtagtgagtgtatatgtgagcggaggaatgtgtatgggcgatggaagataggatgttttgaatgaatcccggagaagctcacgagaaaaagaaaaaaaaaatggcgtaaggcgcaataatggtgaagtctgattacgtggattaattccagatagccagacgggtagcctcgcttaggtaagcgggcatagtggcagacagccggcagcacactcccacacgcacatacacacgcatacatacacatagacacacagacaagccaggagcgctttgtggagaaggagagaagaataagaaaaaagagaacagagacgtgtattgaggtgtagagagagaggagggttaagtgaatgtaggtgggtgggtaagcaggcaggcaagctatctttcgtagttcgcctagtaagactacaaaatattctagtcactcggtctgtattcacaatgacactcatccacaacgtccacacgcattcatcctgtctgtattcgatgttaccactcaggtagttcttgctgtaaaccggctctcgctctctagttcaaaggaaaagcgaaacatatatcgggatggaggggattaagacctttgctgtaaggcaaggcatatagtgtacaatgtaaaatgaaagggcctaattctacaccaaaagagaggaccagccaagaggaaggaagaagctgcagaaggtcaaagagatgtctaaacctcctgggaagcggcggccttcttgggctttccagacttggcagggagcaactcgggctggatggaaggaagcacaccaccctgggagatggtaacgtgtccgagaagcttgttaagctcctcatcgtttcggatggcgagctgcaagtgtcgggggatgattctggacttcttgttgtctcgggcggcgttaccagccaactcgaggatctcggcagagaggtactcaagcacggcggcaaggtacacgggggcaccggctccgactcgctgagcgtagttacccttcttgaggtctaaagatggtgatcaatcgttgaggaaacaagatgagcttttggtacgaccagagatggaagattccagtgcaaaaagaaagaaagaaagatgaacgcacgtcggtggattcgaccaacagggaactgaagtccggccttggcagatcgggaaagggtcttcttatcggtctcgactcctccggcctttcctccagactttcctccagcagattttccagacctaagtaggacaagtagaagatgtcatctttagaatcacggtcaaacaagatagcggtcatagagacacaacatacattttgattaaaaggtgattgagggggttgttttgagggtgagcgtgagtgcgtgtgtgtgagtagatgaagggagcgaacgactgatgaaggaagagaaacaggatgtctcgaaatggaacaagttggtgttatatacttggaaaagaaacgcgtcaaaggagataccgcgagaagacaaggcgaaaggccacgtcgccaaattgaatatccagacgcgtcgaagtcgcgtgtgaaacgcgttaaatgtgtcgcgtggcattttgacgcgtcgacgacaggcagaatatggcgggacgaaatgacgtcgcgtccacacgcgtctacgtgttttatatccgacgcgcgacgtcgccctgatcttcccttccgtccgctcgacgcgtcgaccgcgtggcatcttcccttgacgcgtcattctcgccgctttataagagactctgtccgttccaacagtattgcctctttctccactctcctccattcatccatcacacttcaccactctcactcactctctctctcacccatcaaaccaacacctttttaattgacaataatggccggacccgcttctaccgcttccaaagctcgtaagtgtcgcttttgctagtgtattccgtagagacgaccagtcttaacacctcatcttggatctctcagccgcttccaaggctcctgcctctaaggcccctgcctctaaggcccctgcctccaaggctcctgcttccaaggctcccgccaagaagtctaccacttccaaggctcccaaggccgacggtgacaagaagaagaagaacaagaaggtatgtcgagttaaagtcctcgtgaccgttgtgttcgctcgttgaccctttctctttctcaaactgttcacagagaatcgagacctactcgtcttacatttacaaggtcctcaagcaggtccaccccgacactggtatctccaacaaggccatgtctatccttaactctttcgtcaacgatatcttcgagcgagtcgccggcgaggccagcaagttggcttcgtacaacaagaagtccacgatttcttctcgagagatccagaccgccgtccgattgatcctacccggagagctttccaagcacgctatctcggagggtaccaagtcagttaccaagttctcttcctccaagtagagcaacacccttctgccatgaccataccgctggtttcgggggtttccgctcttaccttcttctcgggactggagtcttttctcttgtcctaccctttttgtctaatttgttgtttgatacacacccttcggttttgacttttacctcttgctttctatcgaatgtatgattatgtactttttctctgactcttttataataatgagagttatatagtggcgtggtttgaacgaagaaagatctgtctcggcggggatgagcgacgatattccgtaagataagggatttcacatcatccggcttgttcatgatcgtctctacatcctttttccatcagctccgtccattctaccgacatccacaccagcacaaccaattattttcaacagagaagatcatgaccaagaccgtgctcacttcctcccatgttctcttcccagattcggatctccagccaggaacgatagagttctctgcccagactcaacagatcctcgcgatctataaaggtgaaaagaggactcgggcacagtatgaagctgaagaggagactatcgaatggttagatgtaggcgatttactggtgttgccaggtctggtcgagtgagtctggtcgaaaagttctgtctcttggtgtggaaagagaggaatgcgtgatggctgattgaaacaaaaacggttcccagctgccacgttcatctgaacgaaccaggttcgcactttcttcgttcaaacatctactcaattgatggaggtagtcctgacgaatttcttcctccggtttcatcttgacgtgcttaggacgaaccgactgggaaggcttctctaccggaaccagggcggccttgtccggaggagtgaccactgtaatcgacgtatgctccgattatctttcgtagacctctagtcttcttgtattttcaaggatactgaacgagttctctttatattccattcaatctcggtgatggatggatgcgttgattgggacgagatgtagatgccgttaaactctataccgcctacgaccactttggacggtttaggtgcgcgtgatttatcatgatgtcgtctagagttgtctaatattcaaatcgagttcatttggacaatgcttcttttcccttcttctagctgccaagaagaatgccacagggaaccagctttcaacggatgtcggattctggggaggcgtcatacctggtaaccaggtttgtctttgttcttgtggccttcactaatagaccccattcctgatcaactgatcaatctcacatctggtaggatgacctggtccctctgatcaaagctggtgtcaaagggttcaagtgctttttgatcgagagtggagtggaagaatttccctgtgtggatgagaacgatctgaggaaggcgatgaccaaactatcggtcagtttaattctggccatttctttctttttttttccctgacaatccctcctcttgcgagttgacttgggacaaacacttgctgacttttccccccaaaataatacagggtcatggtgttcctctcctgtttcatgccgaactggataccctcgttcaaacgagcgcgccttcatcgtcttgcgcatcttccacgaccgacccgacactttactctacattccttgaatcccgaccggattcgtttgaaacaaccgctatcgacttgatcatctcactcgctaaagagttcccagaagtaccggtccatatcgtccacctgagtagtgccaaagcgttgccatccatcaggaaggccaaagccgaaggagtggacttgacggtagagacatgttaccactatctttggtaggtctgacatctcctctcgcgttctttcagacgcagtatttgacaggtggtttgtttccctccctgcgctgtctttcttctttccaagcctggaagcagagacaatcccagctcgtcagacccagttcaaatgctgcccgcctattcgtggagcgcaaaaccgagcttctctttgggatgccttgttggacgggacgatcgactatgtcgtttccgatcattctccctgcgtgaaagaactcaagaacttgtgttccggagatttcatgactgcttggggaggaatcggaagtcttggcttgggagtcagtcttctgtggaccgagggagcgagcaaagggttcggaatcagagagatcgtgaagtggacgtcgg

SEQ ID NO: 1934 - DNA, 3795 bp, Xanthophyllomyces dendrorhous
aggctgattttgccagtaagtctctttttgattttttctgttttgtttggttcggttcctctttgctctctcctccctcgctcgcgatgttgaccaggacgcggatctttttataacagtttttgaccctgaagcagttcaacatatcgaatccgtaagcttcttataacccctctaacctatttcattcagttcgatatgtgcgtgacactcactcctcactcttctatctgcttttcaggagtcgttgattttcaaaaacaaattgaccccgttcactggtcaagaccttcgaggtcgaattgtgtatgtgttttctcttctgcctctctgcttcgctcttgactcgatttttgttcccgaaattcatattgaatgtgcgctacttttgaatttaggaaaacgatccttcgaggcaaagttgtgtacgataccgaacaaggagggtttgtaggcgagccttttggtcagatgttgttgtaagaacaaaccaccaccgaggggcttctgcgggtatcggtaggacagacaggatagatcagaatgggcacttgtaagggaaatacaagggaattttctttttcttggctttgtctttgttattttcggtcgagtacaaaggttgtatagaatgaaacccgtttcacgatgaatcgtgagtacccttgtctttgagctcggaacattgtgtagttcgttttaaaaaaaagcgcaaatttccctctcccaaagacgggtgatcgtttctacaatggcacttggtagatgtatcattcgaaggcgtttgatctgtcattaatagagtattatgttgtgtctctcgtggtttacacctggagagattttcttcgaccccttgggtcgatgatcgagtagcaaacgagaatgtgcaggaagcaaacaaaaccaggagagagtactatatctttttatcgccctcttccggcccaggtatcaactccggcttttcctcgatctcacccagcaacccatagtctgcagaagacgccggcgctggtagatccatcgagagtttcccacttctcttcaaccaatcgatctccctttctccaggtctcggtccgtccgccttgagcctctttgccaaagtagaggcaggagctcggcgttctcttatatcttcatacttgatgttttcgtaagacggtctcgagggatcgttcacgtagttgaattccgtcgggacctctccgtattctccgtccagatctgaatcagagtaaggctcggaaggaccttcaaggtaggcggtgtgtgatcgacggggatgacgaaggtagaacccgggttctggttcaggaataggtttaggaggtcgatcgaacgagcctgccggtctttgcttcatgatctgtttgacaaaaggcaagcccagttcgatttagcttgttgcgcagggccttggaaatataggaataaatttagaaattgaaatataggtgtgctgacttcgacactgatagggatctgatggttcgttcagcaagattgatagattagctagctacaacaatatcggaaacgcatgagttagatgaaacgaacctcgtcaatctccatttgatccaacatagagaccctgttgatatctctctccttcatgagcgacacccagccgtaccctctactgacgtacctcccgtccgtcctcggatagaccatcagccgaacgtccttgactgggactcctttggcttctatctcttctttcaggcgctcattcgtcacatgagagggaacatatcgaacctattctccagagcaaggaaccagaagcgtgagcgagttcagagagaaagagagagagagagagagagagagagagaggggctaataatgtgaagagacatacgaatatgtggtcttttgagaacttttccagtttcgtttttttcttcttcttctttttcttttcagctggtggtgcgtacggatctctttgggttacctaaagcagaacgcgtcgtgttattccatatcaacttctgagagtgtgttgaagctgcacatcttctaaggacctaccaatgcatttgttgtagcagcactcttttcctttgagctgacacccagcaagccgagcctgcggagttcttctgacctaatgagctttttctcggacttgttcaacttgggagccggtgcttcgtactgatccatttcatcgtaatctccatcaaattgttcgtcggcgtacacggtggtagtggtggctgcaggagaggctttcaggccagaagagctgggtagagctctgggaaatcggaccaaaggcgtaaacgagagaagacgagaatgagaggcagtcaaactgactgctctgcgcatgctcatgggccgtatgaagaaagtcatctggaacgaatcaaggcaggctatggatgttcgagtttcactctgcagcctggctatgatttggacgacggtcgaccgtccgaacgatagagtggtttcaaggctgtgccccatgaggcgctgcactgcttttcaacacgtgactccggggaaccgcgcgtgttcccaccaagtgacgtaccttcatgacgtaagcaatcccatccgagttgacgtttcgtcgtccgtcgaaagttcttacttgacaacattttttcttcctcgttcttggctctcgttcatccggatatcaccatctagaatctccttagcgcacactgacaccctagttctcacaccctgctctctctcttatcaccatgcctgtcatttggggtctcgacttgaaggaaatccatccgcggaagttcaaacagttcgtttttcattgttccggtctctctcgcttccgtctgttttgatagcttcttcatatgccatgtagtgaacgaaggctcaacgctctaacaaattcgtgacttatcgctcctcatgcatcactgcattacaatcgttcacttcgaaaacagttcctacatgtttgctaagacgtaccaccttcaaaggatcaaattcatcatctaccaggcggccatgatcctctgtgttgtcggagagtacgtccgccctctgacgagtgaaatgtgccccgcattggaatttttggcgcaactaacacgaacgattttcctcccggctttttatgggtcactagatcattaatcacctcgtccattgatggttcgtcttattttcatcgcgagttgtcaacatgcatcagctcactgtgcgtgtcgattctatatacagattacatcaagcaggaacgcgccgttcgaggaatcgacaagcaaattcagtatcataacaacgacatcgttggtatcggttcatacacaatcttttgcggagtggccgttgctaccgtgtttggagcaggtgagaccggtcatcaatgcattctttcgtcatgtccggtcatggaagaaacttcacgtgaacatgcctaatcccgacaaacttcttattaacttcctcgctggtcatctcagggttcttctttgatctcttctggccggagcggcacgagtccaagcttgtcaagcttgcttggaggtactctgctgtgtttgtgactgtggcattgctggccgattgccttgcgcaaaccgttggttcctgttcctatctctctttcctttctcaaccaaggacacaatttgacgtctgattctcttgtcctttttccccgtataggttatcgtcgctcggggatccgtccatgtaactggagtggacgaggctaccaagcaactcgctctcgccgcctaccctacccctcctctccgttcgtccctattctctctctctctctctctc

SEQ ID NO: 1935 - DNA, 45387 bp, Xanthophyllomyces dendrorhous
tctctctctctctctctggcacaattcaattgcaaaatcctaaccatcattgccttctatcatcgttatcttagggttccgagactacggtcgaagtgtcgcgtcttgcgtgtttctttgggtcggctgggtgtttacagtatactccaccatccttctttggcaatcttacgcttacaacgctcgatggggaagtccgaaagccaggcacgtcagagaagctgagaagggattttcacctggcgaggatggggcgcatgatctttcgatccctaccgagtcatccagcaccggtgctttgagagccgaagaggctgtttgaggatgaagacgctttcttcctgtagaccatgttcaaaatgcttcctctcattgtttgtctcgctcacacttcccacaatcgttcttcgtcggacttttgtcttgtcatattctccgttacgctttcccatgaactaatcctcctagatttaatttatactgttctacggttttagatatccttatcaacctcattagatattcctcttttgtcttatactaccttctctttacctcgctttatttctaacttctacatactgatttctttattgaaaatacctgttaccatagtacttgttcttggagccaagaatgatagttacactcagtcagaaaaagaatcgatgcctttcgcaacatgtctcgacgccagtttcgaaaaattattccatatcagaatatcagaagaaaacaacccggctgatcagccatttcattccgtcattcgttgagctttcaggaatttcagtgtgaactttcggacgaccccgattgattcctcgatatgttctgttttcttattatagatatgtgtgttgagtgatccgatgagcgctagatcactatcacgatttggatttggtgatcggtggtgaatatcaagagcgagaacaaacggaaggatgctcagtacattcgagaccaacttgccgatacagtcaaatgaaagtgtgaagagagggacaaacggagtgatctcccaatacccgtatgtgattcctgatgaaagcgtcaagatctgagacggatagtcctcataatcttcattcccctctccgtcttcgtcctcatcttcgtcttcttcctcgtcgtcgacctcttcgacttctccgtctatcctttcttcggattcgggtcctccctcggattcagaatcagattcagtctcgtatccatctatagcatcgaaaaagtttccagttcggtcggacgcgtctcgaaacaaagcctcgctcttctcgtcgattgtcttctgtcctacaggaacgacagatctgtattgttctcgaacacgggacaaatcagatgtagcgatcagtcagaggaggaacgttgagatcgagacgcatgccaagatgtctagcaagacggacgtgtaaagttcctcgtaggcgatgattcgagtgacccagtccacgcaagtcgtgtagaccgcgttttggacgggcgctccatcggtcgcaacatacaactttgtctttttatcgatcaagaacgatttatccatttgggctgtctaacgttgttgttgtgtacatttccaatttccccatgatatgattgaaacaagtcttgttcagtcagaatggtaccggaaggcgcaccacacgaatcaaagatatactgaccacgacccaactgttcatcatacccgataagaactgcgcgaccataagactttgcctgatgacttgtgagaacgcataagcgagtcttctatcgtagattgaagtgagaaagaatgagacttctggaatggcgtcgatttcctcgttcgaaaagtccgtcatgtcgtcttgaacgtaatcctgaatttctcggaacgtctctgaattgacaaagataacagcaggcaaacccgagagtacaacatgagggtagaaggcaaaagaaagaagcgaaagagaaagagaaaggcagagacgaaccggtgagtgtatctttgccggtgattccgtcggctttattaatgaacaagtagagttgcatatccgggttacatctatgggctgccaggaaagtcatcgctatactttgaatttgttcagtgtacccctggtaagaatcaacgagtcgtccataaacgcaaaggatgttagccagtgaagatattcattggatggaaatcattttggatggactatcatcatagatagaggggcacgaaccgaaatcatatctacgaaatagatcaataccgagaatttcttcaggttgtctccgaagttctcggccgtgatggatcctggagtatcccaaatctgatatggtgcgaatatgctgttggaaagaatttatacaaaagattaccatccagagaatttagaatcgttccaagatagtacggatcagttcaaagactctatcgttctagaaaacgaacagctgtgcgggagaccgaaacaagagatcggcattcagatccccctctagaactgacgtacttgacattttcaatcttgatatcatgagtgggtgagaccgaaggaatcgtttgcctagcctccatgccatggaacagaacctccatcgcactcgtttttcctgatctttagacatgtagaagacgcgtcgaattcaataaaacagacctatatcatacgaacgaattcgaagagaaagaggtagagatcagaaggataaaaggtcatggaaacacgtaccttctggctcccatcaagaggattttctgcgataaaggatcctcatcgtctggaacgggaatccattcggagctgtccgccatgagatacgagacgagaaagaaagaaagcggtttggtagctctttgagattgttagtcgacaacggtactggaacgatggtctgcaagatcgatgaggctgttgagtctgatgccagggagttggtttgaggcgagggagggtcgtgaacaagatggtcgttagtcgggtatatattcaaataaccagaatttggatggtgttctcttgatcattatatccattcatttttccttcctcggctaaaccctgtgcgcgcctgttcgtgctatctcttgaaacagagaccacatcctatgtacaccactatgtttgttatactgatctctcaacaagcttgggcctgccggtgctgctttcgaatcgattcacagtcacactatgacgatcgtttaggactagctcagagggtattctggcaaaacgtttcaccatattttctactcgctgttcttatcattcggcattgccatattctcgatgctttcttgtgtggaaggcttgttcgtggaatgataactcagcgctagacaggcaaatgattgattaaataggattaagaatccttctggcgtttctttcttcgattcttcgccttttgctccttcttctcctcctctcccgcccagctatccttccaagcctcggacattcgtctcaaaacacttctcagcctactcttcccttgctcatttaacagtcccatcagcttttcttcaaattccttcaacgcaatctcgtcaatctcagatcctgtgctcttggttttgccatcaacgatcgaccgtgcgaccagcaaactcttgctcatcatctccaacaccttatcctcctgaacaaacggcaaagccttgtgactaggccattgtggtctggaagatatcgaggaagggacgagcgaggcaagatggacgacagcgatcttgagagatcccgtacggaggagacactcaaggtaagattgggtgtggctgtcggtgagtggttgtcgagcataaagttgggttgtccaaattttggttgctcgttcaggtgctccactgtatccacaggcatctaaagcctaggttaaggcaagaacaagaaagacagtcaggttgcaaggattatacgatgagcctgaatacgaggacacaagacacatacaactgataaagcaagatcatctcttgatctccggccggatacgaatactctatcatacacctcaagcgcacctgtataatctccgcaccaactgagtgcattgatcatcaagcctgcccacgtgctatcctccatcttatccttcttctctggcttttccacagctatctggcggtgatctttatctctcacatcagtcttgtcgatggatagatcgacgttgatcgcaaattggttgagttgccggacgtattccaatgttcgttctcgatggtcgaccggacaggttcctaagttggaaaccagattgatcatctcttgaacgtacgcatttagaagtacccgaatagcttctttcgctttcattgatgttaccaaactcggtgaccctgtttcactccaaaagctcaacagtggcccaggcggacctatcggggtggtctttatagttttgtcgagtatgatatttgcgctcacgatcagtgacgtcaaaggtcgtggccgaaggggtgatagtcgattgaaacaccaggcgatctctgatgtgtcagaaacggatggggcgttcatcataagtgaattgggcagatgggtcaggaaggattcctccagaaggctcgacactcgtggttgtttgctcagccggtcaaatatggatcgaatgtgatgcatgtatgacagatcggggagagcaggtgtctgtgcgagtagtcgaaggacgagaatgaggatctggacgatctgagtcgaataagcggacagtgattggtcgggtcctttgggcagcgctgttcggatctgtccttgaaacttcctgagggccgatcgatccttgttcttttcaggcttcttgtgtttgggctcctgcagtttgccgacattctctgtaagtttgaccactgcgtcccacaccttttgatcgatctcggattctttgattgctagcgccgatttgagaatatggatgatcatttgtcgatgaacgtctacgatatgttcgaattgtaacagacggtagatttctatactgagccaaaagcagtcgctcgatcttgtttggcaggagcgagcatgaagttgctggaagatgagaatccagggaagtagataaccgggtggaattaaggagtcaccggcaggcggtggatctgtttgcagaatcatattgaaggcagacaatggaggaagaggttgtgtagtctgattgatagcagccatcacggtgtccacagcaggttgaaatcttttcgataaattcgaacgagattggccagcgacattgggatttggaaaggcggaccgacgcggtctggtccctttcggtttgggcggtgagggcggtaggctgagaaaagcagccagctcacgtgaactttcttgctgagttctagataaccaacccaagcgtgaataacgacgatgaatgaatgaatgcacgaatgatatgtacaagcaaacggacggacgaacatacagaactgaaggcaagtccctcgagcgactggtcaggcgaagagctcgtcttgatgatgtcgccgcttttcgtataatttggcctgcactcatctgtatattccagtatgatctaagtcagcccgaccttcagcgaacagcacacagaagcgcgtcgtcgtcgttcttgtacagctccaaaagtagatgatgatggttcgttgctgttcaagccgttctctgttcggacgagatgagcatggaggtgcagtgcggggttggttacggctgatagctggttacggttagtcacctgtttagcccgtaaccacttctgcacaagaattttgagccttcctctcaactttcgctttcccactctgcttgaccttaccctcaaccctttcctcccgtttcccatatacatccttacctacagcaacgtacgtgcacgtatagggttgtcttgttgtgtgtgtagaatgcgtagtgctgacagagctcatatcttcttgaatctcacagaatggccaagatcaaaagaagaggagagtccggagcggccaagaactacgtgaccagaaatcaggctgttcgtgctttttcaattctttctactcgttatagatgaggtcgaactcgtaaagcgggtatacgagtgtgtttctgaggacaacctactcacattaatgggcttctttcttgcgtctcgtgaattattcagatcaagaagcttgtacgtacagaccttcgttgatcgtgttctctctgcatcaagcttacactccttccttttccttccgtctggtctcaatcaatctttgtagcaagtttcccttgccgatttccgaaggttatgtattcttaagggaatctgtatgtgtttcttccgttcgacttgtcagtttttcctcatttcatcgctcacatattcttcattccttctttctcagtcccacgagtgccgaaacatgccaaacgagccaacaagggttccaccgcgcccgcctcgttctactaccagaaggatatccaatacctcctccacgagcctgtactcgtcaagcttcgagagcacaagtcgttcgccaagcacctcaagaaggctatcggccgaggtgaatgggctaaggctaaaggactcgaagagagcaggccggtctacaggctcgaccacattctcaaggagcggttagtcccagcatgctcctatgtttttcttctccttttctgttcgacggctttcagctacagcgaatcatggcactggaagtctcaacgagaatcagcaaactgatcatcgtctgccattcactctatccgcctatatcgtctcccgatttgccaccatcagatacccaaccttccctatggctcttcgagaccttcccgatgctctctccttgatttctctcttctctatgctccccgtcaacccaacacccacctcgaccctccctaaggatttgtcttccaactgcgccaggcttatggctgagtggaagctctacatcatgagggagaaggccctccgaaaggtgttcttttccatcaagggagtttactaccaggttgagttacacggcgagaagatcacctggcttgaggcctacggtttcacccagcacgtatgtcctgttttatgctcctggtactaggcgctgatggtggtagactgaggcttacctttcatctatcctcctttcttctgaacaggtccccaccgatgtcgatgtcagaattttgatgactttcctcgagcttcaccagaccttgctcggcttcgttctcttcaagctctacaccgacgccaacttgatctaccctcctcctctcgatcaggaggccgacgaatccggtgccggctttggagctttcaccctcaaggagaacaaggagactgccgcttccgatcagattaagactgaggccgctaaaccgtctgagaaggccgtgaagaaggtctctcgacaagaggtcaagaaaggaatcaagaagatcgaagcctccggaatctctaccatggaggttgacaacgaggaggaacagagcaaaccctctgtctcccaggacgctgaggatgctgaagagttcgtcgagcgagcttcgaaatcaaccgacccggccacaaccgactctgctcctcttcctacactctcttcgttgactgagctatccgctcaacacgcgttggccacccagctcttcaagccctacacgatctacatctctcgagaagttccccgacagactttggagttcatcctccgatcctttggttgtgctcgaatcggatgggacactcaaaccctcggagccggtgccgatttcaccgatcccaatgatccttccatcacccatgtgattgtcgatcgacctacactcgacaacggtgtcttccactggtccgaaggtggaaagaagcaagatccgtcgtccgataagcgaacattcatccagcctcagtgggctgtcgattgctccaaccaaggaaagatccttcccgcaggcgactacgctcccggacaggtcctccctcctcatttgagtccgttctacaacgatcaccagggtggaggtgtcgtcggatttgctgctgattctaggaacgcaggttcggcttctgccggtggtgaaggtttgttggatgaggaagacatggatgaggacgattccgaggacgattccgaggatgaggctgccaaggaggaggctcccaaggcctcgacttcttccgaagctttcaaggcgctctctcttgacccgactaacgaggttctcagacacgaggccgagcttgaagccgaacagcagggtgttcccatggccgctttcgaggctgatctcgtcaaggccacgaaggctgccaagaagtccggtcagaccgtcaagagtggaaagagaaagggtgtggaggaggaagaggaggatttgaggatgatggtcgcttccaacaagacgagaaagttgaaggagaagatggactactcgaataaggagaagagggacgaggtgcgttttgactctattgctctctgtcttcacatctcatgctcaccgattctgcactttttgtcttcatacagattgagaagctcaaagccaagaaactccgaaacgagaaggaagctaagaaggcagcagccgcttcttccaagaaagctaagaagtcaaccaaggcataaacaccatttcgatatccttacccagatctcttgatctcttgacatctatatttttggtctttcttctctattctctatcgctctagtttggttctgtcaactttctgattccattagtgacctctttctctctgggttcgaccttttcctactttttgtctacttgctcttcttctttttcacttctttgtaatacaaaaaaatccaagaggacgaatctttccacccaaccttctctcggaccctttcctcttccgctcgtacacttatcttgccaccctctccctaacgtttccctcttccatcttccgttgccctgatagaaagggtcttttcgtgtctatgatccggtgagaatgtaacttcgtttcacgttccagaagagaaagccattgaagatgatatcatgaagaaagatgccatacataaatagagatataaacataacacaggctaacaggctaacaagatagccattaatccaatgagatattgtatgtgtgagaagtcgaacaagagaagtaattcgatacaagccgtttgtaaggaaactctgccgagggaacgtgctttcaaggtttcacaccacaccacatcgactgaaacagacaatagaacagagaggtcattatttacatgaaaaaggtattatattgatcttgtatatggatgttcgtaaatatagatgtgaattaaaccgatagaaccccctcaatacctccctccgcctctcctgcctcttgctctcgaagcccaaccgccatctcctctctctcgtcctggtcccgcagttggcgctccccaatctctctgtctagaatcgtgacctgagtgtccgccgggcggttgcccgtagcctgagttcatcggcggtggcggaggttgtctatcccatgagttagcagaatatccccgcgacggttgatcccaagtatctctcggcggtgacccgttcgtttgtggaactcttctcgaaccggtgggataggactgaccgttcccgtaaacgggcgatcttttgtcgggttcgtggttccctggtggagggagtggaggatgaggacctgatgcataggatggggtttgtccaccgctagaagtataggaaggggtatggccaccggtagggtagctaggtgtaggcgtacctgtgggtgcgtaagtagagtcagtagctccatattgaactggagcagtagacgatgacggtggcggagatggaggtggaggtggaggtggagggtaataccctggaggaggcatccacggttgatggcccaatgaatgtggcggaggatatgccggggaaggattcggtggaggtgctggttgattggagatagtcggtccaacagacgtcccaatatcaggcatgggtgacttaacaaccccttgtaagctagccaacagattagctatcgaatccgaggtaagcagtggtgcaggttgcaccgtcggaggcggtgctgccactgacgggataggaagtgtaggtggtggcatgggcaaaggcaacgtcggcatcggcatcggcattgggactgggaaaggcgtggctcccggtggaagtgtaggcataggcatcggaattggcatctgcatcgtagcagcaggcgcatcatggaccagagcagcagatgtctccacaggggcgtttgattggatggcagcagagctgtagtcagccactggtgtagtaagtcctggagccatagatggtagtgctgagggaggaggagaaaccactttcttcgtagaagaccgagtggaggctgaattcttttgtcgaatgaatactccaagaagataatccttcgttcgtacttctgggaccttgcacgagtccaacaagatgagaaactcgggcatcggatccttttgccgaagcgagaggatgtaaagatctcttgccgcgaataatggaagcgcagaagtcaacccatatggatttatcaacgcatctcgactgatcaagcaacaaagatgataggatttcgatatgaaacgattagtgacctttctcgaacaagaacaagactttgtctgaagcttgacacatgaaacaattggaaatcaagacgagaaaactcactctctctcgctcaaaaagtccatcaagctagtttctgcctccttgttttctgcttccccttccttggcctcaaacgaaaccacgataacttccttgcttgggcttagatgtgtttgcatcaaatactttctagaactgtccgttttgactcgaccggcgaatgtgatagaagatgaaggtagtaaagttggccagccgtcggatggaacgcaaggtccacccacttgccgggcgacaagcactccggaggagggtgcgtccggattgttaatctgtgattcaaggaagaaaaaacggcgcacacgttatgagtggatgtaagaagatagtctcgctagttagatgagagatgtatcagagaatccgactaacctgcccttcccaagctttctcgatcgagttgagatctgcttcatcgatcgacttcttctcttcatattctagaggtcccgagatggctggtgcctcttggacaccctcaatcttcttagctccgccgtccttcttctcaaggtctttggcctgatcatcgacgaagaagtcaagcaccaagtcgtcgtcgcctgagcctccttcagttctagcgggaagttcatccctgaatggtgaaaggctatccttatcctcgcttcgaacccaatcaacatcatctaccatgaacgcgtccttgtgtggattttgtagatcatcttccgccggaggtggcgtgcgcgatccttctcgtttcttgtctgttgttggaggcttatcgccccagatggaatcaagagagaacttgacaggtgaaggagggacgacagcagatggattgcctttggtgggagaagaggccggagaagatacagagcaagaagaaagtttcctggtggaatcagatggactaccaagatcgttatgtattgcatcctctgtttctaagttagatgagaaagagctgttcctttgtttcttggcacttgacttggtgtgtttgtcttccgaccccttttctaccgtttctcttccatcctctgaggacaggtcttgtagttgttgcccttcattctcaagtttgcgagccaaccctgccgaatggtgatcagcttccgactcccgcttccgtttgtttcgctcagactcttgcaatatctgttctcgctcctcctggcgctggagctcaagcctggaatctgaaacctccatcacgcccttgtgattctgaaccactaaaggttgagatgcagtctcgggtaaaactcgggttcgaagagcggtatcggctgcgtcttgtgtgagtagctgtagagccggatttgcactatagattgtagattcaaacaaagcatcagcaaaggatcatcagatagcttgagagaatggtactcacagatcgttactgctcatcttagagagttcgagaggagagattgttccttcttttatcccagaccgtaacgctttacggtcctccttactcaagttgaatcttaacgacctcatccgatcgctgaaagacacgcatggagtttgcgagtaagtattatgttcattcttacaggaaccctatgtcttgatgattggacaactaaaaggcgaaaatattagatgtgttacttacgtgtactttctgcgtcctgtcacacttcctccatcctccgcgttccaaaccaactcctctaattctcctgcgtacgccgtagctctgtcttcggcaagcaatgctttgagtacagttgctatcgctgtacttcccgcctttctcaacccctcagttgcttccttctccttctcctttgaactcttgacaggagcagcaggtacagcaggttttttggcaacttgaggtgtcgatttgataggcacaacaggagaatgttgacctgccgagttgccgacagatggctttctggcttgggaagaggcaggatcttcgtttctgggtggactgtggtgagcaactgggtttgacgagattgatttggcactcgacttgcgttgttgtcgaggtttggatggggtctgtgagtgaagatgacgattgattagaaaactcacaatctcttccgttacaagccaatgacaaaagcagagaacaaggatgggaaaagatattactcacatcgttcgaggtttgttctgctttcgaaccctttcttctcttcttgcttatttcctcttctgtccattcagtatctcctgccgttcctttccctaagcgagcctgttgctgatgctgtctcaaccgagcgtcgttttcatcgcccgcaggttgatcaaaagcatactcccgagcgtggtccaattctgagtagaacccttgttgagaagcatcaactgaggcctgggatatatgttggctggaagatagaggattggccgggtagaacgatgcatatcctgcatttggggttgagtcggtgtaccactcgggttgtcctcgagagacttgatcacctactgaggagctactgccacctccgaattcatcaggaagaggatacggatcgataatgaacgaaggatcaatggtagagttgatatagttagcatctgggtatgcttgggaggttgaaggaagagaaggatcggcgaatgtatagagagagggatgacctatgggaagagaaaagaagatcgaataaagtcagcatctgatcaggcagacatggagcactgcaagaattaaagtagtgagaaaagtacatgacaaagccagaagagaaagacgaggagcgaaagaagaagagagttggatggttgggtagaaaggaaagaaggagaaacgtaaaggaggaaaacgagaagagcgggttttgccgctcataaatccttcaacttctccgtctgccggtagagaaatccttaaatctacaaagcttatctctggattggatcctctcgaatatatcccactcaaagccttctgtgttgccatcaattcttttctccagagacagagaaaagaaagaggaagatctatgcatatatgcatacatcctaggcttgccgtcgtatggaacgcaagagataaaagaagagcttgtacgtaggaagaagttctcaacggtgaaaagaagtaaaggacaggacaggacaggacaggacaggacagagcccagccggcgtctcgcaagaaaagagaccaacgtagctcagaaatgcattgtgtggcctcaatcaagagttaagaaagaagaaaaaggaggaggtgtagtgatatcgatcgatcatcttccttgacctcggtcctcgtgcgggctcaccctgtcgcaagctcgatcctattcaagaaacgactaggaaactactactcttcttcatctttgttcttcttttcacgcagttacgagcgaagagtatcatagatctcatcaagtggctccagagccggctgatgttgtctccaagtcgaaaacacatcgagagcaaacgaggacgaatcttgctatacaggcatgaagtccagctgatcaagaacaaaaaaaaaacttacgggtagtttgccggccagtagctagttgacagctgccacatatgtagatatctgaagagtgaaagagatcagagaaagaggaaaggtcgagacatggaacattcaagaagagaacaacaggaggtgatagatgatattcaggagcagaagagatatcccgtcaaaagcagaagaggcgagcggatggttgatgttggcacacagggataatctagtttagttttattgctcggttcgatatcggagaacaatgaactaaagagattagatagatacgaacgtatgttttgagcaatcacctcatccagtccaacacagtcccagtgatacctagttaagcgagcacacgatagaaggccgattatccatccatccgttcaagataacgagatttcaacccagtgtagaaacaggaacaagacacaaaacgtagagtgtaggtgacaacggccaaaggacaaaagaaagacgaagctcagatgagtgacagccagacgaaccattctccacatgaatcacacgcgatcatattcctcgatggcgtatcaggctctctacatatacaatacaccggctctggaggtggtggtggagccggctgagacgacctcgtctgacgtctgtttgttgtatcggccatggtccttgctgcaacttcttttctccttacaaaaggattggtaggatgaccgtttgggttgtatacacgcacaggagtggccagaggaggacgtgtctttggttgaacttaattttattacaatcaggctggcatcaggttcaggtcaagactgatgtttgttacgtaatcgattctcttataaagccatgcatatatattattgaattcatccagccctcaaccgacaaacttggaaacagcgttcttgacaagagatctatcaagtaggaaagaaataccagaagtttagcactgtcgctcacaagaatacaaatgatgaatgtctcgtgcgcacctcgcatatgggacatagctcaacgagtaccctgtgagaaccaaactccgttttgatcagccttgaggaatcagatgctggcaaaattgagatgtcaattatgattttgaaagcaaaaactcacaggcgaatgccaagtacgaaatgatcacaaagacgatgcaaagtaccgcgttgccgagaacgaaagcggcaatgaagcacattactagcgacccgaggaatatagccgtggctaccaaacggacaggagcgaacatctttgaggcggacacccagagagcagcggtatagatacgaacggtcagcgccgtcttctttgaacatcggtgaaagcaaagggggcaaagatagacaaaccatcttgaattgcttcaagaatccaaccaggaatccagttccgatcagagagatgatgcatcctacagcatacaagactgtccaaccacaatattgatcagctttgaaacgagcgaaaagggcgtcttctcggattttgaagaacatatcctcacaagcaaatgatatagtcgatccaataaatctatattgagcaatattttgcgacagcaagagttaagcatagagcaaacggtgccgttttctgacaagacatgctatgaacatacagaaggactgcgccaatcaatgacacgacgaaacctaatcctaggcctatccatgcgcggaccgtcaatgaaggttggtcgaagacagtgatcaacagctagcgagacaacgtatggatagagataaggcaactcacaagctccgaagctgattacaagtttttgaatcgtgttgcatcagtctcgacgcgttgccaggtgaggatatcaaacaaggccacaaagaggtaactactcaccccataactgtgcacgttcatagcgggaatggccagtcctttcctagtcagtacttaaatccataacgcaaataaaatgcttttgagacgaacgtctttgcgtctgagagaccaaaaagtagcaatgttcatatctgagtaacaggaacgtagatgacattcgaattgctaaagtcaatataactcacccaagttaagcccataaactcaaaggcactcttttcctaaggcgacaaaaatctcatccaccaacagaaaccaatttgtttagaacaagccagagaaaatcagatgtagcatggtcagtggctgagtacatgatacgatagatatttagagaagtctcagactcctttgagctgagttgggctaagcctagcacctgcaaagagaagatcagaacgaggacgtacaggagttaagttcaggtcgatccctccagtacctccagatcccaaccgacctgtatccaagtttctgaaagatcatatgatgacaagccagatcgtcaacaaatagaagacagtgagtcttgcacacccagtctcttgcataaatcaggaagacgtacagccatcctgacatgcttgtctttgttcgttattgaaacggggtagtgagtagaaggttgaagagctgatcccagatgaaaagattttgccgagaagtacgtatgtattaaacagtaagctgtgtgctatacaagagtgaggcaaggacgaacgtacaactgctgatatctctgttgagtttgttgcacgagaacttgaacatagatggaatcgatctcccagcggatggcaaaacttgatgttagggttaattcctcttatggatgtatttctcagtaatctcttgactcacctcaccatctgattaagtatgatggatggatgtgctaactaaccggatccgatttatctttccatatatattctcgccatcgagctgacatcccttgatatctgtttactcactaacatccataattcgcttcagttcaccaagactaacctgatggcacccacaactcgagcttcttccgtgaaatctctagtccggctcggctctcagctcggcagccctccttcgactccgccacctgctctcaaacggttcaagtcagatagagagctttctactctacggggtccagccaaagccgagctggcagctgtaatttccgagaccaagactgagaatcttgattcatcgtcatcgacggtaaaaccaggcttgaatgaggatcaatctccaacagctccacaaaccattcccgccacattatcgttctctatgcaagatgcgaaaagacatctcgttggaagtgatccaagatttagaatcatgtttgagaagtttccttttgaagactttgagaaaccgcgcgaagagaactgttataaagccctgattgggatcttgtaagtttgcttccaggtgttaggcctggccctcggggagaacaaagtgaaattgacaagctctttgtcggatgtacaaaaggatgggccagcaactcgcaatctcggcggcagcgagtatcgcttataaattgtgggtttctttcggagctgatgtatattgactttggacttaacaagaaagcttatcgatcggtgtctctatcgtatatatcataaccaaatcagtacccgactcttttttcctgagcagcttccggaaaaacgtcagattagcctggaaaggtgcgagctgatgcctcacttctcctcataagatcttcacatgctcccatatttatcagcctattctttaacgaccgactaacggactaatacagtactacaagatactttccgactcctaatcaggtcctcgctctccctgagcctcagatagaaactttgaaatcggttgggttatccggaagaaaagccgagtacatattgggtatatctgagaaatttgttagtggagagttgagccaagatgtgttgttaaaagcatcggacgagcagctcaacaagacattgatatctatccgaggagttggtccggtgagcacgcttcctttgttccccgtcagctgtcaggcacttgatggatgttaatcttctttctggtaacctatagtggacggtggatatgttcagtctctttatccttcgacggccaaatgtccttccatggtaagcttagagttactctactgcatgatctttctcttgactcagagggtttgatatcgatatggacctcctctctcttcgactgtaacagcggtgatttagctgttcagaaaggccttctcaagtgggtcatcaatggacagatcaacccaaatggtccgatcaattttaagcagaccgtatcgcctctgcctctaggctccacgtcacaagagcctggcacatctgatctcgctgctgccgttgcccctcctacgccctctacacctgctggggctaaacagtcatctctcgcgttcgaaactccgggctcaccatcaccggcggtcaagaaccaaccgataacgtacccgctgacgcctgctcccgaactgccgggcacgctgacgatagagttactcaagagccgattggcaggcaagaagaaagccggagcttatctaacgccggaagagatggatctgctgacggaaagctggaagccttaccggtcgatcggaagctggatgatgtggcagtatctgaaagtagaataagagagatgtgcagactggaagagatgttacgttgtattctgattaacaccttggatgatatcatttgtttgatcgtgacgcgcagttaatttcaggggttaacgaaaaaaaggggcaaacggagaaacgtttcatgttctttcattcttttacttcttccctttgtgattttcgtttcaacttcattttcatttcactctcgaactcatcggacaacatgacgaggagagaggaaagaagatctcctggataggaaggcttttttgaatgtgtcttgccttctggtctgtgactctacagcagacaaaagaacgagacgagaaatgcacacttgcactactaacatcatcttctacctatccctttctgttccctcttttgttttcttccttctttcagacaatggatacccaggtcgtcattcccctttcatatcctcaaatcgtgtctttacaggatctcctttcctcgctctctcttctctcttctctcttccctcgtctgaaatactccaatctactttctactcacttcactgaccataccactgctcatccacttatcatcctgatcagttcagttcagttcagttgattcaagagggttgaccaaacatgcctgcaattctactctcagcatatcaaccttttcccgttctttcaccaagatacagtaaagcctcaagacgaggcctccagagcggctcaaccgaagcttgtgcgtcgacatgtatggcaaactcatctgaagagacgtgtaaatcttcggattcgtcctgcctttgtgcgtcctcagcctggcagaactcgatcgtggtgtgtgtctttgtttgaagttgatgggcaagtcgagtggcagtagatagcacaagattctgtcgattctctcgttcactgaataagcctgcctctgaactgaattcatcattggttggtttaggtctgtcttcaacaacaatgccaggcccaacagaatctggataccgcatacgatcagtttgtaacgttctgcacccaatcggtacgtgtatattttaattttcgtgaatcaaactgtggaccaatcgcttacagaaggctaccaaaacgtactactcgatcccacttgtcgatagtataaaacgttcacgttggcagaaccatcttttacgagaacaactgctaccccttcggctacgagcacttcatcagggacctccagtcagcccatggtcatcaacgtgagcgctatcgtgagtcgtgattccttcagagtttttcctacactctgggcatcggcctgatacagctcgttctgttgcatcatgattctttgttgtgacatttgtctcacgaagatggccgcagtgtgcagcctgttcttgttgataggtttcatctttggcgtgattggagtgagagacaagctgaagcatcagaaacagatgctcaagagtggtagtttgcggtccagaggttcgtctctcctttaccatatccttggggtttcgaaaagaatagaagatgaatgtatgaatcactcctctatttgctctccatatgtgatggccatgacatgtgggcgatgcagagaacggcagaagagtcgaactagaagataacgcgaaatccaaggtacagatggctcaaatgctttctggagtgggttcgaggaatgatatggtgtctgttcaactagacgaagatacggaggaacgcctggagcgccgtatgtatcctttcctttcaacccctcccccttctctctttgagattcatcattctcatcccttctccttttcttttgtatggaattttgacccaaagttcgtctggctcgaacggaacgtgctgaaaatgctcgtgtgattagagtcgaggatatggatagacgagcgagtggatcatctagcgcagaatcagtcacgatcccgtccgacttctctcctacctcatctttctcgtcttaccatcctgatcctcgaaagagcagatctataagttctttaaggtattcatcaggctacatggagtatccagactgcactcgggatctttgttttgataacaagtataacaatcacaatcgcgaccaagaggaagaggaagacgcagtcgaaggattaaaccaacacgtctggatgccctcagccaatccatcaagcgatccccggccgttcttcagctcgggaggggttacgcttatgcgcagtgaagtctttcctgatgctcgagagaccgaatcaagtgatacgatcgagggagacatctcagaatttttgtatgatgatgaggctgacgatgagaggttgacgtggggtgggagtttgccagccggtaaaaggaatagcctatggcgatcggcattttagtttttcctactattctgctttacctttctgcttctcctcctgtcttgctgcttcccggctgtttgttcttcttcctttggacaatctatgttccaagctttgtctttatgatgtcttgtcgcatctgtactctagacttctatctagctccaaaccctttcttcttcttctctagacgagacgattttgatgtcttcggagaatacaagataggcgtcacaggaaaaacatatgcatcctttttgaattttttcctttccaagtaaaaaaaagggggatcaaacaagaaataacgataaagagattacgaagagtagtgacttcgaaaagatgtgggaatctgattgactggtcaatcgtcctactcagcggcctggtcgacggattctgtaggatgagcaggttcaacatcttggtttccgattcgtttgctcgcaaattcggactgcaattaggaaagagagcgagaaaagaacgttttttttttcggaggtgagaaactcagagtgctttcgagaacaacgatgaaatgtgttgacagaaacaagaatgcatgatctcacctcgtccagagcagcacagatgatctgtctaccaccgaattgccttccggcgatcgcagccacaccagccctggcgccctctaacgtcttgaacaagacataaaccctaccgacaccggcttcctcgtctctctttgcggcctcgatctctgcagactctgccttgtcggtcgaacctgcgtattttttctctttctttgtcggtctgggaattcgaagttcctccacctctccatacttggaacactcctcggtgatatcttccaggatatcaacgtattcttcatcgttcaagagttcttcgggagtaaccatgttgagcatgacgattgctctagagctgattggctcgttgttttgggcggtagcaaaagcggggagggggaggttcatcgggtttgtcgagccgggccctcggggaccacctagaggagcgttgttacctccactgccgaacgagccgttcggtccgttggaagcacctttaccgacggaagctcgttggacgacgaggtatcgatcgccaagctccatgttgttcaatccttggatggctacctcggtcaattcgggatcgacatactcgcagaaagcaaagccctatggaagcaagaacaagggcgatcaggcgccatcgacaaacactgaaagaaagcactgaaacatttaaagagagagaaggaaagagaaactggagaaagaaacccagaaactagcaggaaaagataacctaccttggatcgatcggggtctccgttctccttcaccaagttgaacgccttcaagtctccgaaactcttgaggagctccatgacctgttcgtcgttcaggtaactaggcaaaccaccgatgaaaatcttgttgggcgaatccggtacgttggaagagacgaccccagggatataaggcgcgccttgttcggaaccttcctcgggcacgtaatccttgggtcgacggatcttgagaagagtattggcgaacacaatgttatcaaacaccatggctgaagtggcctcctgaggtgttcggaactggagaaggcaaaaagaggaagagagaaagggagtgtatgtggttgtgaagcacacatcagacaccatcatgatgtgatcaagaagcacgagaaaagaaaactaacctcgacgaaagcgtagctcttgtcatggttgatcgagacaccaaccaccggctcaccctcatcgttctttgcaaatccaatttcgtgcatcttttcgttgaagagagcgcccaaattttgctcgttacagtcgtaagtgacgtttccgacgtacaacctcttcctctgtctagccatgttgagagacgaggcggacggaccacccgacacacccggtggaccacctggtcctcccgaagttggcccaccgaactgacgagggcctccatgagaaccaaagttgttgagatgcatgtgagggaacccaggtcctcctggtcctcctcctcctcctcctggtccacccatcggtccaccagggaacccaccaggacctcctgggccaccggggaatcccattcggttggggtagtgtccaggacctccacccggatgagggtgcagcggtcgaggggtaccgtccggatcaatcacatactggggaccgtgctgtctgttgggacccggagggtggtagagacctatttcgaaacgtataacagggaaggagtttctcagtcggaatgacaagaagcaatgagataaacgtcagattaaatgaacaaacccatctgcttggcttgcaaggcactcatgttctccaatccttgcccgtggatgtcccacaacgtctttcttcgaactcgcttgctcagggggatagctccttcgggagtaggacttcgcctgtcgggcgaatccctagagtaaccgtccctaccgtcacctcgacctctgtcccgtctacctccgtctctgtagtcatctcggcctcctcttcggtagtccctgagatagaaatcaagatggagagatggaccaatatgcggttagagatgttgggaagaggaacaagaagaagaaggaaaaagagatttgatacatacctgtcgcctcgaccataatcgtcgtcccgccttcttcgatctcggtcgtctcgccggtagtcagatctatcgtctccatgtctagcagatctatcatcatactcgtctctatggcttcgtcttcggtcatccctgtattaaatgcatcggaaagaaggcgaaagagacagaatagatagagagaaagggaaagaaaaaccagtccagaaatgaaggttaagacgcgattttatctcgactcggcctagggaacgagaaggaaaagaacttgccgatcatcataacttcgctgggatcgtctgtccctgtcatcatcgcggtgtcgcggccttcggtctgttcggttgcaaagagaggcggaaaggaaggagagaccaagggaagagaaaagggaaaagaagacaaaagtaagttacacggatgaacgtcaaaggcaggccaaaacgaggtagaaccactctatctgttgatccagacgcgaccgatggaaccaaaacaacaagaagccggccatgaatggactgaccgtaatctgattgatccattgtacacgcacagatagacgtatggactgtctggggagatggtgtgtgtgctggttagaggagtcgtgagaagaaacagagtggatggaatagaacgaaaaaaacgaagagaaaagactagaacgatttgtagtctggactttgagaatcgactagaaagtttcctaatggtttttctgttcatcgccatctttttctcccacgcgttttcaacctttctcttcacttgctaccaccacccgaccgaccatcaacctttctctttgtgatccttttcttttctatacatcatggccaatctcggaggtaagagcgtgtctattgagtgttcggaacgggcagttaatgaacgagagggagcttatcaatccgtggtttttttcctcgtcaaatctttttctctttggactcgtcggttgaacgcttcaatttggccctctctcatcggtttggtttcttggaacagtccctgttaaattgcttcaagagtctcttggacacgttattaccgttgagctcaagacaggtcagacgtacagaggaaaactcatcgatggtcagtttttctttcgttgtcgttcattccttctgattagattgtttggatgtccttttttccgttcttcttttctttctcttctctattccgaatgttcttgttgttgggacgggtcgagtctaccagtagacttctgaataggacatagacaacgaggactgatgggtcagctggtcggatggtggctctttatgaagagaagggcaagcaagctgcaagctacaatctcggaggacaataactggggaagaaagtatacgatgacaatcgagatctaccgaacactgacatgatgttggtaccacttttgatgcgttgatcaaaaacaacgacgtcggaacttgggttccccgaacaaaacaacagccgaggattcattgaacatcgctctccgggaagttactgtgaccgctcgagatggtcgagtgtctcaacttgaccaggtctacatccgaggaagcatggcccggtacgtgacgtgtttcgatctgtttgtgtgtgggcgtgagttagagttcggagttttagattgagcgtctgctaaacatacatacaaacccaccaacagattcttcattgtccccgatatgctcgcgaacgctcctatgtacgtgattgacgttggtcaagagtacagagatagatacactccggtgctaactgtttctttgttttcttccttgtactttatcgaacgtcttgtccaactctacttgatatccatcaggttcaagcgtgtcggcccgaatggttagcttgtgtttgggaagattgactctgatggttgacactcgatactgattaacgcgggctttcctttctctttccttttgcaataaaacagctatgaagggacgaggaattggaacggcgagaggacgagctactattcttcgaggtttgttctcttttctctatataagctaggagcgaacgatgctgaaagatgtttatttggtgtattgaaatcttgttcagcaaacggttagacctctttgttttcatttattctggtgagagtgcaaggagagagaacactaacaatcgcgatatccttcccctttttctctcgcttttgcgcttcggtacttgacaatcacagctcgacgtggtcgaggaggaggagatgccaaccagcgaaaacctcagggtgtccgacgataaaaacaaaagaaagagggccagaccaccttttttcttcttctttcttcccttcctttccctccgttttctatagcatctctttccccttctttcgctttcttttcttttgtttctttcccgctttcatctcttggtcaattgtcttgtcaaataccaaatcccgtcttctttctttattcgatacggatacaaacgctagatggaaagaaagacaagaggaaaagaaaccgggaaacgctttcatttcttccaacttctgcccttctttgtctttctctctggggaatgaactaagagaaattcacttgaaaaacaagatatgacgatgcttctttgtattttaaacgacattgtgttgaaagagagagaggagtctgttcttatggaaaggggacagaggaagaggggccaagaaaggatgtactgttggaaggagagcaaacggactgttcgagagtaccagggcgaaactagaggggactgtgaaagaatcaggtaacacactagagaagactacaaggggctacaaaaagactagtcaggggactacagaagactacagaatgccaggcagggaccgataagacgaggcacaaacgatcaccagagtccgtccgacgggggcagatggcagaacgaggacaggcacaggcacatacacaggcacatacacaggcacatacacaggcacatacacaggcacatacacaggcaccactcaggcaccactgtcaacgcagccagcggatcacctctgtggttacaacccccttatgtcttacgtaatcgtaacccaccgaggggaaaaaattccttgccttctcttctttgcctcctttctttttttttttttctcttctccttttctttcttctacccaaaggattcagccttcaaacagtcttctcttccatcccatcgacctttgtatccgtctgttcatcttagaactagacagatcttcttcagaaaaacctttacacttttaaacatggcgtgagtgtgttctttggccttgcttcgtgtgtttctttctgtctcgtagtcctttttttccttcttttccccacccggtctaccatcacccaaagcgaaagccctcgcctttgcttctgtctcttccggacgcttcttctcccgaccctttcgtatacgccagtggacaccacacgcatcagaatgtcctctttcggcttgcgtttcgatcgattcgtttatcaacctcctatcgggcctgcgtcaaacccggtcgacgtgttttcctatcagcaaagaaaaactctatcaccttttttttcctcttcgtctcgccaccgtcggcctttttctaccttccgcttatccattccttcttctttcatctttctgcctcttttctttctacccctggcatctgctgcttcttgaactgacatcatgaatccgtcgtgctccgtctttcgttttctagtgacactaaccttgagcttgagggagagaccatcgagtccaactgggaccaggtcgttgacaagtaagtctgaccgaaagaaacctttcggctcaatcatccagactgaccgggttctccttcgttcttgttccgaactatcgctcgccctactcgtgtgcaccttaccacccttcttgcccatcagcttcgacgatatggacctcaagcctgagctcctccgaggagtcttcgcctacggtttcgagcgaccttccgccattcagcagcgagccatcatccctgtcgtcaagggacacgatgttatcgctcaggcccagtccggaaccggaaagaccgccaccttctccatctccatcttgcagaaggttagttctcaatgtgcttctggctcgaaatatttctcgctgacattcttgatcctgttctcatcacatttcgtccaacaaagatcgatgtctccatcaagtctccccaggctttgattcttgctcctacccgagagctcgcccagcagatccagaaggtcgtcatcgctctcggtgactacatgtccatcgagtgccacgcctgtatcggtggtgtcaacgtccgagaggatatgcagaagcttgctgagggcccccacgtcatcgtcggaacccccggtcgagttttcgacagtcagtccacgtgtatgcttgatttctgtttgttacagacagctgacaccgattttttctatgtctttccatttcaccctccaacacaaacatctcataccccacagtgatcaaccgacgagcccttaagaccgaccacgtcaagatgttctgtctcgatgaggccgatgagatgcttggtcgaggtttcagggagaacatctacgataccttccagcttcttccccaggagatgcaggtcatccttctctccgctaccatgcccgccgaggtcctcgaggtcaccaagaagttcatgcgagaccccatccgaatcttggtcaagaaggatgagctcacccttgagggtatccgacagttctgtatgtctcttttttattcctcttcttgtttgtcccatggctttccaggaggctgactcttcttcctcccctcagacattgccgttgagaaggaggactggaagctcgacaccttgtccgatctttacgagaccgtcaccatcacccaggccgtcatcttctgcaacacccgaagaaaggtcgactggttgaccgagaagctcaccagcagagagttcactgtctctgccatgcgttagtgtttcttccttcttttctgctttgcaaatcatccttgtactgatatatcgactccactttcttctctacagacggagatatgcagcaggccgagcgagaggtcatcatgaaggagttccgatccggatcttcccgagtcctcatcgccaccgatttgctcgcccgaggaatcgatgtccagcaggtctctctggtcatcaactacgatcttcccgtctccaaggagaactacatccaccgaatcggtcgaggtggtcgattcggtcgaaagggagtcgcaatcaacttcgtcaccgacgaggatgtcggtatgctccgagagttggagaagttctacaacacccaggtcgacgagatgcccatgaacgtcgctgacctgatctaatttctcttcaactaaaaaaatcggtttgaacaagtgaatggttccttccttctgaggcccgttcgctctttctctatgccttttctcgcttcccaacctcccttcctctctgccccttatacacacatctccctccttcttgccttccttcctcccttgcttcttagctttctcccctcaagttgtctgtttatgtccgctccctattttccctacaagcgggtttgactctttcaaactttttttttgacttttcatacattctcctccccctttttgttttattggctcggttgatttgatggatcctttttttccctcttacacaacaaacgtctgcttctgtgaacaactggccgtgcatcaaaggtgtggatgaggtgtgaagtgcgctgaaaggacgctgaaaggatgatggttgcaaagtgacgtacgctttggcgaactcaaggaaactaggaaatatgatgacacgtcccatcgaaagcgtttacctcccacaccgacgacttcggctgccgtctgatatcgacactcacgccctcagcagtcttgatctattacccacgacagaggacgttttctcttgctctctccatctcccttctacgctcgcgagtctctggagtataaaacaaaggcaaaggaaggaaagaagagagtaaagaagaaggtagaagagatcgttcgtggaaggaagtcctcagaaaaaagaggaactcttctcgaatcagcccagttcagttcgtctatagagtacattccatcgaatctatccgtctatctctcaaggtcaccacacccgtacatatactgcccttcttactcggaggagaatcaacgggcataggtcgaacaagaagaaaagatgatgcctccagtggtccgaccgtccagagtgacgatcctaggatcaggcctcacctcgctcgccctcgctcacagacttacctcgctctccccgctcacaaaggtgacgatcgtcgattcttcagaaacagtgggaggatggatgaagtcgaacttactcagtcttggaccggacatcgggggacagaaggtggtgatcgagcaaggcccaaggagtgtcaggccgaaaggtggcctgggcgcggtcaggttattgggtctggtatgttttttggagacttctttcttgttacttgccttgtctttcgtgtgcgcgtgtgtgtgtgtgcgtgtgtgtgctcagaatctgactctaagccttcttttgatttcttctctctctcggcttgatatcgtgatccttcaaaaaccaggtcaaggatcttgggctcgatcaatcaatcatcacaattcccaccacccatccttccgctcaaaaccgatttctccttcacccatcgacaacattgacgaaactcccttcgtcgatcaccacagctctattcagtacctcgcccatcacacactcgcttatcaaatccatccttctcgaaccgttccgaaagtccctcccggcaaacgaggcgcaatcggatgaatcggtcgactcgctgatgagaaggcggttcggtcccaaagtcgcggacgacgtgatgagcggaatgattcatggaatctacgcttgtgatagtaggcagttgagcgtgagaagcacgtttcctttcttgtgggaagcagaacagaccagagggtcgatcgtcaaggccatgttcctcggcctcggcgggaaccgtgaggaggtcgccgagagaaggaaggcgaaggaaagagaagaagccgcgtgggaggaactaggagaatttggaaagacttttagaaaggggatcagcgtatggggtctcaagggtggcctgggcacgttggcggacaggctgaaggtcgttttggagaaggagagaggggtcgagtttttattgggccatactgtcaaccgggttgatctcgacggcgacggtgtcaaagtgaggtttcttttaggtttcgttatcgtttgattgttcccacgttcattccactcttcccttcgctgataacaccgttaatttattttcgcgcctatgcttgtgcccatgttacagatacaaacgacaagccaaacgattcattcgccttatgtgatctcgaccttacctccaatgaaattctctcagatcatatcctcccctttgccctacctggaccacaatccgtcgactactgtaacagttgtgacactcgtattcccctcgcccaaaccaggcgaacgtccgtactaccctgccgggttcggataccttgtccctcgatcgaacgtgtcgaatcctgatggcatcctcggttgtgtgtttgattcaagcgcgatgggacaggtcgacgaacggccggtcgcagaacgcacagtcaagctgacgtgtatgattggtgggcctcattattcctctggacggtcaagtgttcctctagacgaaaaagaagcggtcaggatcgcgttgaaccatgtgaggaccaccctgggtggcgccgagggagagacgtctctgccgagtaatctggaaccagtggtctcgttcgcaaagactcatgtaggttgcatcccaacttacctccccggtcacggcgaacgcatgcaagcgctcggccaggcgatcgaacgcgggccgtggagaggaaagttggcactcgccggcgctggttacggtggtgtcagtctgaacgattgtgtgaactctggaatgagtctcgcagaaggtttggtgtcgaacggagtagaccaggtgaccgggctcgagaggtggaaagattggaagacgtacggtcgtgcttcttcgatgacgaccggcgggcggatcggacttcgaccttctcatagaaattattcaacccttgctcctgcttttccgtcccgtccttgtcggttttcgaccggtcgaccactcaggccgatcttaatttctaggatctgcctcttcaagagaacctactcgacacgtctttcatcacctgtttctccctcctcttcctctggttccacaaattcatcggcctactcgcgtagagcagagtttgatacctcgggggagagagtcaatgcgccgcttgctgccagagtcatcgtcgccatcattggaccactcatctgttcgtctccctcttctttctccatcattgtctcttttgtcgcgtcttctaaatttctgctttgtgcttccaacccaactttgtagtcttctatattctctactacttcaccgtgtttttgaacaacacgtcttacttcctaagagaggtttacggaatgatgaataaagagggtgtcaaggagtttgcgcctgcaaaaggcgacaaaatcattacattggaggacgtaaaaggtgtcggagaggccaaggatgtatgtttcaactcggtccttctgggaacgacaagaagaaaacagagagtattgactgacgttttggtttggatgcggttgttggacacgctttgtcatgacaggaattgaaagagtttgtggaattttgtgagtttttgtcttttcctgactaattttctggacagacaacctaacgacgaaggactgatcgaaattctttttttcccctctatcgcccgtgttttcttcatagtgaaggatcctgaaaagttttcttcgctaggtggccgacctcataaaggtgtccttctttccggccctccgttcgtaacataattcttcttcgcgtctagtttcacaaaactttgcgcatttgccttattcaaaatcattctcctcttctggttcctgtgtttgtcatgtatatacatagtggaacgggaaagacgatgcttgctagagcggtagctactgaagctggcgtcccgttcttcttcgctagtggatctgagtttgatgatacgtgagtgactttctgttcttctaattttgatcatctcttttgccacaatcaaccaaacgtctgatttgatatatctggaaacaaaggtatgtgggagtcggagctcaacgagttcgagagctgttcagtacggcgaaagagcgagctcctgctatcatcttcatcgacgagttggattctatcggaggtaatagaagtgaaagccaggttcgtttcagcccttcctcagtactccgttgtctcctttttcttctgctcctgccttctctgacaactgatggtattttatgaattgctagacggacgcgactagcggaaactcttccaagcgtcaaactcttaatcaactcctaacagagcttgatgggttttcgagtgggaatgatctcattgtcattgccgctacgaactttccggaatcactagatccagctgtcatcagacccggaaggttcgatcgacacatcaatgttcctctacctggtcggtcctttcagacatattctttctgtttcaatatttctatcgtagggctttttgacttatcaagtcacttgtgtacttcattgggttgattgcctcgaaccctagacgtacagggccgattagagattctcaaacattacttagtcaacattgtggcagatccagaggcggatttaagggtgatcgctagagggacttcagggttgtcgggagctgatctagaaaaccttgtaaaccaaggtgagtctcgtttctcttcttctctgtcgttcatgagcatctttggctgatttcatgttcgttctttggtttaaactttagctgctgttcgtgctagtaaggaacaagagaccgccgttcgattgccccactttgagtgggcacgagataggtacaatattcttcctcatctctattcataatttccgcaatcagagctctgatcgatcgcgcttctctctcgcgttcaaactaaattcacaggattttgatgggagtcgaacgcaaatcccgatttgtaagcgccgagagtctgattgtatcagcctacaatgaagcaggccatgcccttgtcgctcttcatactcccggaagcgtaccattgcacaaagtgtccatccttccaagaggctccaagctgtcggtaacatctcaagttccagggatggaccaagactcaatctcaaagtcagttcgacgagtaccatatagttcataactctcatcttgatcagacggaagagactgattgttttgaagcggatctggacatccgaactgacaggaaagaatacctggcaaggatagatgtagctatggctggacgagtagccgaacgactttcgaaaggagacgacgcgacatcagatcggacatcagaagaccttcagagagcgagtaatatcgctagtgccatggttaaggtaaatccttaccctcgtttttttttcttgatttgtgattattacctttctgaaaatatgatatgttttgtgtcttttctctttaaaccattagcaaatgggattcagtgatatcatcggtcccgtatcgttcgatagagatcaagctccgtttctgagtaaacgacgaaaggatgagatagagagtgaaatcaaacggtctgtcctgttcacatatattcagattcctttcgatccagttttatcacaagtcttcttgatttactcacctacttgcctgtttctcttgcttctcatgaccatccacatgataccagaattgttgaggagggagcaggtagagcacggacgatccttcagactcatcgatcatctctagacctggtacgtatcccacctcttatttttctcattcaagacctcccaagtatcgtagacttcattgacgacatgaattttctttctcttctccttttgcctcctttccaggtggctaaagcgctgatcaagtatgaaaccttgacggccgatgagatcaaaggcctcttgaagggagaaccgatcgttcggaagaaagaaaagccaaaaccggtggctgtacctgtagagctaatcaaaccggagagatcaccgaccgtcaccgaaggtgtaaagtctgatgacgcggctggtggtcctaccaccggaaaggcaacttggttgtaagaaggaaaagaaaagcagtgaaaacgatagtgattcaaatggccgattatatggtgctctcttagaaagtccttaacaagcggctcccaatgtttcacgcatccaagatgattaattctaagttcattatcaatatacaacaccaaacccatctgcttccgtcatgaaggacttcactcctgatcggcaatctctaagccgtcagaaacaaacaccaagcactcttcttcctcaagcaaaccgttttgttggaattgaactctcgttctcgaccagattggttcaacagcctggtcttcatcaccgctttcgatctcacctgtctcgaccaccagcgtccaagaagatagattatagacccccggtacaggagcccagaaggttgcaggaaaggaagtcgaactagagggagggaggattgactgatggttcagatcatcggtatagaatccagatgcgtgtcgtgaagagctgttcgtatcaaacacatggagagttgagacagcaatcagtaagatagaaagttagttcaatgaaaagaccgatcgaggagggtcagaagataaaatcgtttagacgacgccttacggatttggatcaactagcttcaacatcacccgcgtagccaagtttatggaagtgttatgaatctggatattcactgggattcggcatggtctagattaaaatagtaggtaaagatagagtttgtaaattactgaagccctttccctccttctagctctattgtttacttgtatgaacagaagtacgtacccctgactaaaaggatgcctggcaaattccgagtcgacctctatagcaacgacaacaggatcatcctcgatacccagtggtccacttagaacgcaatccatcaacgctctcttggcgttgtctgtcgcctcaaacatactcctcactactcttgctccatcctccttatcctccgatctcaagaatatggattcagaaggaccaaccgaggaaattgggacaactacgtgacccgctcggttttgagatgagatctcccagaagaccaacatcgaaacatcactaggtccaaagagggggaagattgcatgaaggttcgtcgaaggtatgagtggatactgagagacgagcgactggagcttggaatgtcgtagatgagatagaatcaacggcaagagatcggagttagttgtatcgatgagggacgttggaatcgaggggctttggagaagagaagtaggcgacgggatcgatgccaaatccgatgaaccggccaagagttgttgcagctttcgagcagtgaaggcagttgatagagacgactcattgcttgaagactcaggtgtcaatgccatgtcaaagcgttgtgattgattggcagataatagatcgtcatggctttgaaagagatgcatcgtgtcgttggttaatgcgaacgtcaataacttgagatatcagttgagggaacttacggtatccatcccgaaggatatgatgctttccacaacggactcagcacacgaatctgagagatccgaattggttccaaagaacgagattcgatctaacaaattcaaaggtttaaaattagtcatcaacattcttcagaaaaggttgtaagcgcgaaactcacatctacagacagaagctggtttctgggcgatgctctacttcgcgacaaggaggccatcacatctatcattggttctactctaagagagtgcgttgctgtagaagagaagtaattattagaattggcctaattcagaataaggtttcgttgattaggatattaagtccatcagtaatatgagtatatatatacgaggtagagtcaaagaactcgggatacacaaaaactcacagacgattgatatacaaacagcaacagaagatcatgtagaccggcggagcgaccatagcagagaaaaggcacagagatggtctgccccggagctatagagatgcttggggtatggatgctcgtaggaaaagagggacataggtcatttggtaccgaaagattcggaagtccatctgcagccgtggtagaagtagtggagtataaagctgacaaagccaagaagcggagatgattgaggatcaggcaggagcacagcgatatcaattctaaaatctgatatgacttactggacatcgatgagacacttgccccatcattttccttcggctcgatgtttgctattctcaatactgtttcctcgttggccatcattcttaaatccgtgagctccgctgatcccttgtttgttatgtccaccatacaaagcacactctctccttccccaatgaccaacggcaattcttccagattgatgtttaagattggcctggctggagtaatgtcgatagtaagggacacatccggactgtatgtcggagtgagtcgctgtgccctggttacattcagtcgcttccctttccgcaaaagggattgtctacaaggtagaagattgtggaaccggaagcttgcgtgggtgaaagagactttctgaatgaccgacgaggtaactttaattggaatctagagcagccacaaaacgaattgagaataagataaatcaataaaaatagcaatggtttacaaacacggttcgatcggaagatttctaaaacgaacgaaccatccgaatctctcttggctcaagcaccacttcagacacaacctcaatctctaggccttcaggtgatgatttggcatctttcgccccggtaattgctgcctcgatcgtgatatctccgagaatcaactgggcatctagtggatttcgagcagccaactccacgaagaaatgatctgttcgcaatagcaatgcccaaaaatgatgaaactgtcagcacacatatagatcaatggtaaccggaggacagacgaagacgatgatatacctccaatcggtacactactgtcctcatccgtccctaatagactgcttggcttatgtctcttttctttggagttctctcgttcattaaatccattctccaagaatgccgattccaatttggtccattcgaggcgcatactgttgtgtgtcgattcccgtcctagcagacggatcacggtaaaatcgcgctggaatataggttcgggtagcctatccgaaaaccgagttatcttctcaggatgagaagattgtagatgctgttagataagatgaacaccgattagctcaacacatcctcggtacgagtatactgtatacatcaaatatcaaggatagacaaaccctgaaagcaagtacgaaatcttccaacgctccctcttgcctgcccttcatcaatcgtacgaagtgatccactgctacttcagattgaccttgagagtaagcctgtcggcccagggaatgttctacatgatcctgtgctttagtccaagtttgtttccgatacaacacgacggcctgctccagacaccgtcttgagaacgttttctgatgaaggccgaaataaatcaatagaaagatttagaccgtgaatatttgtagtcgatattgagtaaaagcgagctgaaaacgaacctgtcccgatttttcatatcttgatgcggccatgaccaagtgcccggcatatcttctcgtcctggccttcccaggccccataagagctcctagcgccgcctgctcgataagcatcgcgctcgatacttcctcgacttcccctgctgctctcatcaacgcgggtacgatatgggtatattctcccaagaaaaggtaggtctcgtagtagagtatcgtggttcgagtcgcatcgagttgaagcgtagggcgtaaggcatatatctgtacggcttgttggaggtggatgtcgggatgggcaggcctagaggcaggtggatataggagaagaagagtaaggccatacatttcctatgcattaggattatttaccaagtggatatgtttcagcacaggatgatggccagaggtttgaacgacaaaatgaagaataccaacagtagcacccgcttggtacttccaagccttgtctgttccgtagtccttccggatagaatcataaactccagaggcaaaccgatagtcccggagcatgaacgcaaaatcagccaatcttcgtgagattgcatctggtgaagtataagggtagctgcgacatcgaacgaacaatcaattaataacatgcaagagagtcgaacattcaatgcatgacgatgtaacgaagagccagttgatgataagcactcacattcctttagaagggttgtatccagcaacagatcctgccggacttccaggtcgggaagggttcgtgcttccaccaccaccaccaaagaactttcgaccagctccaaacagtctgcccgttatacctcgtctgctggaagcgtactgtcatccagaccaataaacagcgtacgccagaatccggatatgtcaatgacacgttgaaaaaatccaacctcgctttatccgaggctgacagagatacgatacatacagtctcattccactctgccacacacctctccataaaaggaaccaagcttcctcctaccagctctttcaggaacgctctgatctttccaacatccacgtctgtcaaccttcctccacgcatttgcgcgctctcgtcctgcgtgccagtctgttctagacctgtctgccggattggaggtgacttgacaccttgggtgaacgctttgatcgggtcatggggtggaaccgagttgtataattcgtgtagaaagggcgaaggtggcagggatggagagagagaagaaactggtagaaggaagacgtgtggtccgtacgacttcttaatctgggatacgagtttctcggcactaagaaggttcaacgtgtaaaagaacatataaactcgaagttctgcataggccgctcgatgtttgagccatcagtaatataacaaacgatgatcatagacttactcctcgagactgcctcctccgccaacgtcatgaacgacaacaaatgtcttgagcacggtcggatcgataaaaggtctgtggagataaagcttgctcgcgtttgaatgatcatacatcgccgagagtatgctcattggatccttgtcgtcagatgagattgcaagcagcactatataatttatccagagaagatttatcgtcaagttctgaccaacattcacaaataaaggagtgatgatgacgaaaatagggtcacttactagcaacagggtgctcaaacgtctcgtgctctcccatcggccgtgtagccagcataatttctctcaagaccttgtaccaaggtgtcaccttctcaacgtcctccctcttcggcttgccgtcctttcctgcgaaggcttgtttggcttgatcttgactcgttccatctatcttcaataacggaacctccttttcccagcgacctgattttgcagagattgatgaagagagtgcgtcaaggatgagatcggaccggtcaaaagaagatcccaatggaagagactcgagtgattggagtgacgtcagacggataggaaaagtgctggctgttatggtcgttagctgggttgtcctgatagggactgggattatagacagaagttacaggcaaacaagcacagcgtcagacttgtaagacctcaaaggatctctttcaacagtaaagacgagttggaagcgtaccgcgttggatatcattttgaaacggtcgcagaagttcaacgaaatcgtccaagccgttcgctctacatatctgattgacagccgggctagacagaacggcgactttgggagccaaggattggacaagagccgggatctccatctagaatgttgatatgctggctctgtccgaacgacgaaagttgatggctgatgtctgtcgaaggtagatggtgtgagcgagcttgtttgatgtctgtgtggaataggaaaagtttgtagttgatgattacgaaacttctacaaccttgttgacaatgtcagccagtcttacccatcatcttgtgaacctcgatccatctatctcgtgtcctactcatcgtatagcacatagtacggacaagaatggcctctacgttttctactcctccatctacaccggagattcctcagttatcgcctccaacgtcccgtccaacaacaccggcaacatcaaattctgtagccggccagacacctaccggaacggcccgatcatcccgagcgagagatctcctgagggcacactacaagctcgacgggagtggaagtccgaagaaggagggtgagcaggatgatacggatttgggtaagcctttgtctctgcctctctggattaacagacacttgggattgagcgatattcgtgttaatcaggctgctttgctctagatcagattcccgttcgttcaatccatcgaaatactatgcttctttactatccagctcgtcactccctcaacttctcaaaatagaaaatgacctttcagaacgtacgatcatcattcaccaccaatctcatctcttgttgagcctgcataagctgaaaatcctgatgcctcttacttgacaacagaaattcgtttactggattctgaacgacatggtctggtgtacaatcaccatcacgaacttgtctctgcatcgtccactcttcaaaaggtaatgtttagaatctcttcagttcgttttgttgtctcttgatatgttctgatgtcaaaaattctccgctactggtgcgatcgatggaccaaacagatgaactcgcagacatcaccgttggcagactcgcttgaccaaatccgatcatcattctcgtccatctcccaactcacagcctcactttcccttccttcggaagtcgacaaacctgcagaaatcagagctatcgttcgagaagtcggcgatctaaaagaacgtctaggcgatctgattgaattaggtgcgatcatgttcaatccgctcttccttcatacgcatccatacatatgaactcaatgtttcatctacataaactacgtatcacccacaaaggccgacgatcagacgcccaactagcgctgaaggctgctcggccgttattagaacattggatctcaaaaggcgtcaggggggccgatcgagtccttgcagaatgtgaagatttggtgaaagacagttcgtgtccgtctttgaagacggacgttcaaccgaatgggacatagatttcaaggggtttgcccttctcgctctttcttgaccctttaaatattcatatgttaggtgacaacctgatatccgtgactcatggcaaattttcttcagagattttgcagaagaagtcggcaaatgaaagatctttggattaggcaaagtacctgatttttgatgagccatccgaatatgcaaggaaccaagaaagaacaacgtcgatggcgagtaactatttgagaaaagaagaaagagcgagggctgatctgaagagaaaagagaaaaaagatcaaggctcaagacgaaactgatgaaaaacgggttatacgaggcagtgcgaaggaacaacgagagaagaaggaacgaatgagtcaagatcaggatgtaaggaacaagagaaatctcgtcaggaagcttgtcaggggggacagagcagcacaaaagatgatgaaccgacgtagtcctatgaagtgaacatgaaaagatgagaaagggacaaaatcattgctgaacaatggtgtgggggtgtttgagatgagatcttttttgatacaaacggaattgtttgaagaaaagtaaaagagaggaaacgccaggcgtttcggatagaacaaacgatgtcagagtgatagttgagttgttaacaagaaaacagagggaaatgagagagaggggaaagcttgaagagtttgtattgcaaaacgaagtttgagagaaaaggccacagtagcgcaaccactaggcggaagtgcacatggtcaacagatgaaaactcatgcaggtgccgaagtcgagaagtacggatgtaacagcgctcgcttggctttagatgcaaacaacacaagagaaggaagcgagttagaggtggtgagtaagggccttgaagccgaagcattgtctcgagtgagcggagaatgtaggctaatgattgacactaaccagagattctgtgggctgggtcgtaaaccagtgtttgctgttaaaccagtaaatataacattcaaagtaccgtcagataaacgatacataagagcatccaagtaaactctgataccagagagatgtttggaacaaaactaggcgcacctgcagaagatcaagtccgtttcgatctaacccggggacgactgtggcgaggtcctgaggatgccattgtgggaatgacgttttgtagtccggaagggacttgacgccaggccagatggtctcgtcaggcgtaccgagtaacctaggtttgccatgcaccagcgaatccatgtggatttaccagaaatttagatgtgattgatgagctgctgaagacacatcctctatgcaatatacaacacaagcacaggcagatcatagagacacgatgcgcaccgaaaaattctgaagatctcgtcgatctcagagtcacctgggaaaagcggctgtcgcataaccatctctgcaaagatgcaccctaccgaccacatgtcgagcgcggtgctgtagtgtctggatccgagaagaacctcaggagctcgataccagagcgtcactacctgcacattttgaaaacgatcggatgacacgcacagggccgatttgttttaaatggcacagatgtgtttgagatagatgagtgaatttctcaatattcttgcattcacatagatgctttcacaatagaagaaagtgagcgaacctcgtgggtgtatgttctgagcggaattccaaacgctctggctagtccaaaatctgcaagcttgagatttccttccttgttaataagcaagttctgaggcttaaggtctcgatgaaggattcggtgggcatgacagtagtaaagtcctttgataagttggagagtaaatctctgtggtgttgttgtgatgtcggccaacgaagggatagagcgatgatgatcaaaaatcagacatgtcagcaacacatgcatggttccgcactctctgcctttaaatctcctcggtcatttcgaaaaatgcgtgttacacatgaagaaaggtcatctcgaacaaaccttgacgagcgcaggtcccaatccctcatcgtgcccgatggtatccatatatttcttgaggtccatatcgaggaattcaaagacgaggaacaactttgagtccgagtgtacaatatccagtaaactagtggtcgtagaacaaaattgtcagaatcaagtttgtttggcaatagagaatgaaaagacaccaaaggagatagaataaaatgagagaaacaacaaagaaagtcgatagagaccgatactttcagaaatgacggcattatctagctgatttctgggaacgcctgatataaataccagaagtcacgatttgtagcatgcacatcactccagaagctagacggcaattcggacattctcctcgatttactcttgagagaaacccagcactgtggatttctatctctacacgtacaacgtcctcggtccagcaaacaacactcaaacaacacaagcagaaagaggacacgaaagcgagattgaacaacaaacgaaaggacgaagctcacccgacaatgttttcatctttgagctctttcaacagactgatctctctgatggccgtactcgggaccccctcgtcctcagcctccaatcgaatcttcttgagcgccacataggtatttgtcgtcacatccttcgccttgtaaacgactccgtaggtgcctgttcattgttgtttgtttgatgggttagagggagtttgaccatagatttattggttgaatatccagaagcatagcagcgaatgaatgattgaaagaatcgttaagaatatgatcagttaacttgtctcttggacccgacttgtgaatatatcttgtgtcagaaagacaaaacagagagaaactttgaacaatgcccaaagagatgatgagaagagatgggtcaaaccttctccaatcttctcgagtttcgtgtagttttccaagctcatctctggctatatgtaggtgaccggttagaggtggaagggagaaaagaggacagaatatgaagtggttgaagagagaggttgagctgatcggcagaagtctctgaatgcagcaaggggaattgtcgacccaagatatgtatgttgtggttggaagcgatcataaatgaaatacttagacaacaaggtagatcaccttggacatacgcgttcaagtcacgtgatgcgtacgaccctcacgcgtcagtcaacaacttggaatgttgatcattcaacttcgtttgatgattctcatgatattattattattattattattaatttatttttgttgctc

SEQ ID NO: 1936 - DNA, 7766 bp, Xanthophyllomyces dendrorhous
gtgtatattgtcgttgccgaggtgatcgttctgctcttgcttggtatacctgatagacctttttatgctaacgcacttctgatctcattcactcacccacaaaacagaagcacgaccatacatatctccttcctactcttaccatcttttgaactcttcctcctttacccagtgcgatctatacaatgagctacacagaggtactgtactgtttattttcttctacatttgtggctctcgctcggtactcgctgctgacctctttctgcttcttttcatcttttctctcttctgcgatcataatccttcaccctgattcaaaacattgccatattttgacttcccttgcaatctcgtcgttgtcgtctatcctgcgttccacaacataggcagacaaggtcagtatatctttacatactcaagtgctgagaacgaggttcttctcggacgcgtccctcaatcgaatttttgcttatcaaaatgcgtgggctgaaaacgtgtttggacatatcgatgaaatctcatgaacgacagcaacgagcgatcgagaagtacgcagatcatatcacttactctgagcgatattccggtacgtttgctctctacataacataccacagattcattgttctctctccttttcttaaatggccacctatatgggtcaaacaatcactttcaatatgcacaaactgatgtgtattttcttttgttatcaaataaattcaccttcacagacgatcagtacgagtacaggtgaacacgtccttctaaagacacgcatactatgtcgactccatcttctttgcaccaactaatcttatccgctgtttgtcattgtgtacttctcgcgcgcgaaacagacatgtcacccttcccaaaggtctccttaagttcatcccagatgggattctagacgaagcaacttggcgatcgtgtggtatcagacagagtcttggttgggagatgtacctccgacatcaacctgagcctcatatcttgctgtaggtcttctaaattcattgctttatagtctttctctgcgcaagtagagaaaaacggttgaggagcacaatcaggcgacgtcatgaattgacactcacatactttgcgtttcttcttgtttgattgaattttcttggtcaatctcttatagattcaagagagatgtaagcatgtcataaaaatcttttttgttcgtttcagtacatgaacacaagcttactttgttctttctttacgttttcgccatagaaagatttcgatatgaaccattaaaccacatcccagacataagattttccgctccatcagttcatgcctctctggacaaccacattggttacattccattcacatataccatcgcaccactctccgcttctgttccgttcccggatcgttgttcttcgatacactagcttcatcagctcgctgtctctgtatccgtatttccagttatttctctccacatatacctgcctgtttgctcgcttttgaccaaagtctcacaattttctcatatctggttcttagaaaaccacaaaacgttcaaaggtttcatctcttttatatttccaaaggaaaaaattacatatgttcatccttttcttcttttggagatgcgatgagattttcacatctggggctgatgacgacaggttgaacttgagtggttcttctcaagtctcgtctgattgaggctcagagggaatataagggttttaaatagacgctagattgcttatgctgaatgggtccaaaacagattacaggagaaaaagggcaaaagaaggatttgttacgatctgtgaaggtgaggtaagacgtattacgttgaaagagctttacgaaccatccagataatcagcggccatcaacctaaacgaagacaaacaggaggatataaaggaagaaagtcttagcaatcgatagacatgagaataagaagaatttatataggacttacacctccagcgcgatctctggttcctacatatataagtttcgtatgataagcaaaaattccggtacaaatatactgttagattctctcgactatatcaacagagaaatttattcagatggctaacgagaacgaaccaaacgttccgtaaaatcaggaacgaaatcttttgcggtggcaccctgacgggcaaacgagatgatgagatcgacgaagcatgcttagttttgtgatggttgacttggcaagttaaggatcaggacggatgaacgaacagagtactgggctttgaaagcgagatattccaacactttggcaacgattaccctttattatcgacactcaaaccaaactgtcagcgcactcttcgttagatcacagaaagttcaaacacgttcgcgatgtccacggcactcatatttcagactaccatgacttacccactggtgataaaaacgaacagcatcaaaacgaacaagacgtgagtgttccatgtgccagagattacggaggaagatagggcagattactgaccgatgaggaatctcgcatgtgttatttcccacttccataaatccggctagaaatcgccaccgtaccataagataatccactcagccattagcttctatgtccaacaacagaagcagagaccgtttgatgaggacaaagatcggacgtacagtccgggtcgaatgagctcttaagtgtaccgcttagattggcagtttctctctggacaatgaaagtaaactgatcggaggagaccactcggacccattctgatatctttcatgtatgtataaagaaaagatatgagtaattcgatgagtcattgatggggaagagagaatgatcgagacgaaaatcatcgtacaggttttgacatgctgagacaactggttgatcagatgaaggtggatgagggtacaaagcctatagattgtcgaccggatgtagagtaaaataggcggacgattccaacagacggagctgtccggtatatccgatttccactttcctaccgacaaaattcattttctgatcactctctccattcttgacaaaccttttgttttgcagacaaccacatataggctcagactagtcacccaagatgcatcctcctttacataaacccagtaacatgaccggttcgttcttgtattctcttcttagatttcttatattcttcgattttacttaactctctatgaccgtctatcgctcatcctgtccttgcttggaacacacttgatcgaactagcttgtgaggatgtgatcaaagcccttgaggagtgtcatgccacaatgaagaaatggtggggtggttgtaatcagaacaaggtcgacgtcacgctttgcttaagggccgaagtgagttttttctcttcccttgtggtagaatacacttctttccggaactcgacgcaagaagaaagagcactatgtcctaggacgctgtctgagattaatcttgtactctcaccaagaccattgagcaggtcacatgagcctgcttgaagaattgagagttctaccacccctctgaagagaaacttgcagaagagcgatacagaaccttcctgtttcagcaacttctcagttttcaaaataatttcttaactatacctcaagatggctgaccatcccgttctggttccccattttacatgtaccctcttcaaacgcagagagttgcacgcacacaaaaccatcgacaggaagcaaagacaaagaatgcagagaggaagaagaagatggaggcgatcatgcaagacttagatagagagtaatgaatgggtcgaaaaaggacaagaacggatcgtgtctacgtgtatatataataatgatctcaagagaaataatgtagagttcaaaacctgttacttgtttagagccgcgctcttgagcgaatgagtcgccagcgatgatcatactcagttgtgtcatcaatgatttatgcaacccctaccggtttgtcagactgatcttctcggctatcttcatcatcgagtaaaccaacaataagagccatccatggaatatgtacacggatgatcatttcgacgttgtttgtctttttcattaaagggctccgctcaatccacctactgcgagctctgccaagccggtccactccttctcttcccaagtgccttttgagaaaccctcaaggactcgttttctgtcctcccttgtggacgcctcaccactgtctacgttgtaaaacctttgaaggccgagaagcagcaactgagcttcctccaatgtgagcaggtacttttcaccctgggcagtgttgatatcggtcttgatcggtggagaagtcgacgtgatctctcccctcatcagaaccactccttctgcctctgcttcaggagaaccctcacccattcggctcaaatcactccagtgggtgactgtgagaaacacccgagcccattcgcctttgattttgtactcttcaagagaggtaaatacgatagtgctttctccacccggaaagtgttgccattgtagaaagaagaattcttggcctccgttcgagcgaggaagaggcagaatgaattgtgggtgggcgtgggcggtcgcaagaatcttcttgtacaccggggtcggaatcgtagcagaaacatatcggtttggggttgagatcgatttggcgaggtgcaatgtttgccagagagttgccaacgtagttggaggatggggggtctctagcaatggagtgagattaaggatagaagacaagggctatttcggatgacaaagaggtgatggttagtattgaagaagcggacagaagggtgacgaagaagaagcttggcgaacaaaccatgattggggagctagaggtggttttagtctttgcgctcttggaggaaggcaaggtcggagattgtttagcagccgaggatgagttagcagatgccatatctgatgagatcttgataggggccttcttcaccaaaggtactggctttttcttcagcttaagctcctccaacgagccgacgccttccctgaagatgttttgagatgaacacgatcagcacgccaacccctaatctcaatggaaaataaggaggagagaaactgactcttccacctttttcttcagtttgtctccatactttgcctcgaaggcctttctcttacgctctacctcctctcggaagttagggatcgacgccagtgtcctatccacttgtgaagaatcatgcctgcgaagagacggaagggctgatcgaacaggcagagctgcccggaaagatctggacgaagcgattctgagtgatcgaagcattgttgaggtaatcgttccgagttgatctctgaaaatgagaaataagaagtgtaattcaggttacaaccctggtatgcgggttgagtatcacgtgttccgaagcgtgggtcacctttcaggttgttctttctatctgcttctttatgcctcttcattcattatacatcatgttctagtttgcatggctcgtgcttcgttctcagctctcgtgatcgcgagcccgtctggcttcgccatatggatatctatagttgcagatcgaatgcgcgagacgttccgatatataaggggacgctctcgcgccttcttgattcgaaaaacttctcaagcagaattcttgtcgagacctcctatatcgagtaagtttttagtagtctggtatgcttcaggtgttccctacagaaactaagtgttcatttttgttccaagctaataaaccttgattaaaccccgatcaccgagccttacacaagattcgggtggtagcggggaaattacgaaggtcgtaaccagacaggaaatacgactggcaaagaggaagttcaggctctcttgctcaagtagttgtaacgagggcgccatgcgaagagactgacataacaaggttgagatcacactgggcataagagtactagggggtaacaaagtatccaggcttgggagactgtgctatgggtggcataggaagcccttcctatgtgtcatcctcagattccaatgagtatgcataaaaaataaattaaagatggtgctaaaagcacctgcgctggagaactatatacacgcatgttgaggtaatgagagggcataaggaacgaagaagcaggagaaggttgcaggtgttcaacactcaggtcacgtttctgacagcatttccccctccaggctaagtggaaggaccagtaaaattgtgaacgtggtcaggctctgatgatttgaagaatgtgggttcggctggcttcttctcagattggatcgttaggcgcgtttgagatcttgacgtgaaactcggtgatagcagagttgtcgtcaggtaaattatcacaagggatctagatgtcgcagttagaatatagatctttgatcgaaccaggtatttgtgcttccccctatagatccaagagttaataacctgttctggaactattcccaaaccatgttctgtctataagataggagaaggcggagacctttgtcgagccggttttatattcctatggtgttcctcgagaagggaaacgtgcaacgttgggtgatcgttctaatagttggcagctctgatcggaaagttgcgcggcccacagcccgaaggatcttatatcatcgcaggagcttggtccgaatcacagacaatctgtcctctacctaccttgcactcctcgactcacacgaccaacttcgtaagtcccgtcggctgatagactggttttcttatggattcagatactgtctatactccttgagcacgattatccgctcaggaacgagatcgatgctaccgactgagattgtgcctgtattacgctgaacccggtcacatctgggtgagttgccctgtccggccgcaaaacccccgaaccgctagaatatccgaactccatacggactctacctcgacctcgacctcggcctccgaacatacaaacgcttcggctaaagacagagctcagtacgaagttctctactaagctgtcccttgtctactgcgaccaggccaagtgatcaagatacggtttccacgcgttaggcctctccttcatcgtctcattctgatgtttcttccgttccgtctctataataagtgtcccatctcatcaatgccttccactttatctgattctcttgttgacactatgtcccccatttatcctatgtcttctatctgccgcgcgcccagtgaacgaatcgctcttccctctgcgggtaaccctatggaattgacctctttgagcgatgactcccaaatgcaagtgtctaaatagtgaattttttctgaaccacatttcagaaagagaatgactctgtctccgattgagttctgctcgactcaggctcttaaacaaatatcattcatgaatgtttgcaacgtggctggtgctttattgagttcaaaaggcataacgcgggtttcgaaatggccgtaccgagttcggaaagcggtctttctttgatcacctcctttgattcctaccgggttgtaggatctgcggaagtagattctggtgcgactcaaaaaaggcgatgaatgagaaacagccttttgaattcagtacggccgtttcgaaaccctcgtcatgcccttcggaccaaccaacgtaccagccactttccagaccttcatgaacaatgtttatctggaagcctgagtcgagcataactcgaacaggaaggaagctatcttcttcaagacccccaagcaacaatctgaccatgcacgaccacttttagatggaaatcccaagctcagactctttgttacttctcgttcag

SEQ ID NO: 1937 - DNA, 5280 bp, Xanthophyllomyces dendrorhous
gtcctagttctcttgttctcgttctagtagttttattgattccttttcccatctgaaagagcctggacttctctctgagacataaaagccttgtgtgattacctcaactgtaaatcttccgttacccgcccagcttccgttcttagcattgaccctatggcttcggagttagtgagcttacgtcatgaaatccatcatgtatcggctaactccgaagtagatgaagagacacggacaaattagaagacgctcggagaaattgtatcgtgtgaggtagcgtgtacgttggaattgggactaatagcatcggtgacatcggatgaaaagttgattatcgcaaacaaggaaaccatcggataaagaatatattaacagttgatgatcaatgcgtttatatacctcaccgtcaatatactaaaagacgacggatactaccaattctgggcaaacttgatgttaaacatcagcgtatacttgttgacccacagcctcctgatgttttactccactcggagaaattatacttttctttttgaataaagcccttctcaccttctctgatcaatacctggttggtgcttctaacccctgttttcatcaaccggctattcggtccggatagactgatcatttgacactctgaagcgcccagccaagatgctcataaaggcgaccgattctcctgtgctctcgagaaaccccagatatcttctcctcctgctcttcttgatcctctcctttagtctaatatcgacaagtcttcttttctcaattcaggaacagaagatgcctcctctaagtctgactcttctccttggtacagctgccatacaatcgtttgttgcacatgcgctcccgcccaagttcttcgtcttctctgaaagacagactatcgctactgtcaacgagagctgtccaatctattctgaatattccacagttcctcatgaacctgcgtccggtgggccattgggccttccaaccatgcgacctgatgaaggatgcaggtctgtatcgtctgcccttattcttcctgttttaatttgcatatcatgctgacttctgagatatatcttaggacattcacatctactgcagtcgaagatctgctcaacgactatacccctcgaatgaaggatcgtgacctagccatgcttttcaccaatgctttgcccaatacgcttggttcgttcagaagctcacatgtctcttcctaaagactcacgagtgtcactgaatatacgtccgatccatgtaatgtttagacaccacggtccgatggcagtctgatgaagaccaggagccatcaagcttcatcgtcacaggcgacattgaggccatgtggatcagagattcttgcaaccgtcagtttctcatacctccgctcttgattactacagagatgctgatgacgttgtgtaagccacatctgtagagcttgcaacctaccaacccctggccgtcaacgattctgctttacggcgattgatcaagggagccatcgttggtatcattttctctttttgagtctcaacttattatcactttgggctcatcaagctcaagttgacttcttatacgatcaggccattcaagccgactatcttggagagtacccatattgtggagcattccagcctcctgctgcctcgggattggctccgacattcaacgagtgggcgtacggggtcgagtaccctttcacagtcgacaatcagacagtatttgagtgcaaggttcgtttttttttctgtctttctaatagcgtgactgaatttcagacttttgaaggctggcacacgaagttgatcacttttttgatgggttcacagtacgagttggactcgatcgcaggcttcatgaagttatcgagacaatattacgaatatcaaaacgactcttcataccttacctccacttgtgcgcgaatgttttttttcctcttcgacttttcacctgactagctttctggaccgttatcttaagttgacatcttcttgtcgatcatatcaataaagggttcaacacgttggacaccatttttgagcttctagataatcaaacggtctcgacagtggacgaaaatggtgaagtccacgcgacatactctttcgactcggataaaatccctgtcgtcaacggaggagtaggacacccggttaaagagactggtatgatcaggacctctttcaggcgtaagcgtttacttttcctggtccctcaagatgttccttggcgttaaagatgtgggctgatggtgaacgtgcggattgtgatggacaactatatcgaatagcctcggatgatcttgtcatctatggattccatattcctgacaacgctcttctcacagtggagcttcgagggtccgttcttttcatagcatcacaacctcttcttctcctcatgctagtactcactggttggcatatattgaaaaaaatatcgtatatcacacagagtcgccaagattctaaaaaccgagggcttgcgggacgatctggtcacgaaggcaaccgaaatagccgatagggtcgaacgagccatctgggatcacggagtctttgaccaccccgagtttggttatgtatttgcgtatgttctttgcctcgatcagtgaaagtcaacagaacgaatctgactggagatgaatgttgattttgcatccatcaaaaaaatattgcaggtacgagatcgatgggttcggaggaagagttttcatggacgatgcgaacgtgccaagtttgatgtcgcttccctaccttggattcttgggtgcgcattaatttctttatatgttgtttttgattactcttctggcacaggggctatttggtttgacgactgaatatcttttcttgggggttcttctcatatgaccagacgcggagaacggagtttacaagaatactcgaaagatgttgacgtcgacacagggaaacccatagtaaggatttgtttttctatcaacatttgacttcctacgtgcttgtctcgagtactcatagtgtttaatgccatgtcttctagctttgtgagagggaaagaattttacgtgcgtttcctgattgatctgtatggttccagaactacgaagattattgcttttctgattctttgtctttactcgctgaatcttgtagggaattggagggccacatgtagatgtgaccaaaccgtggccgatgaacttggtcagtgtgatggtgacaagtgacgataaagaagagattaagaacacactagcctggttgacgttcgtctgatctctttcgttgtccagtcttctatgatcttcttttgtcctctcttgctcacaaggttttttctttctttttggatatcgttgtgccagaaactcgaccggcggactaggcctgatccacgaatctgtcagttttcgttccctttacccttatctcaatatcgctcgactctgatcctaaagttgtatccttatttatattgcgccttcaatcatcaataacgtcttccaaaacacaggtcaacatccataattcctcagattataccagacagtggtttgcttgggccaattcgtactttgcagaagccgtgatcaagatcgctggcgagtatcccgatttgcttttctaagccaagtcaaatcagaatggtaagatcgcagatatggaacacagatggaacgaagaaaatatgagggccagaagagaatcgtaggactttgtatgctaaggttgttgtatcttgcttgattccttttgcttgcttcatattgcgctgtgctatgctctgttttacaatacaggatgaagatcgttcgaaattgtctgcggcgagacataccttgaagtgtgcatctatagaaaaacaaataaacaagcaaatcggaatagaaataacataggacagcgtctatttcgacacggctaaatcttgaatggccacgttccaccagactggtctgtttgtcgttattttgacgacaggctctgtcgagacgagttgattggacgtcgagatttgggtcgaaaatgacgtttcccagttttctgtcaggaagaaaggttgaaggataaatacattggtataagaggggaaggacagaagcattgcagaggagagaaatgatggaagactaaccgacgtcccatcggagtcctttggtggaaatcaccgcgtctgtcacacccaacggaagaatcccacaagtcggtccaaggataccatgatcaatcgggatctcatgttcaccctagacggcccaaatagatgcgcggtgagaaaggatatagagttgaactcgatagaaaaagcaatttgaagaaggacgaacagcatcgagacaccaggcgacctcgtcgtcgcttacgacccagactttgtctcgttcggtgcgtaacttgtgaagataatgaagggtatggatcgtttgatccaatctgccagtaagacctccaaagaggatgatatccaactatacacaaaacgaaaggcggaagttagagtaagttatgtgatgggctgctgagaagaaggagaagaagggaatatgctcacattggcagagatggccttttcgtgagcttgaatggaagagatacatttcatgagatctgtcgaatattgatccggatcttcaacgactcgaacgccctgcgcagttgttaagagatgatcggatgagcaagaagagtaacgtatagagggaatgagagagaagaagaacatacggcttgttcgtaccatgaacggacgtctgatcggagagagtcgagatctcctttgatcaagtcaggaagaaacctgagggaagaagggagaaggataagaatcagttgaacgaaacatggttgatgagacgaatggacacctcactcactggcgtctttccttgtcggaatcaaaaaagtcgtacagccggtttgctcctccgtccgcacaatatcgaatctgacctgtgagaagaaggaggaagatctagaaatgatggtgagtcaagagatttggacaggactcaaccctaccgagttgactatgacttactcacatgatcgccatactctgtagaagatctctggctttgttatcggcagatttagaacgatgagtgccttggaggattctgtacttgagtttgaggctgctgagagaaagctcgaggtattccagatggtcggcatggtgggtgaagggaatgtttggtgtagtgtgtggtcagaaagtgtaatgagagataggggatgtattaggaagtgtgtgataaaaagatgtattagggaatgtgcactacaaaga

SEQ ID NO: 1938 - DNA, 1620 bp, Xanthophyllomyces dendrorhous
gaagactacaaagccgactgtaaattcgattaggtggttgactacaagaccaactagagaagtgactaggcgatgtactagacaagtgaataggcaaacgactacacaagtgactatacaaatgactatacaaatgactaggcaaatgactaggcgaacacaaaaggaccgagacaagaaaaacatctgcctcataacatttggccttctttctcttctcttcccatcagccatcacccttctgaacgctttacgatccgatccaccacacatactctctatctcaaatcaacaccatcatgctttccatcagatcactcgccaacaagacttccagaggacctaccatgcttaccagacacgtctcagtctgggcaaacgtcaaggccggtcctcccgatcccatccttggtacgtttctccttggcgttctccctctgcctttcgctctgtcacagtctgctctgcatctcaatcgtactgaatgattctcttccgtcctcttgtccttttgttccttcacaggtgtctccgaagccttcaaggccgacacgagctcaaagaaaatcaaccttggtgtcggtaagtgtactcttttttaaatcgtcgcttaaacgtccgattactcggaccgatcgaacgtttcagccgagactgctcttctcatcttctttctccgacgattctatgtttatctgttctatcaaaccagtcgctgatggctgatgatgttctctttctgatccattctgctctcttaggtgcttacgttcgtagaacatcttttcggatatcatgatacgtttgatctcagctcgggtatcatcgctaacctacacgagattcaatttcatctcgcgtgctctttcttttcctcatcccatccgaccttcatcggataaaaccggttagcgagacgccaacggaaagccttacgtcttgccttctgtcctcaaggtaagcatgcccccgttgcttatctccggaaaatcatgctcatccttcgataatttgctgtctcactattcatcgccacacaaggccgaggaggtcatctacaacggcaagcatgacaaggaatacctacccatcaccggtctagggtcagcagctttgtttccttccaagcatctcagcaagcaatcctaaacacatatctccttggtcgtatatacagagactttactaagcttgccgccaaactagcctacggtgctgactctgcccctctgaaggagaaccgagtgggtccttttttcggaacatactcaccatctcggaccttgatgctgacactcaagctcacattagattgctatcactcaatctatctctggaaccggagcactccgaatcggaaccgccttccttgcccgacattacccaggagctaagcagatctacttgcctactcccacctgtgagctcttttcgcgaatctttccggctatctgcagctcgtgcccatactgattcactgtatgctatgttcgacacacaaaagggggaaaccatatcccgatttccaaagatgctggtctcgaggtcaagcagtactcttactttgacaaggacactgtcggactagacttccagggtatggtcagagacatcgaggcc

SEQ ID NO: 1939 - DNA, 8191 bp, Xanthophyllomyces dendrorhous
tgtgtgtgtgtgtgtgtgtgtgtgtgtgtgtgtgtgtgtgttctcttcaaagcgagtggactgtgcaaagatttgaggcgacattcatttgatttaatacttttcctgttgacctcgtcggcctgcttctgtggatgagtgtgggcgatcggactgatccaagtctcgatctgcatctggatcgtcatcggcgaatctacctccttcctcggcagcttcaaactctccatgcgcgaacccattcgacgctctgtttgtttctcggtctccgagttcatgctcatggtcctgctcgtgctcgtggtccagaggactcagcaaatccaccaggtctctctcttcttcatccatctcaatctcccacatcgttagtcccttccggtccttcaggccttgaccttcctcgcctccaggtcctcgtacccaaaattctgggaactccttctcgatcacagccctgatccgggattttgtgagatctccaaactgatcctgccagtccatcaagatcctgacggtctcccaggtcgggctaggcgcttttggtgaacccaagttccgtttcatctcgatcgtcagctcgtccaacgcttgttctggccagccggttcggagcagggatgtcaggtaagaatgatagttagagagtgtgagtgggaacgagccggatcggagccatttgaatagatgatgagcggcgaaggcggtggagtgaagtcctatactatcaaacatctgatgggttgacaaacagatgaatgtaaggtcagtttcaaagctcaacataaggatgtggagaagagagaaaatacaaaggacaagacacgagctgagaaagaggatacggacgatcgagacagaagcgttattggcggccaaattcggatcctcagtctccgaaatctctaaccacatcgagtaggtttctttgagaccacctgttcggcaggtcgcattcatcatcgagtttactaacaaggtgtccatctgatgatgagaattcgagacacatagaaagagagtttgcagttgtcagatcgagagccgggtgtttcataagacaaaggagaaatcacgaacaggaatgaacggatcgagtcgacaccaagcaattaacatgtccacatgataccttatatccttcataattttctcgttgttttccctttgggaggacagacctccggagtaagctagtttggcatagtatgaaagcgcggtgacaacgatgggatgacttgcttcgatcccttgtcgtctcatgtcatgaatcatctcaaacagatatctcggactcggagttagacttttttcgtactgagagaacaaaaaggtctgaacgatcgtcaggtaagcttcctcgctcgctcccaaagctggtggatgaagcttgtaaaatcggtcgtacaccgaaaaagcatatttgtgtgtacgagagaacgacatgtaggtttggatgtgagcgagtgtggtcggcgtatcgaaatgaacatttcggatcttcatgtcttgcagtagcttccaagcgaaatcatgattctttattgtcggcgaccgagagattccaaggagaagagcatcgtacaactcgaccgacggtccatcacacgccggtgcctttgcgcgttcggtcacgacggatggttgagttgatcgctcgcgcttctcctccgctcgaaggaaatcaccataaaggtccatcgccatggggacgtctgggtcttgctccgggttgagacagtatgctttaatgagtggtagaactgtctcggccgtcggtagttctcctctgttcagtcctgcctgataatctgccaaagcgatctctctttcggccaccgtcaacgtctttatccttccgtctctgtatgtcttgttttcgtaagggttgatcattatcacatttgaatctcctgaacgaaaaagatccatcgcttggccaagcacatcctgagcattatgacgacggaacagctggttgaccgggtgagagagaggacggtctaactgattgggtttcgtcagccagatggacagtgaacggactgaacggctactgctgccggggacaaggtgcgaacgagagcgagagaatggttgagcgattcgctgagcaagagcggttggagatggtctcatagtgtataggtacagataatcaagagataggttgatcgttccttcggatcgaaatgatttaagaagaaagaccagaagttgtcaatatctaaatattgacgatcagccgattggatggcgtggatccaactcactgaggatgaaaccttgaagagtgaatattatttctacaagaccttcctgaggactcttttggttgatggcaactgagtgtttggatacaactgatacagaatgtacaaagcaaggtgatcgtgggggtgaatgagatggacgagacggacgagatggacgagatcgattagacggtgttgacttccgaccgatttctcactaatctagttacgaagaaattacaacgatggtcgtcttttttcttctcttatagtctccttcctctcgtccgtcagcctctcttgccgtaggatgatgagcgctttgtttcgtttgtcgtctgtatgtacactatgctcttgctatcgatgatgtgctgttcagaaaggaagcaaacgatgtgcagatatcgatagtcagactagggtcctagtcattttcaaatcttttgtagtactcgtgtagtcgacctacaacggattttcctaataaaacaccttactacactttcgtactacgacttcctaatgagcccattacgcaggtctctaatgaaacttgtccaatagaacgtcctagtacacttactacaaaccttctctaatcatttcagtgctcgtcttttcgtgggttccatccaacagacatccaacagatcaccatacacactcatcccatccactcactcactcgtttagacagaccaccttctttgatcgtcgtgtctcgtgctggcatataagtagcctcaaggacggctcagataacgctgttagtttcatatcttttttgttgttgtccatgttttcccttcatattcctgccgtcgttgtcgtcagtggccatcatctgtcgaaaggaacatgtactacagctcttccagctttttctcgtttcccttttggtttctttgctcttttgtgctcgttcctcacatcccttctgctcgctattgtccttcctatctgtgctacctgtcttagtccctggtcggcgaacccgttgatatctttctgatcgctttattcactttcgatacgcatactgctctccttttctagacaactctcatcagaccaccgcctgctccgcttcaatcgctccctcggacctcttcttcttcttgacaaaaggctgccatggccaaaaagaagaaaagtgcgttgcccgcagttaacagagggttcgccacgtcgtccgtacccaaaaaggtccttccacccgcaccggtcgagccaccggtcgagggtctctcgcagaccatcgataatcccaacggaacagaccaaaacgcaacatccgcaacccacaaggatggaaagattggaccggagggaaagcccaagggcgatggcgaggaagactgggaaaaggaggagagttacttgcaaagcttggtcgaaaagctacaggaaaaggtagagaaggaagtcgctagaaccattaaagtgagcgttctcttccaagcacatgccttcctccagtgtccgtgctgtcctcttctttctgatcactgaactttcttgtcgccgttcttgtcaaacagaccatagatttcgagaaacgtcaggcaaaatcctacccacaatttgtcattccagaatccattcaggaacgcgctctcgacttggcaaccaagatggaccaagccaaccagagtaagccttttgttgaaactggattggatttcgtttgtaccgagctgattttcagactgctcttcctaacctttccccaagatcaacaaacccttctggacgcgaccaccgatatagaaaagattctgctccgactggcgatcactcatggtgttctcacaaaaattgggtttcagcccgagagaatcgaagagtgcctcaaggcgctatcaaactgggatttagacgaagctttcgactgggtcagtagataccgttaatcctatgccttgtctacatgtccagaaggctgatcgtactttcgagttttctcttctctcttgttagctgtatctccattgcagcgaagacgagcttctacaagagggtgacttcgccccaaaagcttgtgcgttctatcgctttcctctatttgatagtctatgtgcccctttctttgaggctgactcaacctttggtaattttcactttgtagctgcctcaatgcccgcaactccattccagcttccttctcgaccagcttccccagttggtcataaatcggttggcccatctgtgcctctgacgcctgtttctgaaacgcttccgtcaactcccgccgaagaaatccctcctccactatctcaagtctctgtgccatcttcgactactgccattgctcctgctccggtagaacccaccaaatcactattcgcgccggcagatcaagagggcgatgatgatacgtctgaagaagacgaaagcgtcatgccgagtctagagtatgccaagcttcggatgaagctagatgagctcatcggcgtgcctgttgggactaaccttaagaatgggaagccagcaaagggaaacaaaaagggccagacaaagaacaaattagttgcaggaaagaacgaaccgccagaggctgtaagcgtgagaaagaagatggaggtcgtgaaggcaatgtatctttggaacaaagatgatgctggtaggtggccatatagtattacgtacccgcccgccgatctttgcttgctgacagatctggtttgcttgactttgcttgcggtttaatcatcagaaactgaatacaaacatcttcgaaccaaggctgacgccaaagcgctcgaagatcgtctcaaaggcaaggtctccagcccgaacgcaacgaccaatggggactcacattctgcggcgtctccgatttcttcagagaacgattcgaacgtgggcgcggctgtgactgaaggcagtaagaaggctggggatttattaaatggtcttggggacaaggcggatgatggaatgatcgatgggctgggtggagtaagcattgttttctctttcatcggctgagctggggatatgtgttgacttgtcctctctttctctttctattactctttccctttcaaattaattctagctttttgaacaaatggccgccgagccctcagcaacggttcctgccgctgatgccaacgtgatatctcgagcgatgcctcttcctaaacacttcacctctgccaccggtacgcccaagaccatcctacagactctagccgtcaaacttgaccggttctgtctcgtcgactatgctaccttgtccaattcgttccacgcttgtcgggcgtcgctcaagatccgttggaaatcgggacgagaacaacaatgggcgatgacggatgtcggttgccattccatacaggaagcagagaattttgtggcgacgatggcgttgttcgagttgacagtcgtcgagtccaaaggcgagaaaggattgtggaggacgttaccggccgcgtacaaggatttctgggatgaactcgacggaaagaggaaggaagaagttgatagagaacgaagagtgacatgggggatgttgagagccatattggattcgagactcgctccaccaatcagctcagagaccgaaaacgaagtcaaggtgcgtcatgtttttctctctcctcaagatcgatttatggaccacttactgatacttgtccttcacaaccgttaattcgacttaattcctctagcccaccaacaaatcatctgttgggcttattcccggcttcgagtttttaccacccccgccaccgctttcaaatttggcaaccggcgcattctattctggtcagatccaagcggactttcagcgaagagtcgatagtccgaattatcaacagatgcttgtaagtttttccttcttttcaaggcgttgagcgaaagaatacgccgagaggctgacgacattgtcggcgttatgattgaatatatctcagaaacaaagagcgaacctgccgatagcttcttttagagagactatcgtctccacactagaatcatctcaagtgcttgtcttgagtggtgaaaccggatggtacgatcatttatccgtctcttgcttgatcttcgtgacttcaactgaaaaagccatcatctcttcgccgctcttttcataaacaaaaagtggaaaatcaactcagttgccttcctttttattagaagatcaactctccagaggtcaaaattgtcgaatatttgtcaccgagcccagacgaatctctgccatttcgctcgctcagagagtatcgcaagaacttggagattttcctaatcaggtcgggttaatgtcgtcccttgttggttattctatccgtttggagagctgtacatcgaaaaatactgtgagacgttcaagttcatttgactttcaattcgtcgaattgcttctagttgactagacagagttgtcatcagactgaccatctttcttggtcttgtttgtgatcggatttgtggtttagcgtttgacattcgtgacgaacggaattgcgcttcgaatgttggagggcggaagcgctagcggaggtgggaagggaactgcgtttgatgagatcacggttagctttctcatcactgttcaggatttctttgatccgtaaagttgataaggaatgtcatttgcttttgttttcacaccgcgttctcttagcatatcatcgtagatgaggtccacgagaggtccatagaatgtaagaaatctcctcaactgatttccgtcctttcactttatttattgacttcgtggttttttttcctctatacgaactcatctttgtagccgactttctgctcattgttctcaagacacttcttgaacaacgtaaagatctcaaggtggttctgatgagtgccacagtggacgccgaaaagatttctgcattcttcggtggttgtccgacactttccgtaccgggaaggacgttcccggtgaccacgcaattcctggaagatgcgatccagtattcgaagtggttcattaatggagattccccttacgccagacgatgtatgtcctctcttgtttgccatctcttgactcgacaggctacacttcgcaccttcagactcaactgactgatcctacaatttgatctatgtgccagatggaaaataccaaaagggcagacctgtcaagttggattggaatgaagacgccatggtctctagagatgcggacgatgacgatgatgaccaacagaagaaggaggatgctgcgccagtcaaattggagaagaaatatgaggcaaaatgcgtgtcgacagtgaatatcttggatgatcggttgattccttacgatttggtaggtccatcttatcatgtttgaatcgtctaccaacaggcattttttgttttactgatagtgtgacgaatcgatgggtggcttagatcgttcgactattggagaaattatgtttcgaagacccggctagctttcagttctcggcttcgatattgattttcatgcccggactgtatgaatcttctttttgcatgtcttgtttttttctgtttgctcctatctgactgcttcaattacaaaatttttcgtggttgcttcatgcaaacaacagtaatgaaattcgtcggctcaatgacctcttacaggaacactcggcatttggaacacaagactttatgatcttccctctccattccaggttcgtaactctatcgaaatttcacacatctccttttcaaccgatgaatatttgttcattctctactcctttttgattcgcccttgtatagtgtgtcttctgaaggacaaagtgcggtgttcaactatccaccgcctggggttcgtaagattgtgatttctacgaacatcgccgaaacaggtgttaccatcccagatgtaagataaattgctccgctccgatgatacgttcctagaaccgtacgtttgctgatgcctttgtatccttcctttcgcatgaattatagtg

SEQ ID NO: 1940 - DNA, 14008 bp, Xanthophyllomyces dendrorhous
gatcatatgggtctgaataacacatcgattggcacaggcactccaaaaagctctatgcttgggaaactggaccagtagatgaccgagccttaatcttgatgtgtggtgatactgaattcaaggtacgtgttcttcaaaccagcttcatacttccttgtcgcgcgactggggctgacgtttcttctggtttctttcgtattcttagctggcatcaaacctccttcaacttgacaagaagctcaaacttcagttacatccaaagaccatgttggctctcaagtttttgcgacaacaacttagttcgatcataagtgttcgaatgagagctagggagatgacggctgaacaagaatcagtctgggacttggctgtcgaactgttgggtaaagaaaaggatccagagggcgaaggggtcgttagtttgtaataggagctcgagaaatcgaatgtagtttttttgttcaaaattttctcctgagcatccttgcgagcatttctaccatcgtgcgcgcgatttatgggatgacaaacattgaagaacaagaatacagaaaacaaaggtctatagagacgagatctatcagacgaccaaagatctatgtggattgcgtttaaagatacttttgaatagtaggctccaagacgtccttcatggatggaaatgggtaatacgttcgcaaatagttgacaaaagatgaacacgggtttgtcatttggacgaacatgcaactttgataaggaagagacaacacatacggtagtggtagatcgatcaaagtactcgacgacgtttccctccttgtcgaccaagaacttatctacatgtaccaaagttgagatttcgagttaggtatcagctcagtataggcgcgaggtaagaggataagaaatagcagacgaaccgaagttccaagagatgttctcaacagccttcttctccttgagatacttgtagacgtcattagtctctggcccgttaacgttcgacttggagacgatggctacataagaattgatcatgttgatgagagtaaatcagccctaggttcaaacgatcgaaggggcatgagatggaaagaagatccgagagagtacatacggaacgagacgccgtagttgagctcactaaggtcagcaaatgataatgagacaagagttttggctaagcgtgttataatgatattgatttgtaggcgaatgcgacaagagaactgaccagaactgagcgatctcgtcgtccgttccaggctcttgctcctgtacaatcgtgatatatcaagcacgtcagactggcttactcaagcgtcatcaaagaagccatttttctgtgtgggtaaaagaaacgaagtgggtgcaacagaccttgaattggttggacgggaaaccgatgagctcgagtccttggtcgtgatactttgtgtaaagctcctggagaaccttgtactggggggtctttctgttgagcgtgaagaagaagatgtcggataaagccggtctctgttagcgatggggagtcaaagcagaacacatgtgaaactggaattctacatacccactacaaccatgaaaaagttcagaacgttcatcatggagtacacaccagtcagaaataaagaagagaagagtttattcagagatcgtctaatgatagacgcaccacttggaagcgacgttgacgatgaggatggtctttcccttgaattgatcgaacgagagcgcctttcccttccgaagagtggtctgtacacagtataagatacagaacagtcagaacggcgttcaccagtgtccatacaatccgccagatcttacggtgagagcgtagaaagaagacatgatgtaagaaatggatcagagttgctgatggtgattgtgatggttgaagattaacaaataaagatcaagcgacgagcgaaagacagccgtaaccctaaccacatggaatttgagaatcctcttcttacccgtacatcatcatcagcagtcgaccaagatacaaccatcaaacaaggcaaaggcagcaatgaacacgcttctctatcagtatgcagccctgcagccagtgtcccacttggtcctactaccgcctttggatcttgctagaagtcaggacgagttgattagactacttcttctgaatcagacgttgatcaagtatccgcccgctagaaactatagacgatcgttctggaagcgcttggttggagtcctggagagcgcggtcagcctaccagaagcagaagaggaagaactggttcgttatgattctgatcttgtataaaatcctgggaggaacctcactgacttatcggctgttgataggaagtcgacgaggcaatctatgacgcttacctgctggccatacagccagacgacagtgatcctatgcaagtttctgtttcttcaacttctttcagaaaactcaagtgtcgctcttctaactattgtgtttaatttggtgtcttgtaaaaaaccggccgccaccttcctctcacttcctgacctggattcagagcacagtcttctttttctccgcctggtcaatcctacaagactttctacttcccgtctccctcctcgcctggtttatccagcgcacctccgtcgacaaatcctagtatagtttcggacacatcaatcacactcaaagaagagcagaagactattcaagcaggaactaccggtctacgcacatggggtgcctctctccggctagctgagctcatcctgtcgaaacctgaactattacctgatacatcagacggtcgagcaacaggtgtgttggagcttggtgctggagttggctttttgggaatacttgtgggaatgttgatgaaatcaagaggagggaaagggaaggtcgcgctgacagatctcgatccgagagtcctacagtcccttgaagataacgtagcattaagtgaggactatatccgtctatgacaagtgatcagtgaggggcttcctgtcattgacccttgtttctatcatttcgttcctcaagatggactgagctcggagattgcggtcgagcgactagactgggacgatatcttgtcacccaacaagacagatagagacgatgtcacaagcctagtcgatagaatagaccccggacttgtcatcgctgccgacgttgttcgttctttcttctcttttcctatctctcttcctgaaggcaaaaccaccaaccatcttgatcttttccttttgagtgaaggtttacgacccgtccatcatccctcctctcatagctaccctaagccatctacttcaacctcgcagccattctcaacctcaaatgcaaacacgtatcaatgaaccgacgccagctccgccttttgagaagaaagtagcagctataattgcttccactgtacggaacgaaaacacattcgacctgttcatcaaagctgctcgttagtatatgtctcttttgtgttctttctctttcgttccaatcggttcacgactctccctttaacatttaattctctctttcttatgattcccgcacgacaatcaaacctacctggataccccccccaaaaaaaaaaccacgatatctaggagaagcaaatctccgtccaacatctatcgatatttcgtctctcagacctatcttctggggctgtggcgaaggtggaggatcgactgattcggctgacgttaggattgttcgttttgaatacgatccatgactgtgtctatgctaagactctctcttgttgtcttgagaagtatggaagggataccgttgaggaatgtataatgctgaagcatcatctacataacagcaacatgattgaaagtatacaaggaaacaaaggacgaagatagatagactgaaacaaaatagagccatacaacttgggggaaaaacttgtgaaggggtatgtagagagtatcttatatgtctaatcctctctccttcgccacagcaagtctttgtcaagattatacgaacccaactcagtcgtatactcaagggaccatcaacacgaaattgagaagactcacaactgttccaaccgatccgtcaatttaggaacttccaaaagtttttgttccaaagcttgtttctcatcttggagcgctagtcgagctcctgcatcaaggggcgcaaagacgtatcccccctgaccgtctttttttttaatttaaatacgatatttaatagcgacagcaaacttacgagtcaggaatccgtcttctcttgcttttcatctgaatgttctagagggaggaaaagaaaggtggttgatgtgcttaccatactgatgcatccatcatgtacacccatcccaacaaggagttagacaagccacacaaatcactttctatttacgtatcacgagttcgagctcacctgtagaattgtcgaatgatacttccataaagatggtcgatgggacacagctacccattccatccgataagatatcgtcaagtcacatcactgggatcgaaattgctaagcgatccgagaaaacttactgagcatggttattcccagtgcggttgcatgatcatatcttatagaaacattgatacacatgatatatgttagtccggagtactcatgctaggtgaatagtgtgtagaagaatattgatccaaatgaatatcagaaaagacgtacatcttcttctcgacatcgagggttacaccagaagtgcattcatccagaatagcatacttcacacacatcgtttgatttgtttgaatgagatctcatactcaatttgattaaattgcttgacagattgctgcagcatggcttacctttggtgagtgatagaacagtcgagcagcagcgatccgttgcttgtcgcctccacctagttagccgacaagcaaaagtagatcagtcagaaagaagactatctggaagcgttttgaatatataattgtagctcacttagagcattggcccagtctttctgtgtctcccacccgccttctcggtcgaccaaggtattcaagtcgacagcttgaagacaatcgcgaagatcatcatctgtcttccctcctgagagaatcaaaccccgtcaaaccacctattcagtctactgtttggcccacacaacctcttcttataagaggaaccatggaacatacgactagccattttttctagagtatcagggtaaatgatctgatcccgaagggtaccgagcgataggtaaggtctttgagggatgtatgtgaagtcccttcccggcggtttatgcaccgtcccacctgagatgtgatcgttgagttcaatcatcatttagataaggcccataactaaagttggttcaaagtacggaattgatacactcaccaagtacaggccctgagggattcaacaacagtagtgggacataacttagaaaacacaaaggagaatattaaatcgaagatcagaagagaactcacagagacctccaaggatccggaacatggatgattttccacaacctgaacgatatttcaagccaatgattagttcagaccccttgcgatccactcataacatggtgtgacttctgtcatggcgcttaccgttaggaccaacctattagaaaattcattgaggattacagagtagagatatatcagttcaaagaacacatgaccaagagagcagtccatcgattcgttgagacataactcacgatcaagagatgtttctttatgtatataaccaaatacgaggatagagttggtacaggcatcatgtaatcgatcaccgattcaacggagaggcgtgaagaagcatctcaaacttactcctcgcttgacgacaaagctcatctccttgaccaagatgtctccattaggcgatacgattgggaccttgtcgaactcaatttcttcactttcgatgacattaccaaccccttgaagcactgaggtcattgtgggcgcacatggtcaggttatatgcccagaaaatgaaggatcagcctagattgagctagttcgcggatgtacagataggacaatcaaacctttagcgtttctctcggtggatgcactgctgaccaacttcttctcatatttgccttgcgcgacatcctcgatggttgaaaacagatcagaaactcgagcggtatagcctgagagctcggccaattccttaaagatggtttgcggtagaagctgattagcggtggttccacaaatatttctgacctcgttagacaatgcgagactgaccttgtaagagtacatgacccggccgacagcatcacttgatgacagaagaagccgtcggtttgttacaaagctttcggtccgtgagcctatggaacgtagtcagagtgacaatcgatgatccaaagtgagaagagtaagttttcagctgaagcaagcggtcacgatatggtaagaccgaacgtctcacctaaatctgatgcagttataccaggaagaggaatgaagacaggaatcgcgctgttgattaccaggaatgattagatacccgaacaatacgtaacatacgaaagagataccaggtgacgctcaccagacgagtagctaaacggcagagcatcaaatcaaaagtgtacgagttaatttaattctcgcttcaagcggatggatattttcttactccaaaggaaccccaaagccatttcacaatcccctcctccaccatcaagtgtccgcccttaattcggacaacttcgttcatgtgtttgatcaacgcataatatgatcgctcgattgttgatttctcgatttcctctccttgaaggagcgcaatctcttcggcgtgagatatcaaacgagaatgagtgaagcgaagctcgcctgaaagttagatgatacataggtggtcagtccaagttcagtcagagcagagtttgaaagaagacaactgaccttctagccgcgctgtgagtgctgtaaactgcccaaacgcaggagtgattgctttgactatgataatcagaaatcgatgtacgtgtcaatttacgcagaagaactgtatttccgcgaattcaaaaggctgattgctttggatcacttacgaagggcaccgcttccttgaattagtagcgtaaggatcaccattccttctgccccgacgtttcttgataattggtagttaaacaggattacgtctaagatcggctttgctatgctcgaataaagtgaggcaaggtggtgcgagaagttctgaatgtcctgagtaatcaattgatcgggactgaaagaggaaacgttggtaaagtttgtgctttcgcgttcaatcaagatgtaagtaacgctgtacacactttctaattctgtcatccaagttggctgacagtaatagtaatcaggtgtcaatatcgtagcattagcctacttgatggtcaggagaagccttacatagtttgtaaaacacctgttcgtagcttccatcttcttccccaagatacatccctagcaccttctgggtcagcttcgtcctgtatgtaatctctagctttgattggagatattccttgaagaatgacggaacatgaacgctatgatgagtacctgatgttcctaaaagacaaaataagagagggacgaacaagcatggagttggcgtatgttgcaggtatggcaatcaagatccattttgccaagtttttcaaaaacaggccggactgagctcggactaaggagctcacgatcctgttattgtcatcaaatattgtgtgtcagcgagtattctcatagagacatgcgagtacgggagtgatatatagaaagggacgaaacaaaccttccatccagatcggctacatatagtgagagtagagtgcggaagaccagaaaggcagaatgtatcgctagaaggcccgcctctctggacttccaagacgggatgacgatgcgaagcagggttcttaacttggagtaaaacaatgcatcgacctatgatcgtataagaggatgaatcgtatggtatcaattgaccgatgggagattagcgagaaggacgatcggagctgtaaaggacgatagcagtaacagctggacgaacctctactctaggcttagatcccactttaccgtgggatctttccttctttccacctagtcgaacggttgaagacggtctgatggcagacttccagaaggaggaacatgcataaatgacgaaagatgcagtaagggccttttggatagtcggacgatgtctgtgaacgaacaggaagcatgccatcgatgaacacacagccagatcgtgttagagagcaaacggagagacggcgaaacaagagtgtaactgacgatatgtatgctttagagaaacgctgaatctccgtagctgtactcatagagtagagctgctgtgtatgtgtgagttagcgagatgaaggacccaacgataaagtgctagctgatgtcgtcgtgtaagagtcgagacgatagatcagagaatgcaagcgttgaacgcggcaggaagctggtccgggaaggatacagccgggttagcggacacagctttattgtttcacgtggatgattccgccacattactccgcacgtcatccatcaacttcgaccatcgacctcatcctcgacacccagtacgatctcattccatccatcatgccggtctattggttctgccacgctgtcggtattattcagttcatgtgtgtttgttatcagagctgatagagagtcgtgttttctatgataatcggtagtgtgaaaaccagattctccaaccaagaaactctgttcgtaggccatatgccagcttacccagatcgggtggtcatctgtcgttatgatctgaatctgatagcctgatcgttgcatcctcatcttgatcaagtctgatggcgttcaggaatgtccaaactgctcgagtgatttccttgaagccgtgcgtttcagctctcgaatgaatctcatctattcagatattcgatatacttactgacctttatggaccgaaacaggtcgaagcagaagatgaacatgaagatgagcctcaattgataccgatagaatctcaagagctcgacttgtccgtcttatccttcccttgtcttcctcattccttccgtctagatctaatatgacgatcattcacactacacagagacataccaggcgctttcccccagttgactccttcaccctccacctcttccgtacctagccgtacacgaacacctgacgacactcgaactctgatctctgctcttaccaatcccacctcagaattcaactcacagccttctacgaggcgtcgtagagaagcttcagggccaattttcaggattggtctcgggggaggaagtataacaattggtggagacggaggagcaggttcagccaactcgggtaggaggagtgggctcggtgcgcgtatagggactgacggattgaataccagttacacagagggtgtccccagtttggctgagtaagttctttcatgaattgtaatctctgcaatactcgcagctgatttcgatgacatttcgacaggttcctcaataatagatttagtcctacgcgggaaaggccatctcgaggatcttcttcggaccccttccttccttacgccaccaccagggctgttcacccaaatcatccttcgtcagctgcaaacaatccgcaaagcatctttgaggttgtaagtttcaatatcctcactattgctcgcgtcatctccgccggaaacatgaaaggtgtgaatttatcaaatttgttaatcatttgttgttctacagatgtcagatttattagatgcaataggagctcatccagatccagacggagcagagaatgacccctttcaacaaatcatgcgctcccgaggaggtttaggggctatcttcgggacgagctccggaggcatgtttggagactatgcaaccagccaagaaggttcgcatcagcgtcttccatcgttcgaacgtagtttcagtcaagtcgctcataacgacacacttgataaatctttattgaaacagctttcgatcgaatcatcactcaactggcttccagcgcggactccactcaccgacctatacccgcttcaaaatctcagatcaatgaccttcccgtcatcccaatttcttctatttacctgggtaggttttccggaaatcataatcactaactgtacttgaaaaagaaattttggctgatgcgcaaggttttattcatcgtcgtatacgtgcttttgatagatgggatggacgacaaaaattgcactatatgtatgagcgctttcgagcctggcgaagaaggcaagaagttgccttgtacacatctgtttcactcgaattgcatttctacatggctcgtacgtccgctttttgcatcctttatgatcctttatgaccggtaggatgtcgcgcttatattcttgtcacatccatcatcatatatttttctccttcgtttcccgacactctcctctctacttgtacgattaaaaaaccacaaaggaaactaatgggacgtgtccgatctgtcggtactccctaatctcttcttcgtcgtctggaacaacctcgcgtccacttcccaccccacgtttatcctctacagctcatgtacagaacgcaccattgaattcttctacaaatcacagttctgtttcttattcccaagcatcatcaccatctgaatgtctctcacagccatttccatcttcgaatatgtcgccttccggactatcgacttctatcgaattaagtcgaccggtgcaaccttcagggtcagatgcggtcattgtagttcagtctgaaggcaatgagaggaccagtgggagcaggagtgggttcagaaagagcggagcggcaagtgggacgtccgctgtcgaccgcgagagaggctgattacctgggcataggctcatatgagaaaagagtgagagtccttatttcaaacagttgtcttgagcttcatctgtatgccatcgatttgttcagatcatactacatcaagtatactttacatcagacaaaacactgatacaacagaactatatggcacggtataacttgacatagtcgagagatggttttatactaaaaagaggataccggaaaaactaacattaaatgaggatataaaaaagaggcaaacacataacaagataacacttgagagagaaaaaattgctaagcttaacatggggtttctagaaagaaaaactatctgttcctcgtctccgtccacctcccaaaagacctattaacgccgtcgacgagaacaacccaacgctttgtacacctcaaaccaaaattgtatcagtctcttggtgacaaggagactcaagaccgtaacagaagagaatagtaagaggttacgaacgtcataccgaccgcgatctggataatctggcctgcagcttcgaatgcatcggtgtaatactttgcggacgtccctgctgttgaatccctaacgtatgcaagcagacctccattggtcaatccagaagctgccaagggagggaatgtgatttgaaaagataataatgtcagattatagatcgaagagacaagaacatctgaggtttggcaagagagacttgcgtagttggaagaggacaccaacaacctacgatagcacgaatagcaagtaaatcatgaggtttaacaacgaaaatgagcgagagaaacaaggaaacgcatggaagggggttgactgaccatgagtacaaaagcggagtgcttcatcgttttgctcaagattccccctataattccacaggtaaaacttccgatagcctattgtctccaacgtcgtcaaaaatcatcagtcaagaggtccttatatgagaatttgagtggctgtaaaagagacacaaacagaggtgatgtccggtcggttgataaatgttttcccagagaagtatgaagccgcaaatccagagcaggcaacgaccaccatgtagattgtatcccattgaaacagaggctgtttatttcgaacgcacgcgcatactaggtatgagggcaccaacaaaaaatctggttggtatcaatacgggcaaaagatgttgagtcaacgcttttgcacatgttagatggaatacatataccaaaatcgagacactcacaaaaccaaggactctacagattcaacacagaactcatcaggaaggcagtcgaagaacaaaactttaggctttgactcacgatacttgctctccaccagggagcgttcgttcgcaacgctgtacattgatagtcactcgatcctcgaacagccagccccgtcaaacgaatgtagaactccataccgacactgtcagatatctctatcagcctttatataaatttgaagacaacgtgagatttagttgaaatactaacgctaggccaaaagaaaggaatatagcatagagcacggagaacaccaaacgaacagcgcccgaagtgattcttctatttgccagctctacaaaaaaagaaacaagaaaaaagtcgctgagtcaatacaacacaagatacttcaggaagggatccgcgcgcaccaagacttccacaactaagaatatataacccatagtttggatcagtgaaaagtttgaaggctgattttgcaacagatcttcatttgtccaaatgcttacaggacaaagtatccaggtagaatgaagacgatagagccagcaatcaccgaaggaaaacacacaacgccactagaactgatagcagccgctatgaaagagttgatacaggccatgataatcctgaacaaagacacgcatctaagtatttgctgtctgatgtatcaaaaggcagtataacgcggtataaagcagagactaactcgaatagactcatgtagatatcgtttttgctgattgacatctggaccagtaccagaagtactccgagaggaaaagcggccaggcaatcctataagatatcgtttcaggtagacaaacgcaatttcaggaatatagccaggcaaacatggatgtaatcatcgctaaaaacgcttacaatgagagatccataaaatccgataggttgtactatagcggagcacagcccacctatgagtagttgatgccaaagtttgtaaattggctcggaggtcatcaggctatcaatcaaagctgatgcttcttgaggtcccatcttatcatgaacaacctgaaaaccaaagtaagtatacgagtagcaacccaaattatagtcagcgtcgaaaaaagagagctggggtcaattagatgacatacctgccaataaatcttatgggtcagtgtcagatttcctaaatcaagtccgtgatcttgcttgagaaactgccttcgatatatcagcaatcataaaatcacctgagtatagaatttacactataaacttactctagtttcggatgtgcgtgttgttgaatcaaggaatgaaacaactatagttcccggaagatgaaatgtctggcattctatatctaacactctagccgttgcttgtatttgagcttccagtcgacttccaaaagaaagaaagagcgttcgccatcagtaaaactcacgctactgcaagctccttgtgaactacttactggctagccgaaccaaataacatgagcgctcgagcgagtttaagtataaactcttgacgagataatatatctgcaacatgctgggtgatctgtttattgacaaaaggagattcaatagatagtcccgaatgcaaaactgacgctgaacccatcgtcttgcaattgatagtgagagaagacacaaacaaaaatttcgcgcttcttcttcttttgccttgccttctctcgtcgcttttgttccctctgccagatccgatcttcccacacaagtctttctcgatcaggtgtagctttggaagaagtagtttgatagcttttgttgaaaattgaatccgatgaagagtatgcttcgtcgaaagaagtgcgcgcaagtcggtaaccaggctgagaagcatccggggcgatctgtaaagaacaagtctgactagtaagctaagatgtacgacaaggtcaggagcgtaagccgtattacttcaactgattt

SEQ ID NO: 1941 - DNA, 1783 bp, Xanthophyllomyces dendrorhous
actgattttggagaggcaggggcagctaaatgggtcttgagaacacaaaattgtaccagatttgatagatcagtggtctatccgacaagatagaactatcgaactgatgagaacagacagatgtagtgacgagactgcccagtaccccggctgcattcctactgacatgttcaacatcggaactcccgactgtatcgattagatccgaaccgaatgagagtgtctttccccaggtttgctttgctgctctcatgacaatctccttcttttcatcgaggatcctgctccgcctcgatctcatcgaattcttgctcgaagtgagactagaggatctagacatagttcttcctctctcgttgagttccacatgatatggcctctcaactttcatactcttgaccgtttttgctctttttgtcctccttcgatcttctccgggcgattttaaccacattgctttcatgcggtgttccatcaagaatcgctctcttcgcgcaccctcctctctcgaaccagagctgcacgggctgcctatacttggagttgagtctcctgataaaggctgattctgtagcgacaaaagcaaagacaaaacacctgggttggatgggacataggataaggaagtcggaaaccctgaccgatggttcacggctggccgaggatatgttggtagtccatcaattgtgttatcgttgtcgcgataggctatgattcctgctttgatctgatggccaagcgaggacttcaattcagtatatggattcaaagttgaagtttggtccggccctttcagaatcagacttgatggaatcgttcttggtgagtacagatcaaggaacccggaagaatgggcctctacgagggtctcagcctgaacctcgagatgggattttctactcgtcaatttccctcctgatgggacaccagaaacgcaagatgggaccccgtctgtctcgaagacatcaatataattgtcgaccctgttcctgagactgaagaactgtccatttttcagatcgttcatcccaggagatgtatccaattgttctcgcgacaggatcgatagaggtttagagatgttactttccaaacttgctattttctccagagcaagcgaaagaacctctaaactagaggcatcgttcaaagacggagaaagaataggaatggagatgtgaggggtaccgacggcggacatagtcagtgcatcggatgtatgagacaggaacaaaggccggagtttgggcttctttgtcgatcggtcagatagtactgagctgctcatactggtgttcaagcgaggatggagaagatgaaagtgtacacctgaaaaaagaaaggtgaacgatgtcggtggcgaaagatctcgatttgagtgcgtcagatcctcagtagacagccaaatgaagtgagataattcttgcaagggccaacacgactcgaaaggtacagccaatatcagtttccagggcagacaatagatgtcaggagatacagattgccggtcccatcatcagctctatcgaaaatggcgaaggtacgagagtatacaaccgtctatacatagtagaagctgttcaaacaagtgtggttagtgtgttgtcaacgaagatagtactgagaagtccacaagaatatggaaggcatatgagcaattgatcaaaaccagcagaatgatggctgagcgccaacaggctgccaggttttcgatatgcagtctttctctcatctcggaccatgctcaaaagcctacattcaacattcaagatgtgctttatat

SEQ ID NO: 1942 - DNA, 7513 bp, Xanthophyllomyces dendrorhous
gctatgagatcagtaattgagcgcatcgctcttctttcagaggatcggatggacgtgtaactgaatcgatggacgctgatacaagcgggcctgggcgcatagtcgggccggtaaaacgtatcacgtggtctcggtcaaccgcttcgtccattcagtttctggaaagagagtatgtctttcttcacttctatctgtcttccagcttgtctattctctcttcaagttatcctttcaaaacaggtttatcctgaacttcaagtcgtctggctatacctatacgaaatcgatttgtccttcttgacacatcctttcgtttccttcgatagattcgattcgatccaatccattcagactttgtacacccatttgtctctatgacgtctccgtcttcgcttcctcacgacgatccatccttatcttcgggacaactctttccaccgggattcgacccattaaataggaggcccagtgcagatgctggctatgtatccgcccgatcgggtttgtgtctctcttatatcctcctcttcatgtccgcgtcctctcggagactcgactgattcaggacttctaaccacttctagcggacgcgttgctgtcggacatccgaccgacctcgcttggacctcaagcactgatgtttctgaatgagcttttggatgagctgctgggtactatcttgagacgatcccatggcttgagtacaggtgagttcactcccatgttgatggaaacctttttgctcgggtgtgaccgcttacattgatcgtttaatggatagaacgaatcaaaacgttggcagtgccatacattatcccccttcctctcagtcgtgaatcgatatctgaggccgagcttgagcttctgagctggacagagagcgaagagggtcgggcgtggcaagggacaaaagaaaaggtgtacgcatcggatgatgtcgatgatgttgagcaaaggtggcctctcaaggaggcgtgggatttgatgagagcgattactcaaacctactctgtgagtctttctatcggaagggtcttactttatagtactgattgagttttgtttttaatctgtctttttcgaaaaaacacgtcgactgatgtcatcaatcccttcttcatcgaatgcaatgcagacgttcggagataaacaaaagaacgacagatccattgcagcctttataaaggcaatggagagtaaaggtggagatacaagagaaggaattgttgagcccgctgcattgtacttgaccgctatcatagagtgagcgaatgatctccttgtcaaatcacctaatgttttaaacgaactcatgagctaatcacttgttataatgttttcacgaagatatatcgccgaagatgtactggcctctctgtctagggtgatggtcaatgatcctatgctgtctcaagcgagtcctaaggaactgtacgctgcattgagtcataatgaggttttatatgagatgatgaagcggctgaagagcaagttcaaatcccttttcagtacctatgttacttttcttcttaccagcttaacatgcattttttcttggctcgcggttatctttagtcaaaaagactatagaaaatcatctggcctcaaagttacgaagcgctcctgctacaagccgtaaacactcacaaaacatcgctgtttcaggatctacggaagtagttcagcacggggatccacattcatcaagtactgctgtgatcgacttgtcctcaacctctactcaatatgactcagtcaattcaacgtctacccggaaatcaactgagccggccgccagttcgagtaccagcaaactattttccaaaggatccagaccttcagttgagtataatggctccacttcgagcatcgtagggatagcaggaacttcgaaggcgagcttagggaagaagacaggtacttatatccgaggggttggcgaagacgcgataccatcaaattccagtttgagagtaagtagcggttcggccaatcaagatagtacgataaacgagggggaacaacaagcgctagcgaaacaagatcactttgacaagctcatccaaggggaaaacacgaaaaagatgactttgacgccgcacgcactactcaggagttcggtgagttttcttgttttttagctacattgattaccctttcactatcttaacgcacggaattagctgacaatgtgctcttctctgctttgcacgcggccattgttcgtattgcttgtgggctacatcaacgattttgacaaataaaggaaaacaacgtcgattaccgatcatccaagtcccgaagccctgtcagtcgaaacgggttacagcagaatcatccaagatccaacagttcaaacggaaaaggcccggtttcaccggaattacttacgattgcttctggaaagcttttggaccgcgctgaaattgacgaagaggaggtgttggaaaccgaatctggctctcgctcagctcacggacagcttccctctatacaagccaaaaccaacgaaaaactaacaaaaagctcttcacaaacatacccgtcatctgatcttattggtctatttaaccaaccttctccagtggttcttgattcaaatttttcgcaatcaagaaatgtcagcagttcccgggtgacgaacatcagttcaagtgatgttatggatcctgtcaaaggaaagaaatccggcggattgaaaagcttcgtttccaaagtcatgaagaactcttcaaaggagactcgagatcccactgtcaacgattgttcttctcccatgacagtaaagcctggtccatattcccgtacgctcaagtcggatctcaagaccagcacggaagacattagccccgagatgggccgtggtttgtctagttctccttccccggtagtggttcccaatcctacttcctccacccgtgaggaacctccctcagttctcttgacttctcgaccaactggtcaatctccctctgccgggcaaccatcaaccaatcctgttgatactctgcgaactgaacctgtaattggcggacaatcattattggtgccgaataggtccttccggttcgatagggtgccggctccttcagttctttcagatccaccttctccgctgtctacgtctgtcgctctcacaaggcctgaatacatttcggagccaatatcaccaaagaatatgatgtcaatgaacgggctgtcaaactctgagattgaatctgacgttgacctaggacgtgtgacggggcctcaaataggatcgatctcaccggaacctgccttggatcaaccctcttcgcatacagccaacttggctccttcgtccgctcaagcacacgctttccaaacctctccaacatccatccctttggttgaggttgctcaactccgggagattctaactcatgctaccactgcagacgaatgtcgattactcgttaatgcactacttggtacctggaaagtccctcatatttctgtaaatcccccctctagtggggatgaacaggcctctccgcgggagataaaggctcatatggccaatcaagtaggaaaggtttacgaatggcttttgaacggagagaaagcttcgaacctgtaaccttgagaactctagtgaggtaggctcaaggatgggggtcgagcaataaggaatttaagagtcatcgtgttttttactgctttgcctatctatcattctatactttgtcttgtcaatcgatcttgtcttatctcgttttgctgctcaggatgaaaacctcctcattcgtatatcgtgtctctgcgttcacatcaagactctgcttttactgctcttcttccatatctctatactctgcttaatatctatctcggctctttatatttgcctcgcttctgttaccaacgtctcttcgatcgatgaaggtactttttggatataaatctcaagacttgagaaaacgtgacctttagatatagattgaagatcgacgcgtaagtggacgcgtcggattttatcttgttttggatatatgtaccagcttccaactccaaacgatcttctcttcatcccggtcatcctctcaagtctgccgtctcttctagcaaaagatctgttctagacaacaagttctctctaagctagaaattcccttgagctggattccctcctcttcgttctgttctcggtgattagactcgacagatgcctcgagaggtcaatccacccagagcgtatgagtctcctatcgttccccggatacttctttctcagtcatcctcttcatcaacttcttcgaatcaggctaaaccggcacccgtagatcgagcaggggtctctgggctgagaagaggaggtccgtttggctttcataatgctgtcgtgtcgaggggttcaaccctcagaaactccatgaaacctaggttagtcggctaacacagatatcgatgtataagagtgtgttggcattgatcatacttcacacactcgaccccattccgttcgctcctctttaggccatcagcaacggatgcagttatagttgagaaatctataaggtcccctgattcagattcacgaaactcaaagttattgacacccccaagtagtcaagaagccgagggtgaagggattgatccttacattaaacattccacaggattcaatttcatggatagggggaacgtatgttgaatcaagtaattattctgaatgattggctgtataggctcgttctgaacttgatttcggcccattatccttgtttagtcagaggttccacaatccccgatacatccgtctctaatgagaagagcagtatctgaaacacaagcatccacaccaaatcatcatgccggtccctccaaaccacgctactcagcaaaaacgttcttcgatgatgaagaatccgattccccttatcaatcaactacgccgtcggctgcacctcctgcttcatactttccaacctcgtatctccctactggttctcctttgaagtcttccagggtacgaaagagaagcagtgcatcgcaacaacctgaatacaacatgacttctccaaatactcgatccaaaaagcaaacgagacggtctcatcctccaccaggcgcattctctacacctcaaccgtcgctttctacccatgccaggcgcaacgcagccccacgaacagaaaagccgacaatctcttcgaatcgaaggaagctcgaccctctttccaagtctctatcctatccaacttcatccgcgaatacatctgcaaccgctggaaggagacgccgatcaacccctcatgtgaatggaaagcctctgagagcacccatgttcgtgattccagattttgtccccaaggggacgtcgatggatccggatcctccgttaccacctcctagtcctggtgatgaccccattctattagttggaaaccggagtgatattttaagtcagcctcctgtgctagatgattttcaagaggcaacttacgactcttcaaacggtgaggaggttgaccaagacgatgcgcttgtactaaatcctgtttctggaagaaaaggaaggacactggctatgttggatacagatgaggacatagtcaagaccgaggatgattgggaaaaccctggattcgagatggatcttggcgtcgcagatcatccttcgtcagatgcctcaagtcaccaagaagagagcgaaagtgaaggagaccaaaaccctgacatatcttacgtccctgggtccaagtcgagatcattcaatgaatttacgaatgggctcatccctggtctgcgagaccctccgttccctacaaccttgtctccgtacgcatctcaaaatacctggcacaaaccagtgccgccttcatctgctcagaccagtcgtaaacgcactgaagaactatctgttccgaggtccttcttctcgcctcctttgcccaatacgttttctttagatgatgatgcggagaatattttggggtttagcattcctccacctggttcatctcgatcccctactgtcactcgcacgatctcttactctcccttctcagctgcccattcgaggtcgtcccagacccccactccaggaccaagctcacctgataaccacgcctcaaatcttgaggaagacaacttaagatctagcgttcttcctttcaaatcatcagggggatcaatatcaaatgccgaaccggtttcttccaactcctctgttcgctcaagaacttccaaaactcccgtcttgcgctctcctacgccatattcagaacctgttgccgagtctgttacaccccagccagcgctttcaccccttcctaatcctcttcccattgctctgcagcatggtccaccaactagtacacccttccttgataggaaatcaatcaatttggaccacacaccagctcctattctctcgccatacgtcttccaccctccaggtacacctgattcatattctggtagctcggaggatgaccaaaagatcatcggtataggcttatcgagaaaagatagcgtggatcgtgtttttgagaagcttaacaaacagtgggagacgaagaggggagatgaaacggagaatgaggaggatgtaggggtttccgagtgggcaagaaagattcgaagtagtctgtccccagatagcgatgacgtagaagtcgaagtggaggcagggggcacggatgatgatacggtggtactgagccatcacgccgacactcagattgagcagatagatgtcgaagaggaagtgaagagcaatgaaaagattgtagtcggaagcgggatggacggggagcaacacagggagaaggagtcatacgaggtcccagaaacgattcaggcggaggggtttgatgtggtagttccaccaaaatcttcgcatggcgctttggaaaaccttccagtgtcagcggatgaaaggatcttggatcattcggttgatagtcaggagatttttggatcttttgtcaaggccagcattcaaaccgatgtggttctcataacggagactgattgttcgcaccctgatctagcggttccaagcgacgaaccagaatcaaaggaagttctcttccgagaggagtcaatcttcgcagaagagagccaagcaatggaggaacaaccaagaagggacataagcgatggtaaggaatcgctagtacctcgacaggagcctgcatctgaaggtttggagcgagagaagacttttgtggatcttcagcctcaagtagaccagccatcttttgagattgagtcagcacgctccgaacctatactgttctcgaagacggatcgaaccaatcaaggcgatcactacctcgcgtttcttaacccaaacgatcccgtttctgataatccccctcctcagataactgccgcatcaccttcattcaaccaaccaatattttcttcgaacccagcgtggcaaacgtcctctcaccctcttgctcccgaaccataccccttgcctgcaatttcttcaacgactactccatctctctcacctccaccttcacaggatatacac

SEQ ID NO: 1943 - DNA, 9393 bp, Xanthophyllomyces dendrorhous
ggatatacacatcaatcctcctttagaatctcctctgcttgtttcaaccatcgaacgttccactgatgctcttctggatgttactcttgtccgttcttcaaatcataaagagagggattcagaacagctaagttccaaagagggagtggcgatgaagggaggtgtccgagatgtagaccaagatcagaatttcgggtccgaggagatcaaggaagccacaatcgacactgatatggttgatgaggacggtgtcgaagatatcagggacgaaaaaatgacgacatcgccggaagagtctttcatagccgtcaaatctaagaggcgacagtctctagctgaagagatgcaagctatcggggaagaaggttacggtgtctttgatgatacctttgatttcggcgaagaagagccttctggactcgaaaagttcatagaagggttcgaaggagatgaagttatggaggaggatgctgttgaggctagcgcagactcaattgaaacaagtaagcaggagaagtcgattcgtcagagtgagtttcatgtgtgttattttgagagaacacttgattcaaatgatgcgctgatgaaagttctgcatgtggatcttgcccctccagctgaggcactcgaagaaatacactcgacacctgctcttgtcgcccaacaaccttcgccacaacctgcttctaaatcctggtcgcgaatcatccccccatcgcctagtccatctacagattcctctgtatcttccgatacagtatccgagactcaaaacttctcattccttggaaagacacaggacttcgttgtggagttgaacgacatttctgatgagtctttggacgaccagatcgaaaacatcattcaagagcgctccatccaagaagataccttccgaacagattctcctgacgcatccattcgaccgccgttaccgaataagatctcttcagaaaagctgtctggtatcaatgagcttttccggaaaagacatgctggtggtcaggtcgccatgtccacaccccctcctgctcaacctacactgtccgatacggtggctcggcctgctgttccctccgttactttccttccgtctatcccatcagcccccttacgtggaacttcccgaatcgccaagccgttgagaggtggcctacattttccgaaagaacctgaacgtttgcagtctctcatttctttgcaatcttctcggatcaaagcacccatgtctctgtcagctccagtccgacttggtcaaccttcagctttacctaatctggcaacctctcgagcacctcagctgaaagcacgtaattctcccattccctctgtcaccgttgctccgccgactcgttctgtcgctccgacattcgccggtcctgtcatgccatctgcctctatcagaccttcgacttttgattcttcaacaacgaaatcccatcaaactccttccaacgcaccttctccttccccttcagttccttcttttctcaatcactcttcgtcatcaagaaacaatgctgcatctcaagcaccaagcaagatcatgccttcttggacggctcgtcaacgtactgtttcctcgcaacctcaacacaacgcaagtgtatcagatatgtctagtcagattgatgttagccttgggcatgaaggtgaaaaggaaggtgatgagctcgaaacgtacatcaagatcaccagtaacaaccccaaagaggctgctcgggcgactgcttttctcaagctggtgagcttccttcagttgtttgattagcgctaattttctgctcactttccttgttgatgcacgtttctatagttccatgactatgtcgagaccgagcttataccactcaatcccgacaatactgtggcctcagccgtatccatccgcagccaatcaaacctcaacacttccatccgttctcaattcaaccaatcagttgcatctcatgctaatatgtcgataatgtctgccccagaactccttatggaggctgaacaagaaattgctgccgatgctgaatcttccgatgatgagacgctcagagaccgaatacaagagctttcaatccctggtagcttcaactcgcattcatccctcaaagagctcgctgatagacgcgcaaagattcaggaacgcagtcttgcggatcatgtctggggtccgagagattggaggcgtttaatgaactgtttggatgccgaaggcggcaaaaagaatgcggatgtaaatccagaaaaagtggtcgctcgatttatcgaagagatggcgctcaatgagaaagacttagtggatgaatgggaccggtacgtcgagcactcgctctgatatggattctgtgtttccgttgactgatcatctctcctcctcctgtctacgtttaactttgtttatcagccaaaagctcattctgagggtcaattctatacaaactcggcggcgagccgaagcggctaaccctccttcccgtcgtcgacgttcttcgatgaacccaagcagatctttgatattaccaaacaaagcttcaagctcttcgttcgcccgagcaaatcatcgttcaagtccccttcggaaaagccaatcgatgccttcagagcttgtctcaaaaccttctttgtcattgaccaacaagatctttgggtttttcacgaagaagtggaaagccagcgccgctcagctggaagaggttgtgttgtctgatcggtcttcgtctaaagcagaacgtgctagggatagggatgcgcatactgttgtatcagcatattccggacgtcagctagtaggtcctcggcccaattcgccagtcattatctctcctagctttcccgagagtgcgccaaaacaagttgaacatcacactatctctgcacatcgacaacaacgacgacaaagacctgatccgacggcatcacactcaagccagctcactcgcgctccaccccggatctcaccttcgatgtctgcccccaacacctccatcgcctcatccttatcctcgtcttcttcgtcgtcctttcggtcgaacatccagaagacgcctatatcccaacattcatcgaggatccaacctcgacccctctctatagcgcatctacctcctcgatcgacactttcagacacgagacctactcgatcaccaatcgtctctcgtcgacaggctccttccgaccgatcatcctcttccatagtgtctttatcctccagacctgtccccatctcgatcccgactccaatctcaattccaacctcaaactcaatgactggagtgggggcgagaggaaaagcaaacgatttaccagtcagaccgagatcgagctttgagagttctccacccagagtatcggctctggtgagaagttttgagagtgtaggttcgggttcgggatcgttagatgaacatatgggtggtggtggtggtaggttcggtaaggatagacggagatgatggcacttgtcttcgctttgcttttttcttccttcttagctttcttcctcttctattggaactcctttccctctgacatttcttccgtacatgttcctcttctaggttttcatagttttctgtttgattttgctctttttctttttcttttcttagtcacagtcttcttctttagttgattgatcaagtatcataatcttgtcctacttctaatcactacgatcataatcgcgcacgtttttacgataaactgaatgttatgtctttctctctgacattcaatcattttacgtttgtgggtatatgcatatgatatcatcaaaggacgtttcgaaaagaaaaggtgaagatgggaaatagaaagtccaaacagtcttacaaacaagataaacaacaatgaaggtgaagtgtcttctgatcgagattcaaatttgaattcaagagaaatgagcaaggggaagacagggtttggtttgaatagaaacaatccgaggcggacagtaggatgattgaattgatcgagatgacgaggaaagaaagtgctgaataaggtatagagtgtccgatagatagaagaaaaaaacaaagaatagtcgagatagaagaaaggatgagttaaatgatgggatttacgaagaagagaaagtaaaacgaaatatgccaatggacagcgctagatcaaaagtttcaaaggatgaaggacaaatgagagattcctgaagactctagtctcaaaccctcgtgcgtctgcctactccaccaagaataccccacccactgatgaagatagtgagaatagtcatgaagagcatgcagaaaccaggttgggagagtaattcacgcgcggacgagcaactagcgcaggtccaaccatctgtaggttggagaatgagggtaacgccaaaaagggtcagcaagttcatgcaaacaacaagaatcagggagatactcacttgataaacttgtgtaagtctgaggcctgtatagagcaaaggtaattccactattgacgctcattttacctccttccgctgtagccgtcggaccacgatcatcccagatttttgccgtataagatgtcaccgcccagggaacagagttggtttgttcgatgctatatggcgaccaaacaaagttggtggccgtaccgggaattgtggagatagtgtatgtatttccgttttttccgatagcagcgacggtaagagatgtcggtgtgttctgaaagcaagatttaggatccagcatcaagtggtcagtccttttgattttcaatatgcaaaactggtggagacaaggagatcgatgttcgacttacgtagacagaagtcatattccaaccccaggtcacaaagttgttatctgcaatcttgtagtacgttgcagctgcatttgtggccggcatctaggaaaggttgcacagagacatatcaagggcgatgtcagaaatatataacgagggcagagaaggaacagtgccctgtctgttcgtgcatcggtcgatatcaaagaagaactttcacacgtacagtgattgagagacctcccacagcagccgtggccgggctaagtgatgaaaggaggggaggttgagtaagcaacatagcccaaacagaagctgggacagatctgaccaggtgagcaggccaaggaaagacagaaagagtttgacatacatcgagactgagctagacatggctcctacttgtactttttcgatcgaacgggatcagagaggaatatcaacagacagggatcgagtctctggccaagaagcacaaggaaagacagagagagaaagtaagatatctgtgagagagagaaagaaagagaaggtattgtgtgtgtttgttaaatgaatggaggacgcaaggtattgatcgtcactatatttgaatgaaggtgatttgagctgtctaaggtgaaatttgttgattaagggtacacatgattactgaggtaatcgagtgacttccgcacagcccggccggaggagatggccgaaaatcctgcttacttaatctgtatatttatcggccggctctctcacctcccaaaataccggctagatctgaccaacactctacttttaccatcatagcctctttgggtttcttctcccctgctctctttctctctacctcacaagcccttctgatcgtcgtcactccctctcagtctcgacttcattcgtctcccgattacttatgggctttacccctaaacagtcttcaccaagctcatccttagatccttcgtcaacagcaacgttggccaatccgccttctccaaagtcatcacctgcacagcggtcgacagatcaactttcgaatttatctacctcagccagcaggtcgtctactcagcttcttcggtcaaagtctggtagcacctcatttagtctcaagaaacgaaattctataccgaaggcaggtccgagcacatggaaacggagtcaagagggtgctggcaggcgaagggtgaagactcggccgcgtaagtatatcgttctctcttgctcttctaatttgtcgtctctttcttttttttctgttttctttgttcgatttctttcttcttctactcgaggatgtgtcacgtactttattgtcacttggcagtgaactggttcatcaaaccgattcgtcgatatgcgccatcctgattatgttcatctcagcctggctctctgttctttggagcaagcttcgtgtttggtccgccaaacatgccctggggtgtccacgtctctctctctttctctttctttactcgtatttttctttcaacactctccatcgcttctaatctcgttcgtcttatcttaatttgctgattggtgtatgcattctgttctcgaatgccgccatgtaaacagcattcgcatataatgaacctgatacacccccggaatccagcactcctcttcctcaggttcctctctcaacatctggcgagccaacagacagcaacatctccaaacgctatcctatcacatctttaccaccttctaaaactcctcgcaaccatctctcacgctcttcttctgcagaattcgttcggaggtcctcaaatctatcgcccgaggataggaccgctttacgccaagaagaagattctgtcccgcctctgtttgggttcccactctccactaccaatcagagatacagttcagaagagcccgtcttttctagtaattccacagggcctttgggtctacgccggaacacattcaatgatgcaatgtttggagtaaagcatagccgacctgtatcgctaggagctgaacttgctggactacccgaatcgccgttgccgccaccgtccaagcttcccggagcagatcgtggcgaatggtggccattcaatccgtctcggaccaagagtcatactagatgggctacaccgtttggtggagggggcacaaaatcctactttccagatacttctgactcgattgatttgggtttaaacgaaggtcggttagaggttggagtcccttctcctgaaaatgatcggccgcccaacaatttgataacttcttacgacgtagatccgctgagaaacccggatgagggcaatgaatcttctcctcttccactcctcccccccgcagtagttacacctcataaatctaggaaagatccgaaaccgtcctttcggattgctctgcctacacctcaaccattcttacattctgcccatcattctaaaacacccggctggtcgagcccttatgcagctccagaacgacttcgtagattctctggcaccgatatggagagtgggggttctaaaggatcaaatagcaaaagctggtgggagaggattcaggattatgtgctctacaacacatgggtacctctagtcatccgattgtttaatttttcactcgcggtttgcaccctcgcgttgggcatcaagattagggcattagaacgggcggccggtttgccgggtgtgacgggaagtagtccccttggttggtcttccttcttcttttgctcattcttctttttatgctgttgtccatcacgatgtgacattgtttggatgctaacattttctcttgtaacgaatcttcgcagtggccatcatatattctcctatcaccctgattcacgtcgtcttagtggtctacgttgaatactttggaccgcctttggggctgtggtctcttccatccaagatcctctttacctctttcgagctcatcattatctctttgtggtcctcgcttctctcactcgtgatatccgacctgttcacaacttcgctcttttgcgtatctaccaatttgaaatggtggactcatctgacgcaaccgatagaacgaaactatgcccccggagtgtgcgatcatcagatagggtacgtttctccttcatttgttgtcctatcagagaatttttaaccatttgatactcatctatattgcgtgtcgtatgctttcaactttctcaagtttggtggtcatggtgtttgtaggtgtggttgggtttctagtaggcaatgtggtttccctaggtcgaatttttgccaaagtcgtcaaacggagtggatacggtggcggtggcggtggtcgttgatcgcacattgtttcgtgtgtatgttcttatttagtcgtttcttctcccttttttcttctctctactagcttcctttttcgatttcttttgctttctgtcttttggtcatctctattcatcacctgggctacggatcaggctttgtttattttattttacttccttctcgtttttcaatatcagcattttcccaaaaacaaacttgtcctctagctttgtgttccagagcatatgctggattcccctcctcatgcattctcctttccttcgtccttcatgaaccacttttttatcttttgtctactctccatcaactcagccaatctatcacaatgcacacgagtcttgttcttacactacaatctttgctctattttctccatgatcagcggtcttgattcgacttctctggaaggaaaagaaatctcatatatgtctcgatcggtgtttggtttcgtttaggaactggctctgggcaagcctgttgaattgatcgataacgtgatcatgtgtgagagcttgtgcaaagaaaagaatgagtcgacagggaaatctaatctaatcttgccagtcggctctagggttaattacgtcatgtgatctccacaccgcagaaagaacagtattcaaaaacttggaaacactcgaagaaatattagaagaaagaaatactccgtactctcatcaagttattcgttcaagccgagacgaaaagatggctaaaagaaaaccacaatctacaaagtgagtacctgctgctcgacttattcatcttctttgctagagaagagagggtacattgactaattctaggttttaccgggtcgaagacaacggaagggtaaggctcattctatttcctcaaaccaaccgaacgatcagccagctttgccgtacacttgacacatcaaaactaactctgtatgcttctatatagctcaactccaagagaaacgagcgatcaagaggggagatattgatcctcccgataaaccgaaaccatttaatacaaggaaacctaacccaggaaggatccgggagacgactgcgaatgctccgagatctcagcagttggtctcaaagttcttaccactgacccctcaggtttgtcgtctcctcctcttattcaatcagtatctcttgtacattctaggaatgcaccagttggggcaaaggctgacatccgaccgaccgttgattgaacaaccattatcagtatctggccaattcaaagacgctctcgttgaccctccctttggatcgaccgctgcctgacgagatctcaacctttccaatcgagctgatcagtcaatctgggctgacaaagcaactcaccgtcccgagacggccaaagtgga

SEQ ID NO: 1944 - DNA, 46788 bp, Xanthophyllomyces dendrorhous
gatatgagatgacaaagaaggaagtggaggcgaacgaggcggggttgtttaaaaagtggttggccggaatggatgaatgtgtggaaagatggagaaagactgaggagaagaatgagagtgaagagaaagcagagatagacggagctggagaagacgggaaggaagacagagaagttaaatcccaacagattcgctggccaaaatccacgagtgagttttttctttctttatttcctttcttttttttttctttttttccgaagaaagggatctcaagaccgagctgatcattcttctctttggggtatcttcgcttcccttctctttcagcctacttcgaaagaaacttagaagtgtatcgtcagctgtggcgaacaactgaagcgtcgcccatccttctagtcctgatcgatatccgatgtccgcctcttcattttccaccatcgatgcaagactatatctcgagtttgcaaccgaagaaagaggtcatcttgatcttgacaaagtgtgatctcgtaccagaggacgttagaacaggatgggtccagtggtgtgagaaagaatgggccgagaaatggggatgggatgtgatttgtctggagagttaccgaagggaaaaacgggctcaaggtgcgatttctgtgttcagtctcaaggaaagttacgcgttggtaaggttcgcacccaccgcttactttgacttgtttttaaacaggtacgagatcgatcttgaagtcacatcttccaccagcctcactttccactctagtatcctctctcaagagagcccatgttcgactactcactcctccacctgccgtccaggccgaccgaaagagacttgaacaatggagccctaagatcagacgagagattgattggaattcactcttggcagagaaggatctggaggaacctgatcctgaaccggctaaacctgtgacagacttaggtcaagacgagcacgacgcccctcagacaagagaagaggcggacgaggaagcgaatctagaatatttgaccattgggctgatcgggtatgtctagttaatttttttcctctgtcaattatgctcctgaacggtcgaatcataacgcatctttccttaaaaacagacaaccaaatgttggaaagagctctttgctaaatgccttggtgggcaagagcaaagtaagagcatctaaaacgcctggaaagtaagtcaagaagatctgctctttgaatcaacatcatattgattgcaagtagaagaaacatgtctcatattcttcttctctttggcgaccgctcagaacgaaacatctacaggtacgagtattcctcaagggatttccatctaatacgaatagcttagctgactttgagaattgtgctcggtagacaatcttttggacgaaagaggtatctaaacgctccgtatctttgaacacgtttgtcgaatctcgtcatgtctctcgtgctgatctaacttgttcaaaattccttcaaaaagatccggctagcagattcccccggactggtcttaccatcgatgacgccgttcgagctccaggcaatttcctctattcttccgatctcgacgatccctgctctgccttcggtcattcggctggcttgtcagctgatgcctcttgagcgtgttcttggtttgaagcatgaggatgaggataaggagaaggagatgaaggataaaaagacatggagacctggaagtctggtcagagggggccgaacgaaagaggaggtctggacgacgggaatgatcatggaaggttgggcgttggagagagggttccgtgagttccgtgctttctttcatcaattgctagtccttcaggtgaagccacgaacgaagatctgaacgagcgtacaatcatttttatgttggcgatgatattatcagtgactgccaaagctggtcggcctgatttcaaccgagctggtaaccacagtgagtctcaactctatctggttctttccttcatttgactagtcgtttctggacttctgacaacaatctatttcatcacggatgttccttctttcccgatacaagtcctccggtctattgcagaggcacgtattccgtggtcatttcgcgcgcctcctgtctcttccgaggtttcccgagccggtccaagtgcagatgtagaggtcaagactacgtcagctgaagatcggactggtttgttgtctactgggagattcaaggcggatcctgaaggagccaatgggatctggctaggcgtacgggaagacaatgaagacgaagaggaggaggattacaaagaatcaagcgaggaagaacaattgagtgaaggtgaagaagggacgagcgaagaagaggagcaggaagatgaagaagatgaggaggaggttgaggttcagcagcctgtaaagaagcgaggcgggtttaccagcatgtttgatgctctcggcgtggaagaaggcgaggacgaaagtgagggagaggacgacgataaaactgaggacgacattgagagtgaagaggagcaggaggaggatgaagaggaggatgaagaggagaaggaggaggagaaggaggagagggaggagatgattaccaagtaagggtcgtgtaataaagtattgtgtgatgagcgataatggtctccaagctcagctcaacagaacatgatcatagaataagaaaatagctctctatcggagcgtgataagcatccaccggatccgatacagacagctgtctcgaccatcagctgatgaccatcggttgatacatcgaacggctggtctatcttgagcagctttgatcgtttgaccttcatctaaagatggaacacgacctaaactaccggctttgggcgactcgagcatttctggcggtctaattttgagggagaccgcacggagaattaacgagccgctaaggtttatcgccgtggtagctagcgcgtttgcctcgagtccaccgagcaacctacactctacacaatgtccactggatacactgacatctgtgtgtgcaacctgtaagcgcatactctgaccatgtctgatgtgtatgcgcccaagcgaccagcgcccccaacggaccgacctctggccgagaggaaggaacaggcccggcgaaggaatttgaaggattagacgaattggaaataaaagatagagaaaatgaaaaatatttgaattgagaattcagctgcggaattgtgcctgaatggaaaaaaaaggtggtcatagcgcaagcggttccttcccatctttcggctttctcccgttcttaccttctaccatcatcttcgttttcttctttccgtccttcaacttgcctttgttgctgtttgtctgtctcttctcttgaatcatgtcggaagctccctcctattcgcataaccccacccttctcgctccgtatttggagcttgatcagggaggaaagatcatggctgagtgttcgttccgagtcatcattcagtctatttccttgtccttcgctttattttcttttttctcatttttccttcctttttctcttctccctccgattcaatcacgtctgatcctgtttcattcgacatggcaaacaaacagacatctgggtcgatggtgtcggtggaatgaggtacgtacacttaattgtcttgccgctgtatttttatttgaaaaatctttccagggcctctttctctccctctggcgctcgtctgccttgtttaagaaacacgtcattcggtcgaaattctgcggcaaactgacggtctggctcttttgcaattctctcttctctctccaaatagatgcaagactgctgtgagttcatcttgagatcgttgattctttcactcggcaagaacatcttcatgatagggagggacgataatacgtccgggcttctggcttcggattcatttcgggtagcccgaaaaggttttccttatcccctccctagccttatctccctctcgcccaacaaaccccggacacttatcctctgttttctctctacttgtagacggtcgatcaccccgtctctaacgtctcggagctcaagggttcgttcgttttgccggaacgatagatgacttgtgctcttgatctacctactcacatccccttgctccttcattctatctttcttgtagagtggaacttcgatggaagttcgactggacaggcccccggacacgactctgatgtttattgtacgttccatcttgacgtttctcattcattcttatgacaacttctgagcatcagactctttttgtagtgaggcctgttgccatcttcaaggatcctttccgaaagggagacaacatcctggttctgttcgtataaattcttttgctctcaaaacaaatccatcgtctttctcatttcgcgtagccgaactcttaactgacccttgtccttccttctttccttccgaaactaacagttgcgagaccttcagtacgttccggccctagtcggtgacgataccgtgtcttgttatcatttcttttcaaaagaaaaaagacttttccccctcaccgagacttctctccttctcgttctcgtacaacttgttttgtacagacagcgatggaacccccaaccggaccaacttcaggcatcacgccgcaaagtccatggaggccgccaaggaggtccgttgttatgctttcaccatttaccattgtgctctaggtgctgactagacgtcgattgttctcacatcttttctcacagcacgagccctggttcggactcgagcaggagtactctctccttgatgccgatggctggccccttcactggcccaagggtggataccctggtcctcagggtccctactactgtggagttggaactggaaaggtgttcgctcgagacttgatcgaggctcactacgtacgtcgacggcccgcctggttaatcccattctaggccttggactgatggtagacacgtctcgatcttgacttgtcctttctttcttcgtatctgttcatctagcgagcttgtctgtatgccggtgtcaccattggtggtatcaacgctgaggtcatggcctcccagtgggagttccaggttggaccctgcgagggtgtctcgatgggtgacgagttgaccatggctgtatgtgtctgatctctgtccgcttatctctgtcgatgtccaatcagctaaccatgtcgtctttccgatacacagcgattccttctgcaccgagttgctgaggagtggggaatcaaggtcaccttccaccccaagatcttcaaggacggagactggaacggtgctggttgccacagtacgtatctcctcaaagtatcttcactcgtttctctccttgctcaccagtgcgaaatcgacgaatcatacgaaatcaactagccaactactccaccaaggccatgcgacagcctggaggaatgaaggctatcgaagaggccatcaagaagcttggcgagaagcactgtacgtctgctttccattggtttctgactttgcttgccaagtgcctgataacttatctcttcctgtttctatgtatacgtagtggagcacattgccgtgtacggtgagggtaacgaggagcggttgtccggaaagcacgagaccggacacattggagacttcacctccggtgtcgctgatcgaggagcttcgatccgaattccccgacacgttgccgcccagggttacggttacttggaggacaggcgacctgcttccaacatcgatccttatcaggtcactggtatcattgtcgatactactctcctctaagcgggttctcttccttttcttttcctttcctttcttatgataagggagggtaaagcgatgtactatgccattcattttcttgtcgttctctttctatcctgttttgttttgttctgtttggtttcatccttcacaaacaaacacacacccacacacacacacaccttttctatgtttggttcagactcattcgttcagtcgtctgtctgttgccgttcttccactatgttgtgccagtaaacccgaaaaagaaaatagaaaaaaaaaacccctttcccttttatttcacttttgaagatataaaaagaatgctcgttccttcgcaatgcgattgcatctcttttatcttactttgctcgattgatcgacaaaagaggagagagagaaaggacgacaacatgcgatacacgagtagagaatgaaactctaacatgattgagaacgagagaaaagtagtagatccggatggactcgtctccaaagaaatcaccgtccttttctatcgacatctaacaacacccccgtctaacctataacagtcaacctctagggcctgatctctaagttctgtgatcatcggccaacagaagggatttatctattcgagcaacgtatggaaacaaaggagcagaagaaaacgagaatgaacaatggagtgaaaggagcgttaaagacatgacgtagccagatgagatgggatggggcaaggagtgacaaatttggaacaatatggagagtaaaagatagtgatggggaaaaagcacagatggacgttgtggattgtgatgagtggtctatggtacatgatgtgcaaagagacaaaaaccgaagatagaaatgatagagaaacgattgagaaacatttcgagaataatatatggcaaggaaactggactacaaaaagaatgcagataaagaaggaagatggaagatggggagaaggacttagaacgaagacaaattgagtcctcgccttctgcctcctccgataaagtttgtgactgcagcggcgacaaacaatcccacactgcaaccagcgacatgaaagtatagaaaatgcaaggaatcagccgacgtgactttgttcagaaagaaaaagccggatacaaagaagatggccaacatacgttaaaccgatagccgtctggatgagctgttcagccaccaagaaaccagacgaatagtagtccgttgtaccactcgtactttcacttgcgaatctcaacaaacctccgtttgatagaccagaggctaaaaaaattaacaatagacaggaacgatgaatatcgtaaaatgcgcagacagtcggaagttgagagataatgaacgactcacgaagttgaaagagaataccgaccacctgatatcacgaattaaccccaaaacgaattcactgttagaacaatctttacttcgtgaacctgaagaaatagaagggtacaacgtaccatgataacgaaagcggaacctctagtaaatttactgtagagacctcccaagagaccgacgacaaaagctccgatagcctgtgcaacatgagcgagtcagctaggtgaacaatctcaacagaaatgtagaggacactatacaaacagaggtgatgtccggtcggttgacaaagacccgtcccgaaaagtaattgcacgagaaacctaagccggatcaatgaaaacgaactcagctcatgtatatttacatgtctgactcaaaagagcatgtgaagctagatactgacctgcacaacctgtcaaaatcatcacaggcagttccttccgtcggatgggttgaccgtttcggagtgctagacaagctagataggctggagccgtgaggaagactgagaaggaagaacgacgatggagataaggtgtgtgtgtcagtcaattcatgatctgtctctatataacagtcctaactcggtaggcgatagattgtgacgagcaagacatacagaaccaaggagagatcgtagcccgataccaaggagcattcgcccggagtgtggtacattggtattcgtttgcatatgggatgctcgagccggtaactcggataaagatttctgagccgatggaaaggccaaagccaaggaagagagagtagagaaccgagtagacaagacggacagagccagagatgatagacctattgcaaagctcgagagaaccgcacaacacgatatatcctggcaagatcaagacgacagagcctaaagaaggaaaaaatgaagaagaatatcagtcatcgaaaagaaatatttgatagcacaacaaaatacaaatggctctacctgaagtcatagccgaaaagcagagtacgccactggaagagatgatgcagagctgaggatcagaaggctacatataaagagggcggacacagactgatttcgtgaaaataggcagaagaaaaacgtacgtctttgaaagtgcggccgccaggaatgcattcaaactggcgatgacgagctcaaacaaactgctgtacaggtcgttcttactgaccaagacctggacaagaacaagaagcatgccgagaggaatggtgaccagacaatcgattagggaaccatagaaagcgctgggctgaataaatgccgaggcgagaccaccgataagaagttgttgccaaagtttgtatgcagctttggatgtcatcagctcgtctaacttggcagaggcctcagtaacacccattttgtcatgcacgacctagcaaggagggttaatagatagtcaaacgatgagcttggaaatcgaatcagagttacgacatttgatgaaactcacttgataatacaccatatgtgcatctaaaagctttcccagatccaatccgttggcttgtttcaagaacttaatttaaacaagaacgagatatttgtaagataactaaggattggagaacaatagatgaattcagaaaaacagactgactttgacttccgaggtatgagtggcaggatcaccgaagctgacaagaaagatccctggtaagagaatcatttgacagttgagttccagaattcgggcagtggcctgcatctgggcttccaaccgactgattgttgatgtttttcattatcatgataagaccaataccagaatcaatattgggagaaggcacagtaataaacaagagaaggctatatacacactgagtaggtgcaccgaaacacattaacgctcttgtcagtttcaacaagaagtcctgcctctccaggatggcagccacatgctgagtgatgaagatttgctctcttcttcgcttttccttcgcttttcttctccttcgcttttccttctcccattccttcttttcccgttcttcttgggtgagcactggcttagggcttttctgatgatgtccaaagtagtcggcatactctccgctagccctcgagtccggggtggtagccgctttggactttgtcaatttgagtggggcagtcatcatgttgagtgccagactctcaatttgcttgaatccggaagccgaccgacgtttcattgcgttttcagagaacgacgtcgaatgagttgctccggctggtcgggatggagtcgaagaaggagggtctaatgtgaaagaacgggccatgggatggccaggcgaggtcgttcgaggccgaacgggaggaccgatcgagatcgggggtgggtctaactgagaaagatgaagatctccagcatctggactattaggcgccgaaagtgactcgacaaggtctttgttggtagggaaagtacttgtcgttgggctggaagtgatggatgaaggacgatgagagaaactatggaaggaagacggccgtttcgagttcgacggcgggcttcgaggcgactttggagactttggcgatttgggaggcttaggaggaggagaagaaagtcgggtgagatggaatcccggtcggtgagcatctggggccagctgagaagcgaccggagcagcaattcccgcaagatttccctgtttgatgaacaaacccataagagttgagtgaggtgagtaagtctaggcagtgttccaaagaaaaacatggaaaaagactgactgtagtagcgatcaagcctccaaatacaccggctgagctttttgcaaagtatggtctggatgaactcgtttccacctccagcccaagggtttcgcctagctttttaacccgagaggtcaccgcgctgaccctgctcgtcttggacggtcttcttgctagcataccgggctccaaagccaaggctttggtcgatcgagcgtctgcagaaggtgacttcttatctgcgcgaggagaccccaacggcgcagtagatctgccttgaataaattgagagatggtggagtactgccttgaatgatttttcgatccagtagatgagttgagccccggcgaagagggctggtctttgccatcggtagatgaacgaatgggagtcgtagtagaagaagacagacgagtgtatttcgaagagagacctggtgtgttattaccgctaccgcttccgaacggattccagccatttttgattcggtgctctctgataaactttgtccgctcctcttcatcctcctcagagtcgtccgaaagtgtggaactccgtcgggatgggggtcgagaagatgcgggagtagaaacaatgctgaccgattcggcccgctgttgaccgctctgaagtgcgagcaaagatgagagaacaccacccgccccagcaacgattcctttgccacgagcgattgcggcggacggtggaacatcaaggttgacaccgaaagtgctctcgtacgtcgtacctggttccctaccttctctgagctttcttccgaaatccccagtgccatcttcatctttgttcgaaagttcgatggcctctttccaaagtccatcttcgccagcggtgaagttgtcttgtccctgcttggaagatttcttccttcgacgcatgaagccaaacatgccggttgtatgagctctaacgagcgcctctgccgcctgtctattccgttcgacatcccgttctgggttgacggaaggcagaccgtcgacctcgtacggatctacaaacatctccatcagattagtgttttcagcctgttgataatccccatctgataccacactcggcgctctggtcgtcacctcgcttgatacttgagattctggatcggtggcgatgttgtttcccgtgaagaacggatgacgcctcctcgcctcggttggttcgtcgtacgccgaaaagttctgaagggctgattggagggcttcccgtccgccctggtcgacaagagtctgtggagacatcgcgattggattgtctttcccaaattcttcaggccactgcactcgtttgttctttcctgccgataagccgctcggagccgagggcgggtgaataggagtctccgctccggaaggtgaagacagggtgagagggccctctggagacgtccgctcgataggagaaacaatcggtaaggagtttactctcatcgtcggtggccggagtggcgatggtggggaccgcgtggcactacttggattcgatcggatggccgacggctgacctatggatacggaaggatgagtgatcgatggctccaagctgtttctcggaggagaggacgtcgaggagtgactgcttatcctgtttggatccagaaacgggttgtctggaatagacatgacggacgggtggagggaggtgttagtagaggacgtggaagagagacagaggtggtggtgggtggacgaaagaaagaggagagagatggataaggataaaaagggacgaggatggtgacgaagaggaaggatggagaaaaataaggaacaggaacgggaccaagaacaggatcaggaacaggaacgacaaggaagtagcgaaaaacaatttccgagcgagcgtgcgccgtcatctcggactttctctccaaaagcgcagtccttccgttcctgaccccacgtcgaacgttcatcgctcgcacaaaattccccacagtctactccagatctgcccagggtctagaacagacctgtgtgttgtcaccggccttgtccccaccggttggttctccctatcgcccgttgcacagcgcatatataatgtatacagttcaggctgggcatgcttaatcacaaatcagcagccacaattgttcttacatcgttgtcatgttttcttgttgtcagctccttcatccttggagttcgtgagcttgagccgatcatctgttcaagggtgatgaaactctcaaacggcatgagataacatgacatacagtatttatttaaagaaagtcttcccatcacagaaagagatatggacgatgatagatgagacacactatccgggtacaccaatacaaacaggacacagttttactacaaatcaggacacagaagacaaaacaagaaggaaaaaattggggaaaaaagaagaaaaagagagagagagagagatacaaaaggcgcaacaagagaggcttgtatgagtagaaattcgtccatatcagactcgttgatcctttccccgtaatcactttgatgcgacctcgatctcggcgtgctctctcttgatgtcctctcccttctcgtcatcaaatgcgggactaaatctaccctcagggttggtcaactgagagtcagacacaacccagacggaccaaggctggccgtactttcttgatcgtgatcgccacatgaggaatccatagcacatgacgactggttgtgtaagaaggagagggtcagaaagacttatactggtgttcctcacaattagctcgtcaagactcaccaataaatccagtcatgggaactgatacgtgcacatagcaaatggatataaaaagaatatcaaccgcacatcagaatcaagaacatcacagactagagtgctgagccaacgcgaagcaagactcactaaagaaagatgtactcgtgctagagtaatcagcgacggcgccctgcatcgccgggaacgccgctcctccagagacagcagcagcgatacaaccggatccgatcttgaaccatgggccgagatccgccgtcgcgatcgtgcttcaagggaacccggtcaacaaagatgtcaaagtgtcagtatctcggcctaacagacaaatcaggagaaaatatacagaagactcacaagatgacagggtagcagatactctcgaagaagaacacaatatacaggcaagcaataccccctaaaggacaaggcgcggataagatggaacagtgttccagcagttagcctaaggaaacagaactcagatatatgacctgtctaacaagtgaaaagaagcctctacccaccatatgcaggaagagtggaaacaagaaccgagaacagtacgagcattgtacccgagacgaacagcgcgaacgcagggtcctgttgattttggtcaagaacaaatctcacatatcagcaacgatttatgatctatcgctcggaaaggagtgaggcacaaatactcacaaagtatcggaggtacaaaacaccagcaaatcttttatgagagacagaacatcccgattaacaaccaggaactttcagttgcattctagaatagccacagatatggcgtgggccaaaacgaaggcattactgaagcactcaccgaccgacggtgaacacggcttggcagccggaaaacatgttggatgcggtggaatcgtcaattctggggctgatacccctgatctcagttatgtaaaacacggtgaaagaggctgtggcaagtttttttggtagacgtggttgattagaaactgtttgggactttgctagacagttgaagagaacagagacagaacgaaccaactgcaacttgagctcctatagagagcaaccaatgaagacccaatcatacatgtcttctgtcagagatccgagaaccataaatcacccctggtagaacttaacgtgcgaagaaacggtagactcaccaacatagaagaactgagcgactactccccaaaccaatcgatgttgctgccagaaagagccagttttctcgtttgcgtccccatctagaatttgagtaatctctgggagcttcgcaaaatatatcccgatattcaatgcgatcccgctatttgtatttgatcgataaacaaagagaacaggatggtgttcatcagtctcattaacgcgccaaatatgctgacttgtaaattagagaaagaaccaaagaaactcacacacagcagagcgccaggtatacgtattgcacggtggatagtgatgcactgttttcacccttgaagaaggcctgggcagcgatcaaaggaccgataacagtcgacacaccgttagctgcctgggcaagtacaagtctcattgctgcatgttcgggagggcccaaaatggtgatgtaactgttcgcagcgactatttttcagaatggatcattttaaacgggatgcatgagccttggacataagagtgaaagaagagaacatttcatcgtctttcgacataccttcgagggtagccaaaccggaggcggtgatgaaggtgaaaccaacaaacatcccaaacttttcgtacacagcagccggctaaacagtaggaaaggagagagatatttagttgttggcttccctatcacacgaaaaggagagtcttagatgaaaaactcacccagtagagaatcgttccgagactgagaacgataattgaggttgcaccaatgaagttataagtcaacttcgtctatgtgtactaatgatagacaaatacacatacgagaacagccccaaaccaatatgaattccaattttgtatccgtacttgcgcatgaaaaatcccatctaaatatgatcggtaggatgtgaagaactcatttagccatcatgaagaccaacctggtaaaattgagcgatagagagcttttacttaccggaggggcaaccagcaaataggacacaaagtaactgaactaatcgtggtcaaaacgaaggagatatcgaatgagtacaactattatcaaccaaagaataaaaagagcaaattcttacctgcaacagtgtactctgaactctggtgagacctatgagcgaagaatcatcaaagagaacttggcgtaaaaatgctgaggaaacgaggaagtcaacggtgaaaactcggtctcttaccgaagatattcaagaagtgctgatcgtccaaaggttttatcagaacgtatcagtcaagtacgattgacgacgacacgattctatgtcgaagaagaaacaagaaattgaagactaaccttgttcaagacatcgaccaagccgtaggaaagcccccataagaagaatagactagcgataaggctgaaggagaagatagtgtccgatttggagagctaagagagagccattcatgcaatcggaataaagtgagttcatagatattcgatcttcctctctcctcttcaatctttggatataaacatacacttttataatccagagggatgggcacgcctctctcgtctactttcggcgcctgcttctttgcaaagaaacccatggttcgtgtgagtacgcgtgtgttggttttaaggctatagaatgagttgagctgaaatgggattaggtgtaagtaaaagcgaaagcgagagaacgaaagaacgagggagcgagagttggacgaaacatggacgagaacagcgggctttatgaactaacaagagagagaaaccggggtcaaacggttggtgtcgaccggatgaagaagagagcaagagacataacacgcgatggaccgagggaacccaagagatcatcaaaccctctcggtcggtctgattgtccgtccttccatcgctgtaggttggctgagtggtcactcgatccgtcggctcttttggaaacgtttgaacaaagcaagaaagcagtaaacaaaatgaggactcaaactagacccaggtcagcgggtcagcggatcagtagcccaattgacgagaaagctttaactccagagccaagctagaaaggggtcagtgaatgaaagacaatgttagtgaagaatggcaagagcaaggagacaagagaagctaaaggtgatcgttcttccatccgtagctctcatcgacctaattggcggcattcggctcgatttaacaccggccgcggcggtgatcattcagaacgtcgggaggcttggctcctccgagcacgggtcttcgtgtagcaaggctcgttctttctgtattctcatcatatcttggtttgttcagacattcatacgctcgtctatctgtgcagtttttcgtcgctgtgcaaaagaagtcttggatagcgattgctatcgacgtacaagcgcttccgtccacttgatcttggcgcggtttacctcgaagtcgttttcttttaatttcaccttcttggatacttggcatcactgacactgtaccgcttggacataagaacatacgaggtgtggggtattgagagcgatcgacatggtttctttccacctattcttctatcccttctgatccctcttggttctcttacggttgtcttttctccagtcaaaagtcgataaatgaaacattcatcgcgtcatgttcttcttttttaattccatccgctcacagcggtcagcctcggatccaccttcagcatatccaatggctgtgatatacattctaactcttccgccggcacatcgaatagcttgtccaagactaactgggcttgctcggtctacagagtaaaggcatagtgaatgtgaaacaaacaccgacgtgagcttgatagccccgagacatcctaaggcatatgttcctttctacatgtgtggatctcttacctggttacccatccagccaagcttggtccaaggctcttcctcctcttctcgcatcgcatgaaagatgtttccgcctccgtacccggaccccacagcctttccgtcctctgtcacacgcttcaccacaaccttgaaagggtagaggtgttgaagagagaaaagcaagcgggagaacgtttgtcaactaccagaagatacgatacgcatgtaagaaagaggaacaaacagcgacggccttcccagcttgctccttcttctcgtcctccgagtccgagtcatccatcgcgcgttcctttcgcctttcctctttggcctgctcgtccagtgcgtccaaataatcgagcgcgggccgtagctgaaactgatgagtgattggatgcaagtatagcgcgcctgtagatgcaaacattttgcatccaaagaaatatacgagaccgttaatttcattatcagctccgacggtcgctctattcagaacgctgatagatttcaacagacgaaccatctttcatacagccagccatataactcgtctgatctggcacgagctgacttctcagcttgatgtgctgcaacgatttcttcggcccttccctagaggccattgcctccctttccctgtcctccttcttcttcttcttactaccgcttaaagaagatcctgcgtttgctctggcagcggcgacggctaattctttctcgaacaacaatcgagcaccttctccaagctcttcacctctttctcggtcataaacctcttgccgagtatccaatgggatctaattcaaggttaatatgtccccgaagagtgatgtctttagcttcattctctccatttatggaaagcaagcgacaggctacacgcataagtcacagacaaggaccgtacgcatatgccatgagtcttcctttgagatgaaaagcaaagacctacgaacctccatttcgaaccgttttgcattcggcttccacctcgctgagatcttccaacccttctcagctgctcgttcaggaacctcgacgttgtcagtcaccggaaattgaaacaagtggaggttcttcccgagcgcatgagatagatagacaggaatttcatgttcgactgtgtcttcgtcatcagagtctgaatccgaatccggatccggatctggtaggaacggtgtgtcggtggttgtcacagggattgttggagaggatggagggttgggagctaccggtgtcgaagccggtggacgttcagaggctgatgaagtctgtgatgtagaaagtggaagtcgcggcttttcagctggagatgtctgagtagccggcaaggcgtccgtctttttgactgttcgagtagactttttggcagagagcatgccgatcagttcagacgtagtacaagaatagagagtgagggactgagacttactcgagttgccatagtagtaacttttattttttttctcctcaatttcgatggcttcccaacacgaaaactgggtcaacagggatgatgtccagctatagaagtcgaacagacaaacgctctgagcaaaggagtggtcggatcaggtgttgggttctgctgactttggaaggttgtctggacgtaatggagttggtctcaaaatgttgacttacctaagtgctatatgatttcaactattcattcaaaaatctcttttctccatctctgctctctcaacttctcgcagccgctctcgaatagtttctatcaatcccccaccttgcccttccaaagatcaacaggagagcgtacgaaaccatggacggagtcatccctaccgaagatccatctgcaccagcctcgacggctgaaggagctgctcctctcgtttctgatgcgatcgacaccacttcagacgatcagcataagatcgaggtcgacgaacagaccatcaaggctgaaggtctatccgaggaggaagacttagcgaaaaaggcggaggaggaggcaaacgcaaaggaagctgccgagaaagctagattagaggccgaggcacggcttagggaggagcaggagaaatttagacaggagcaggagcggatcagattggaacaaatcaagattcaggaggaaaaagatagagcagagagggcgacatggacagagacgctgtatatccacgtaagtagggattgatcgtagcctctgaaccaagagtatggttgctgatgctgattctctggtcttgtctctttgcttctgttctttaatcacagaatctgaacgaaaaagttaaattacctggtacgaatcgtctatttgtagtctatatgttcttcagtgtcatgtctctctcgtcgccaatgtcgctgccgaccggacgtttcttaccatctctctgtgcttttgctcgccggttgatggtcgtccttcataacctgtccttgctgatgcttcctgtctcttctctccagtgatgaagcagtgtctcggttatctgttcaagatgtatgccccggtactcgatatcgtcgctcacacgaacgtccggatgagaggtcaggcgttcgtgtcatttgaaaacaaggagatagcggcaaaggctctgaaagaagtgaagggatttcctctatacggcaagcctatggttcgtgtcttttctttctctcctgcaaggtcaccgaacgcgtctctatcaatcggctgaccgtgtctggatgttgtttccacgaggtcggccaatagcaaatcgaatttgcacgcacaaagtcggacgctgtcgtgagaaaacttgatgatgcaggattcgatcagcacaaggagcttcgaaaagagcacaagagttcgtcctccccttcatctactttttttcattcgagaatgcagagcttagatctcagtttagggcagccacttaacgataccatgtgtctctttgtttctcgaaaaaccagagaaagcccgagttgataatcctcatcgtcagaaggagcaggcgaagcgcaaggctgctgccgacgccgctgctgccgcttctgcggccgatcctgccagtggcgaagccggttctgctgccggcttagtggccgctcctgtcaagcgagtgcctgttcagatgccggacgagtacctgcccccgaatacgacgttgttcattcaaaatttggtcgacggagttacgaaagaagatttggaggagcagttctcaaagtcagttttcttggtacatctgagagaaggccgtctactcatcacttcccgacttgtcttttgtcaccggtatcatcttttctttcctcttcaaacagataccccaacttggtggcagtgcgtgtgattgctgcacgtcgagacattgccttcgtcgattatgcagacgaggcaagttcaacgctggcaagagaaggtctcaacaactttaaaatgggtcccggggagggagaagctatgagggtatgtctttgtttatcttgattgaacccttatccaccgcctatcgatcgacccagcttgtcttgtatttttggcacgactgacactgtatgcgtattgtgtttccgtactccctcacaggtcacgtttgctaggaagtaaagttggccggtcaagatgtattatatatttgttttaaactctgttctctctggtgtttcgatctaagaagatacacaatgaaggacgcaagacgaacgctcgaatgacgcgtgtttttgaagagtggattgcttcccgataattgccttggacaacataagatgaagaggactcaggatcgctcctctcttcctgcatgctctcgtactcggatccgcggagcttatttaatgaaaatgaaatgttgcgcatatcactcagacaatgtttgcaagaaccaatcttgatgagtcttgtcgatgtgtctgatctgtttgctagattgatggttctatcagcggccggttaaggattttcttcaggcctacgtttttttggttctaattcaattgggaaatcccgcagcgtttttcaacatcgattcagcaccctccaaccacttattctcaccatcattgtcgttcccgttctctgagaagaactgaaacctcaaaaagatctgaatcatgacgtctttccggcgaatcaagccatcttcccttccttctccccctccgggaacgatcgtgtgcccaactgttcccctacctcacttgtccaccggtctggcctctctggatgacgtcctaagccccggtcaacctctatcatcggccctgcttgtcctcacccccgatgcccactcagcctgggggaagctcatccaaagatattggattgctcagggtctgattagccagcagaacgttgtcgtcgtaggtgctcaagacgagcctgacgagctcgtcaaaggatgcatgtgggatgctagtgcagcacagcagcagcaacaacagaaagagaacaaggagcagggagagcccaaagctgagaacgaagatgctggcatggaaagtgagggagaggagctgctagacgagaacgaggaaggaaacaagatcaagattgcttggaggtatggtgggatgagcaagtttcagaccacagtggataccaagtcttcatcaggtaagtacatcgctctctttctatttcttcaagctcgttctcactatacttgcctatatatcttatccataaattggcttggtgtcttggtgtgatatgattgtttcaatgactgaacttctctgttcttttcttgcccatcaaagttaattcattcaactacaccttatctctcacccagaatattccccgctcgagaatcgccgacttaatagattcccgtcaattagcctatgtccatgtggatccgtacactcctcggccatccagaaaaaaaggagagaccgtgggtgttgagagtccacttgacgaagtactgaaccaaatcaagaagatcgtcgagaaaggaccataccagtacgtgcgctggtctattctctctgaaattgacacctctcgagctctcacagctcacctctcgactatacgtctgttggcactcgtggacttctctcaactaaagacgtagtacaatcgagcctcgtccaagtcaacctgctcgagcccttcgaatcgctcttcctaatctattctcccagtcttatggtgacctgacccatgctgtacgtacccttcgttcacccataattctctatcaacttttaaattgattccacaagctgactcaaggtatctctcctactcggttatcaggaaatgttccggttcctgatgggtctccgttcggttatcagacctgtgcatgtggccgtgctaataacccttcctcctcacctttgtgctgacaaggcgttggtctctcggttgatgtgggcaactgactcgacgatcgaactcgagggtttcggctgtacgttcatgtttcttcttcaaacctgagctctctccttcccgtctttaaataaacacttgtagtatgtagaaactaattgcttacatctggttttctcttactgatatcacctatctcctcgatagccgacccgacccttcctgagctcttctctcatcaccacggtttccttcatgtccatgctccgttccaccaacaatctctagctcctccatctcaaaagacatctaccttgctcggtggtcgaggcggctcaaacaacctggcgttcaagttaaagcgaaaagcattcgtggtagagacgcttcatctagatgtcgaaggtggtgtaggcgagagacgaacgactgctcctccttcggtgactgcttctctcaaaggcatgaaggatctttctatcagcaacggtagtggtggtggcgagggacatgaccaccatacacactcgcatgatcacgatcattctcataactgtggagacaaggaagaaaaaggggcaggtagagttcgaatcgaggtctcggatgaggtggagttcccaaccgtcaaacgagaaccggtgctggacaagaaaagctcactttctagtgacaatgtcaagccaagaaagtcagcaatgaaaagagttggattcgtggatccttcaaagccggagatttatgaattttgaattgacgtcttgttgtaattcttaagcatcgtactttggatttctctccagtgaggatgcttattcgggcgggcacgtttcctttcttccatgacgcaacacaatggaagctcattcatagataaataagcaagagggagaacagagagcataagatcatattacagagattctataattgaagagaaagacatgtatagattgcccgatcatcagaggaatggagaacagagcatgtatacgaagaatagcatatgtacaaagaaactagcgtccgagagaaaaacgaaagaagagatcatagatttatttcttttcagcctcggggttgacatcagcacaccactctggatcgtctccatgctcgagaacgtatttctcgtggtcgtgaagcgcgtgcttccatcgaccctgaaggacctgtagctgagaagagattcgtccgtttggatcttgaccggcgacggcctcggctgctcgcatagccacgtcgaatctggacgctttgttcattcgaagcatcgaccacggactagtcgtggttccctgctcgatgtaaccgaggatatcaaaccttcctcgtccaacacgggcgttgcgagagaacagaagggatgacacgtccttagggaatccgtggaagttgaacacgacaggcttgtcaatagtgaagagtccctggaaagcgataggtgagagcgcgtgaggatgggttccttcatctccgaggatcataagatctgtcacattaacgactcggactcggacaccctgggcttgcaagaggaaagacgcagcgatgacctcaaacgtgacctcgactccacagccgacaagcacgacatctgggttgattccctcgtcagtagagtactttttccagacagaagctccagcgatacagtgctcttcggcctcatcggcatcgagccagcagggagtagggtttttagaaccgacgatcaagttaacgtagttcttggatcgcaagcagtgagcgatggtggacacagcggtgttcgcatcggcaggaaggtataccctagtctgatgggagggaagagcgagaagggacccaatgaagccagggttctgatgactgtatccgttatgttcctgtcgccaaagggtagaagtttcgatgtagttcaacgatgggttcttctcacgccaggtcgtctcctcggcgaccttgacaaacttcgcgtattgctcaaccatcgtagtgacaataccgaggaaagactcgtaggaagggaacagtccggttcgtccggtcaaggtataaccttgcatcagaccttgaagggtgtgctccgaaagcatttcggtcactcggccaccattgttagcggtctccggatcccattggaagtttcggtgggtgtgcttgaatactccgtcgagcttgttggaagccagctcgtccggagagaaaattcggaagctcttctggttcttagggttctcgacgactccctcgagataagatccaatggccttcatggccgagacatctccgttcttgacatcgtgagagaacttcttccagtcaggaagatcaaggggctcgtacccacggtacacagcctgtccgataatagtgtgaagtatgatgagctcatccgctcgcaatctgaagcccttttagggaaactacgatgacagacataccttgttgaatcccaacctcctctcttctttggccgggatgattcggagagatgctgcgttgacgaaatcagagggaagcgagctcgagagatcgccatgcttgttgcccgccgtgttgaagagttctcttggaccgtaagattccaaccagtccttgaggacaccaagctcataatcatctccagcagctttgggaaggggaacttgatgagctcgccaagtaccaaccatctggatgtccttgagtcgggcaggcccggtccaacccttgggagatctaaggatgatcaaaggccatcgaggcttggtgatcgggtttcctcctcgggcagctttctgaatcctctggatctctccataggcccacttgaaactggcggccatgtccaagttgatgctctcttcaagctgcttctcagaagcgttctcgggtaggttggctccatactcgacaattcgaacctggtaaccatatccggtgtacaagcacgcaagctcgagatcgtccattgttccagggatcgttcgctcagagatcttgaacccatttacgtgtagaacaggaaggaccgcaccggactcggcaggatctaggtacttgtgagcgtgccaagcggcgctgagttaaagagagatgattatcaggaacagaaggggacgacacacagatgacacgacaaagtactcacgcggttggtccagtctcactttctccatcaccaacgacaacgacgttgattcgctctggcttgtccatgacggaaccaaacgcgacagcaagcgcgtatccgagctctcctccttcgtgaatagatccaggagtctcggcgttgacctgcagaaatacatgtcaatgcccatgacatccaaaagcggtcagcaggcaattcatcatatcatcatattcaaacccccacatgagagcgcccacttacatgagaagggaatcctccagggaacgagaacgctcggataagctgtcgattgatgtcatccagtcaagatacacatcagtataatttcagatcgtttgccaagtcacagagatgatactgaaaattaccgacctgcttcaatccgtccttgtctcgaccaaactttggatagaacttggagatcgcaccttccaagtagagggtggccatgagcgcagggagaccatgtccaggtcctgtggtaaagacgaacctgattgaagtttgcgacgtcagtatcggttgaagtatgagtctgtgggcagggacaatgttgcacttactccgcatcaggagcgtgtgagattaagacgttggtgtgggcgtagacaaagttcagaccctgatagccatcaagccgatgtggaacatgagatggtcaactaaagctcacatttcctgcagcttcgatcatggcaggtatatatacaagagataggaattgagcatcttaccgggcaggttccccaatgtcccaagagccgctttttgatgtttccgtgcgttagctcttcctccaacaggccgtttgatctcaaaaagatctgagcagctgcgatgtagtttgctgctttctgaaaggcgagaagaccttcgaggtcgacggaggatgcgtccttcttgggatcgagttggacaaggagctgattgacaagcgcgggatctagagaggaagccttgggtgcggtcgatccgtcgaaagcggtatgctcgaacgaacctccttcagctatgtcggagagaaagggacgaagagaagagaagagaaagaactattgattagataggactatcctttactctcaacgagaagacctaacgaaccttgagctacagtaggagccatggttcaggatgcgatatatatatatatatatatgtgtgtgttggggtgaatgtatgtgtgtgtgtgtgtgacggctatattgttcttctaggtgccagatctgattcgggggagaaacgggcttgaaaatcgatgaaaatagggctacagataggaaagacaaaggtgatacagttagaagtgaggaagaagaagaagaagagacatgagatccaagatgggatctgatctttataaaggtttcagttgaaggacagcaaggaaggaaaagccagaaggatgatgcagcctatccgtcagttgtgcggtgacccatcatattcggatgagagcgactccgcaacgttcattcgctgtagatctttcttttgatctctaacttgtctgagtaccattgattgtgctacacaaatgaactgttcctcatctagctgaacatctccctcagacatcggactttcactcgagagaaccgtatcgtcctccttgctcgatatctcttgaatcccgagctgcaagatccatggtttataagtgccagatgggaacgttgacgaatttgctcagtgacgtcaccccggttggatgactgtggcaatagattcaccgttcttctctttgcttgacagatgatccatcacacatgcattcttgcaccctcggcatcctcgggttccctaaaagaacagaatgcatgaccataaggaaacactcagaaaagaaaggacggagtagaagtaaataataaaagtaaagaatagaagtaaaggtacgcggtacaatcgtgtaggaaatttcacagaacaaagaacaacaaagtagacacaagtgtaggaggaagaacagaaagtagaggagaaataagataaaagggggaaagtacaacagatattcaatcagaacaatcactcatgctgacgagttaggactctcgattttgaactggccgaggttgggagggaatgatcgggtaggatccaacccggaagcaagcgatcctccaaagaggacttcaccgttagcctctcggaatgctcggattcgagcctcaacctctggtcggaagtgcttcatcagaccctgaatgggccaagcggcagcgtctcccaaggcgcaaatggtatgaccttcgacctgcttagtcaattccaagagcatgtcgatttctcgttcggatcctcgaccttcaacgaatcggctcatcattgacgacatcaacgtcgttccctctcggcagggagtacactgaccacaagactcatgcttgtagaacttggagaatcgggcgatcgcattcacgatatcagtctgctggttcatcacgataacggctccggttccaagaccagatccaaagtccttgagagaatcgtagtccatcaaggccttttcgcaatcgactctaggcatgatcggaacagaggatcctccaggaacaattccaagaaggttgctccaaccacctcggacgccaccacagtgcttctcgacaagttcctgtagaggaattgacatttcctcctcgaccacacatgggttgttgacgtgcccactgatacagaacaacttcgtgccctggtttctctcccggccaaacgaagcaaaccaggatccacctcgtcgagcgatcgtcggtgcaacagcaacggtctccacattcgctaccgtagaggggcatccgaaaagaccgacatcggccgggaaaggtggcttaagtctcggcttgccctgcttgccctcgatcgactcgattaatgcagtctcctctccgcaaatatctattttccctcagattcaaaggaaatccaacaataatttagtgaccggcaacaaaccatggcaacagattgatcgcactcacaagctccggcacccttgtgcaagtagacatcgaaatcatatccagatccacaggcgttcttaccgatcaatccagccttgtaggcctcattgatggcctgctggacgtgggaagcttcttggaaaaactctcctctgatatagatgtatgctgcgaacgcacagatgatgaaaagttagctcatggtcgtctgatgaatcatcccgagacaggaatgggatgagctttaccagcagtagcattcatagctcgtccggccaccaagcatccttcaaccagtttgtgggggtctcctcgcatgatttcccgatccttgcatgtacctggctctccctcatcggcattgacaacaaggtatcggggtctgaattagaattgaacagaatcaagataggtcagattccatgtctttttatgtcttttcatgtccatcaataggtagatcgggatctctgaacaagagaaagagatttttttttaaaactcaccgaggatcattctgccaaccaggtttattcataaaactccacttcaaaccagaggggaatccggctcctcctcgacctcgaagaccagaattcttaatggtgtcaatgatccaggaatctcctttgagaaggatctcctttgtcttgtgccaatctcctcgggactaggagtagagaaaaaaagccaaccgatcgaccgaacaaacaggaccaaacgcaaacaacggatgataagacggtgaagattaaaacaaaggaaggaaggagaagaaagagaaaaagaggaaagatctatcagtatgaccggtttagaggaaaagtagcgaatcatccgatccgggtaacctatcggtcctagcacgaatccagaggctaaaaactcacttgggcacccttcagccgccaatcatgtctgttgtaagcgtttgtaaagatccgatcttggtctttgagcccaccgtaatgcctgacgggtggtgcttcagatgcagtcgctagagatcggacgctgggagtgataagccgggcggaggatgagcctgcctgagagacgacgactgtatgttgacgaaatgcagatggaatcgcagtcgatgaagagatcgctcgatccgagtcagcttattctgtcttttctttcctccttctggtaaaacgactgtcctgctatgagaaagaagagaaacaaacctttaagggagcttcgacttgtgtttcgaagcatagtttctcttctcttttttgcagtgagtggatcggaatggattggaaaggaaacgatggataggatgtagttttggggtatcagaacggggtatcttttgctcagaccaatcgacggggggcttattgtggacaaatacttaagttggatttatataagtatcaaatattcaaataaaattgaaatcaaacccaatcttcaagatacacaaaaacagattcacatagatattaagtgactagatattgtagggtgagaacggaaaagatgaatctaaaatacagtgagcgataagattgatacgacagagggcagaaggtcagagcaagagatgcagcagatgatgactatggccaagcgaaagatggtaatacaatctgccggaacatgcagagggtttgaagatatcagataaagcgaagaaaatagcgagtgaaacgaacaagatagttgaatagaaggttctctaagaataagcaagacaaagctcaggtgtccatgacggcgtctgatgaatgggcgtttggagggtaagcgtcctgctgagccaaaaattccaaagacgcccgttgatctggctcctgatggcccaatccgctctccgcttggttcagctcaacaaaaggacttgataatcccagaaccccactgccatctttcagtcccgggctgtttaatgaccaggggaccgagcctagcctccagtcgagttgtcgatctggtaaggatagcgtcaattgggagggcggtctacttgaggttactgcagactcagaagacaaagagtatgagagcagcgacccttctctcttgctcggagagtcttcaggtagcattgtggtcttctggcgcttgccagagggagcaaagacgatcggtccgttcagatctggttgagttaatgtagattcaggggagggcactgggggttcagaggaggatgaggaagaccctttgatcggcgttttagatgtgatctttgtcttgacggatgatctctcgcttgcttgcggaccgccgttcttcctaacaaaaccgacatcgtcgttgatgctgtcatccgtcataccaactgaggcataggcagccagtccgccagccattgaggcacttcttgtaagtcgaccaactgtccgggctttcaaacctttcgctccctgtgggtcttgagtcgtagtgatggtaacggattggtctacagcacccgagcctgatttcagtgcgccagcagtcgctgctctaacatatggattcacgtgtgcggtcgaggagccgatgatagacgctgaccggcgcaaatttcgacgaaggttataattatgttgtggctgcggtgtactttcttgtttcaaaggagggtgagccgaggaagggggcgtagagacagtggtgggtaaagcggaaggcggaggagaggtgtgaatacaggaaggaactgggggaagcgggatagatgtgcttgttggggtgacagatcttcgaagggccgacggaggaaggggcagcgacgtcgtcaagggtagtaactctccttcatgagagaatagaacgtggcgcgtacgagaagcaagacattgatgcatcaggactcttcgttacatacgtagatgaggacaacaacggtttctgaaagactcacgatcttttcctttcttcttcgtccccgctcttaactcgagcccagattctaaactgagggctgtcgatgaaaattctccggcaataggatccagggaatccaacaaaaggggcttccctaggtcggctggcatcgacttcggtgagagctcggatccaaacatggtgaaaccagttgagtgacttggtatgaaactggtggacgatggaagaggagcgatccgagatgtctgttgcaatttagccgagaggctaaagaaagagagacgaagaagaggtgtgaggatggtaagaagaaaggtccagaaagtggtcgaaatcgtacttgagaacttttcttctgccctgactgagatcaggcgctcctgcttgatctaagaaatccatactgttctgcctggccatccctgggcggatgacgcctcctccaggtgagaacagcacggtctggtctgcctgtggattaccaggcatccgaagtggcaagaacggattcccattgggagtcgcgtacggagacatgggtatggcgagtgtgccagtcttgattgaattatgagatgagaatatatctatatgtctgtctgtctgtctgttcgtctttctgtctgtgtgagacgcgaaagcaagaaagaatgaaggcaagatggagaacaggatggaggttcagaatgaaacaatgttgaacgaccgcgcgcgacggatccgatacgtctaggccgacggaaagaaccgtccgaccggaccgatcggcaggaacgagatcgaattttcaagatatgtggcgttgtgtcacatgggacacagccttcaatataaccctaataaccgattaccttcggacacgtccggggagaatcaaccaactcgtatggatacacatctattctgctaaccatgtcatcctgctcacttgctttccctcttccatcaagcttaaaggatcaactcccactcagagaaccacatgcagacatttgcttgaccacatactttctccctacggatgctccccagatggttgagatcctgaataagaaggacgtgtcttggaacttgaccggaccgccttggccgtacacattacagatggctgagggatggatcgagcaagccgaggaaagggctgattccggagctgaacgaaggggtcccatcggtgtgtgatactctgaatcttaagagtgctctggagtgacttgtcaaggatcgatgttcatcaatcgattgatccatgaatcattggctcactaactggctggcacttccagtcatccgaacgatcaactcgttatcctccccatgcccgaagtttctgggaacgatctgcatagtaccaaatccatttactcatgtccaagatctttccctacgagccaagcgagtagcggagaatatggcgaagaaagacgacgagaagtcttgggcagtagactattatctagatccagcttggaacggaaagggtgtgatgagcgtacgtcattcgttgtctctacttcctcgttctcgaagatcacagtcacaaagcttatatttttaggattatcgtagaccgtactggaagttgtcctagagtactacgtccatcaggagaatcttgaccctcgacgcgtaatcggtcatgccttcgctgataacattgggtcaatgtccgtatctctttctctttcccttccattctcacccctctcatttcgttctctcgttctctacttctcctcctttgccagtctcttccactgacatgacatgatcatttggaaaaaaatcaaccaaacagcaaagtaatgatgaagaacaactttcaacccctttatctctctcgttcgactgtgccggcttcggagagtaaacctggtcaatcaagcgatatgtgttatctagcctgggtacctgacaagcatatcggatatgatgaatccctctggaccgagggtgtgctagagtctttccggtttccaactctttcttctggacagtagagtacattacccttgccaagacctgaacttccgatctagattttcttgtagtgcattcatatacacttggggtatctacaaaggcaggagagaggaagatgtgaaagatggagaaaaggaaacaaagacagacactctgatacaaagaaaatctgaaattgagttttctataggaaaagtctattcgatccgttccctctttcgactacggccttgtctgacggcttccgcccaagcaggtgccacagctggatgagacctgatcctcgactcgaccaacacatcttccatctctctatccaacagacgtcgtagcttgccatcgactgaaacggatccagtctcatccggtgtagagagaacaggaaaaagctcggcgtgataaatcctagaggcttcatcctcagctactccaaccaaagattctacccgatccatccatttcccaacagagttctcttcctccacgcttccacctgatctagattcagtcaccggggaagggaagagcaacggcccgagctggttgatacacatgttgagtgctagatagagttcatggagaaacaacacatgttgatgctgagttctcgacgggaacaactttgtcaacactctattcgggaaaggatgaaacgacgatagatccccatcggcggcgtaaggagtcggaaaaatgagaagggaaagctcgagaaggaagagtgtagggagtgtcaagtttcgccactgattttcggagggagaagaaacaaagaggggcacaaataattcatcaattcgagattctgcctcgacagataacagaagacgtctttttgaacagacaacgagatgaaaaagaaaccaacatagatgatgttagggcctccgttcgagatgagcgtcataaaggcgagaacaccggcggagacgatgtagaacatgaaactgcccatcagaccacggaagagatattctcgctgtgtaaccaatcctttccagttcatgacttgctctccaaacctgagtaaaaaagaagacggaagttaagacatgttgagaccatacgaatggcaaccaatgtagcaaggtccttaccggtcatatgcccaccgttttccttcgtcactcaacccatcaaatgctcttctcccctcgacaaatctttgctcgatctcctccctacctccgaacaaagtatccctcactcggtccggatgattttttttcgcccacgctctccacccatccttcagcaccctctcgactccttcttcaccctgtctttcagggctaaacgacgatctgtctagcccaaggatctggtaaaagttaccagcagacgaaagccgaagatgggatgagagtagagtgtatgcgatatacaacgaaacaaacgcgatatgaatacgtcggatgttcttcggtgtcttgagcaaagaaggaagagggagagcgtttatgagaggagggaggagaacaggcgcaaggtgggtaactggttcgacaagggagctggataggccgtcagttctggagcgaccctcgatctgatgagaatgaggaaggacatactaagggtcgacattgcgtcttcagtatagaagtggcgaatgtgcagcctggcattttttttacagagtatatgtaccaaaatgaggacgtgtcagcatctcagaccgaatacagccatcaaaagtatgaatcccccaaggatcgttctgtccgctcagtgaacccggaggtctcttgaagttttaaatcaaccgtcctccttgccgtagttccttatagcattactcctggaagaaacccgcctaccacaatcaccctcttctctaagtaattgttcctttctgcttcgtctctctctatctctccttagactcctgcattctcttttctatcaacctgtttcctcctatatcagcccaaagatgctccgctctttctgaacacctcctcgccctccgccaagattatgagagctcaaaagatgtctgctccggaatcctcacgccgatttcctggaaaactctcaggaaaagcgctgaaacggtgcaatccttctttaaccactctagcaatccttcgctcttcaaagtctgaaaccggttcatttctgccccttgaatcagactcagaagagaaagagaaagcctaaagggaaacaaaaaggtaggataaatgtcccctccaatagcaatgcctctgctggttccaccccgcatcccttggatctatagggaaaggggctcggcctatcctggagggatttaagttgaaagagatagaacgaaaaagaaataggagagaaatatgtacagtcgccctttaccacgatcactccactgaaacgaccaacaaggtcaggaggaaagggtctaaaaacgagtcttgtggtttgatgaccatccggccttacatcccataagacaactcgttctgaccagaagaaagaagaggagtgtctgctcgggtagaagctcttgcgagagagattcgattcggacggtggaagagggatgtcgagaaggcaacggaaaggcaggccgtctcattgttgacactgagataggacaggagaagagagagaaggcagaggcaaagatagagaggttgaagcagaagtgaaagaaacgtcacaaaaaagaagagtgtaggagatgggttgaacgggagctttccacagagttgagcgtataaggagacgacgagaaggagctttcatcccttttactaaataccatctttacggttgctgcctccttggggaagagagttgtgagaacaagatgaagaaaaggagattggtccttacacaagatgtctgagagagttgcctgtacagagtgaaagagagaaagagcgaaagtgaaagtgattaagagagaacatgagaaagagggaggacacgtgacattgattgggaattgactaagccttagtcaaattcaaaaaaaaacataaattctttccgggaacttccggctcttcccggtttccttcataaccggtcagttccatcgagctttaagagaaacatccatcgtctttgcatcttctctttcgccttcttcctacaaacatccattctatcaataccacaacctttggctcatgctcatcaaaagagtgccaatctcggtctccaggcgatcgcttacccagttgatttctatccagtcttccgtcgtctctcctatcgtgagttcctttccctctcgtagctgtttccttcctattaggttcttctctctttctgtttccccctccggtacagggctgacggtcgattcgttaattctaatcccttaggctatgcctcctaaaagatcagcctcaatagccacaccaccgcctcctccgaaggaggaccctactcagccggccatgcttcggttccaaacccatctacctaatctcccggttcctcctctcgcgaagacgctcgacctgtacctgacgactatcaaaccacacttgacgcccgagcagctcgagacgtcgaccaaggtcgtcaaacagtttgaacaaagtgaaatcgcaaagactcttcagaacaggctagagaaccgagcccagaacgagggcagagacagctggctgagcgactggtggaatgaggctgcctatatgggttacaggttcgtacgcgctctcgaacgatgagctctctatgaagcactacaatccatgcttacgacagtcaattggttatcctggtaaaaaaatgatacagagacccggtcgtgccgtacgtaaactacttttatacacacagaggaacgggcggagaagacaagactcaagctcgacgagcagccgagttgatccgagcgactgaggtcttcagggacttgacagaaaggtatatcgttctggattcgttctaccaaaccataaaagattgatcctgattcatcatgcgccaaactgttgctcagccaaaacttggagccagagcgggttcgagtcactccgctttgcatggattcttacaagaatttgtacgctttctctcaagacagtatcttcttgttggagtaatggttattctcctaacacaactcaaatttaggttcaatgcttctcgaattcctactattcctattgatacgagcaaaaagtatcctacagcaaaaggtcaaaacgatcatgtcatcgtcctgagacgtaacagaatattcacagttcgagtcggagggctaggtgttcaagaaatcgaacggtgagaaatcttatgaacccactgattgcgttgcttagtgagatcatgctgacccccgattaaacatatcaggctgttccaagaggtgattgataccgttggtgacaaagaaggaccacccgtgggtttgctcacgagccaaaacagagacatctgggccgacgttcgttcgttccttctgtgtacgatatctcgtctcttgacgtgtctatggctgtctaaccgatcaaaattccttctacaactcttcaggccagagatcatctcatctccatcgctccatctaaccaagatatcttggagaaaattcagtcatcaatattagcagtagtgttagacgatgatcaccatgctacccatgctggcgggcagagcgagctcgaagatcgaagctggaacctatgggttggcaaggatggggaaaatagatggttcgacaagcatcaatgtaagtcttgttctcatatttgcacaatgcgcaaagctgataaacgcataacgtttctccctcatcccttattagtcatcgtcaccccctccgctcactctggtttcaatggggaacattccctcttggacggaacacctacactcaggatgaatgagttcgttcttgcttcgctcgcccaaggtcgaattgatcttgagccgaaggggtctgccgcttggggagagaacggaagaaagccggtcgagctagagtgggcgctagatgacaaggcacagagggatatcaaggaggcaggaaaggctcatcgagagctgatgggccaacacactatggaggtttgtggatcctggtttctttgtacctgcttttcatatgtccttgattctaattgcgcttccaactatgtggggccttacaaatagggacttcactacgagggatacggaagtgagatcattttatcacttgttcttctctatctcaggctctgatcaccgttgtttcctttcatttatagaggcccttatcaagaagttcaagacttctccggacgcctgggctcagatggtcaagcatttagcgttctacaagctcgagaaccgaatgggagtctgttacgagtctgctcagacccgaaagttcaagttgggtcgaaccgaagtaattcgaagtgcttctcaggaggctaaggagtggattgagagtatgtttagacaaggagaaagcgtgcgtctgctggctgagtttttagtaaattgtatcataatacggagattggaagctcatacatcttctctcaacccgggtcaacaggacgccaaccgagtagctctcttccgtaaagcggctacgcgacatctccagtacgctgcactcgccgccgacggccaaggtgtcgaccgacatctcttcggacttaagaagctcttgaaagaaggcgagcagatgccagagctcttcaccgatgtggctttcggaaagacgaatcattgggagatgagcacatcttcattgctgagtgactaccttgatggatggggctacggagaaggtccgtccattcatctttccttcattgattcagagatatgcgcctcctaaatctaaaatttgcgtgcttaataattaaattccttccctcaattattttgggtttcttctagttgttcctgatggatacggtctcgcctactctgttggtgacaacttccttcggtggatcatcacagcccgcaaagacatgaaagcgaaggagtacaaggaatgcctgatctgggcgtgtgaggaagttcgagagttgatggagcgagcggaaggaagtgccgagcaggggaaagcaaaactctgatcttctcctttgagtgttttgcgcttgagtctcacataaaagctctgtcttgatcaggatgcagaagattgagaggagtatttgtacgatccttctcgttgtagtctaaagttcgaatttcctttgctgtgttgttacaaaatacttgttgtcttcttctttcttctttcaacgcttacgtttacacagaagtgtatcgaaggacttttgcttctcatcttccctttctttctctcttctatatctctccttagcggttaccctaactgtaaatttcattgatatccatgtgtctacacaggttctctctacatgaacgtcatgagttcaagttagaagaatgttgtttatgagagattatcgcggttaaggcataggcgaacaggggcttccttcaaggtagtaagatcttggcatatatgatcaaccagtaatacaacatatcatcaaaactattcatcttctaagatcaatactaaattcgggatcaaatgtagattgaaactcccttattgagtttaaacttgagcgcgaccaagggttcaagaagaacagaagagacatgtgttgagagaagggcacgaaggtgtatgtatgacattctgcgcaaggtagcctgagggaccaggctgtctattcgtcttcgctgtcgtcttccaacatctctgtctctctgcgtttcgaacacaagaaaaacacgagcgggataggcgaaggcagagaaagaaaagagaacccaatcagtaacgaagggcacgcagacagacgaggatagaaagacgcactcaacccgatgaagctctctctccctcttgagtcgtctcttctcagccgccactcttttagccagtgcgcgatcttcctaaatccgcccgaaatttcaggtaaacaccgtcgcaaattgcattgttacaagggtcagaaacgtcttcaattagagagatcgaaacatcgcaagaggaataagggaagaataaagtaaagacgaacccgtagagagtctaggttgatcatcgcaacgcatcccgtttgaggacactgtctacttgaacgtccaatgtattcgtatatgttcgttttggaaaatgaatgcggacagaccgttctgtcgacacatttgatacaaaattcatcaatgagtaagaaagcggatagatggttagcttaatgcgtcgaatacttgagtggtagatgaagacgaacgacgaaacagggtcgaccaaaagggtcaaacttagcgggcatttgaaattttgggtcatgcctcccacttctatctcttcgtccgaatccgattcagctgtacgttcatctatttttggcaaatttagtgggcagaagagatatcagttctcgattatagaagctaagaagcgagaatgttctaggacggaggtttggatagaaatacgagcctcgagggaagaatgtagacataggcagcatgggctcttgggcatgcgcggattcctatattacatattcagaagattagtctctataatgttgacaacatcttgaagagtaatgagagttacccagacagcctctcgaaactggatgtatggctgacatttcatatcttgcatacacaaatgagtgtatatatcggtcagtccaagtcacttgacaaggctagcaaagaacaaggacccgtacatcttgttctgggattctgacttgtgtattcttcctctttgtcttgtgaagtcttctgataaatgccttgcgcatccgtctgagcagtgtgacaaacccaaagtccatagtagatcagcttaacattcattacaaccgaacgaagttgaactaagagacagactgaaaacgagaaccagaaaggactgacaacttcttctccatcttgcaaggcagtgatcaggtctttaagcacattttgtctgatctgaacgaatgcaagttcgtctagcagttgtcgaacggaaccgtcaatctcttcgaaattgctctagttagacaacacattcgggaaaaggcgcaagcggttaatcaatgtatgcatctatgtgttgatatcaagaaagagacacagaaaacgaacggagtcctcatcgagattggcttcggaaaacagagtcgctgtgtccttgaggttcaacaaggaggcattgagggctttgccaatgacagcccaatcctcatgtaatttattcagctgctccccgcacagacagaatcaaggaacaaataaggacgtcagagggagagagaggtgcacaaaaagcagagccatcaaataagggggttcggtctcctactatccttcttgacgaagacgcagatgttcaagacattgaggctcttgaaaggtagctagcgacaggttctggctcaccttagcactcaagctcccatcgagtgtcagaggcctcggctgaaatgtctcgactgtgaggcctctttgtgcaggagtttgaacagtggtcgcactttcatcatgctcttcttccctcccatcaacggttgagactttctcccggcgtctagctgtcgattctggatgcgagtctccaggctctactttgggtacctaggtggatatatcaaaggaggttttgaacataaaagtgatcgaaccggcagaaaatattaagcaagttttcaaggacgcaacaacatgagatgcagacaccgggcctcaccttaactgctctggccatggcgttggctttgatgaagaatgaccgagctgaagtagatgatagtggaggaaagtgaataagagacgcgtcttcttttggacgtcacacgcgtaagcgcgccagcttacgtcagcaagtcataagtgactaccctatgaaggcaattttttggttaacttcccttcctctcttcttctccctttactcctaacaaccgatcaaagctggagtcttactcacttaaaaaacgccatagatctcagccatggcacccagattaactaactcttcatcaggttcatcaaggaagcgcaagacgtccgaaccctccagctcctcgggcgcctccacatcgaagcaacctcttgaaacccttactggcaacctcgttctggcaggcgacgacgacgaagagccggaggacggagagggggctgatctggaggttgacgacgaagaagaggcagaagccttcccggagctcaacttagaggattcagatgaggaagattcagacttcgaggctgatgatgagtcggataatggagtattggaagatgaagaggacggctcggagtctgggtataattcatccgatcttgatggctcagacgatgaggatgagaacggagcgtcaaattccacacccggaacgtctttcacttcctccttgaggatggccgaccgaagaaagactttcgagagggaagcttctccgatatcaaacttcattcaggaaaacactcagaagccggacgagagggacgcttcgatcgtgcccaagccattcgacccgtacaagggacgaatggaggtcagtgagctgacaggaaggccaaagatggtttatgaagatatcgaggctggatatggaagtgaaagtagtactgaggatgtaagtatgcatatccgcgtaacaagccttctaaagatagatatatactatcatatctgaacgtgactggtggtactaggctgacctaactcacaattatcaactgttcaaacttaccaggcccccaatcgagtaggagatattccagaccattggtatgatgatttgcctcacattggatatgacatcaatggaaagaaagtcatgaggccggcagcaggggatgagttggacaagtttttgtctaccgttgaagatcctgattcatggttagtcctctccttcctcactattccttaaaaagccaatctttcttataaaactatcatacacaaatatccttcgtccttgaaacaggacttccgttcaagataagcttttgcagactaatgtgaatctcacggatgccgagcttgatatcatccgacgattgcagaagggagagaacccggatgagaactatgatccgtacgcaccgacagtagaatggtacactagccaaacgatggtcatgcctttgaacggacgagccgagccaaagtcaagattcgttgcgtccaagtgggagcacaagaaggtacgttctatctttgacttggtcttccctatagatgatatataccaaattaatatactctgttactgatgttgtgatgaccgtttttcgattccctctaatagatcatgaagatcgttcgagccattcgacaaggccgaatcgttcctcaaaaaccttcagtgtcaaaaccacagttcttcaacttgtggtctaaccaagatgccgagcccgctgcgcacgctatgcacatgcccgctcctcaacaacgtcttccagacaactcagaatcatacaacccgccggctgagtatttgttggatgaggatgagcgtgaggaatggctcgctcaggagaagggagatcgaaagaaggactacatgcctgcaaagcatgatgctctccgaagagttcctgcttatcacgaatttgttcaggagaggtttgagcgatgcctagatttgtaccttgctcctcgaatgaagcgaacgagattaaacattgatccggaaagcttggtaccaaagttgccggaaccgaaggagctcaagccgttcccgacaatgagcgggatgcgatacattcacccaggtggagtcagggtcaggtgtgtgagtgttgacccgacaggaatgtgggtcgctacaggcgcggaggatggtgtggttagggtctgggatctggcaaatggaaggatgagttggaaatacgaggtcggcaaaaccgcggtgttctcgttggattggtgtcctgacaagtcggttgggttgatcgctgctactctgtacgtttgcttttcttgctttggtcccacttgatttgttgtgatctctcttctcatcattggacttttacgtgtcatgacctgttcatagcgaaaacaaggtcgtcctgctttcgcctcttccattgttaaatcccaatctagctcttgcatcatccacaaccgctcttcgtgcggtcactggagcatcgaccgaagcaccaaaggcgaacgagattcgatgggcccgaggatccgaggttgagcgaaggaaaggtatgcttgtgttgattgaagttccagggacccccaaacaagttacctggcacaagaagggagattacttctcgaccgttgctagtgatggtatgttttgtttttggcttacccttcagaaatcccttctgcctccttcggccacgaaacgctgacagatctgacatacatgttgtttcttcatctgctctaggcgcaaatatgtcggttctcatccatcaactgtcgaagcatcagacacagtccccgtttaaaaggactaagggacaagtgcaaaaggttgctttccacccaagcaagcctcacttcttcgttgtcgtatgtgctttgactccacctatgtttcgggagataagatcttcgttactgatactacttctatttgcttccgcattaacacagacgcagcgatacgtccgactctacgatttggtcggtcaggcgctcatcaaaacgctccagcctggtctgaagtggctctcgtcaattgatgttcacccgctaggtgataacttgatcgttggttcctacgacaagaagctctgttggtttgatctagacttgagttcgaaaccctacaaaaccctccggtcagtctatcgactcccttttttctctcttgtgtcttatgttctgttctgacgattgttcaatatgacacctctatccagataccaaacccgagctatccgatccgttcactaccacaaatcctacccgcttttcgcgtcttgctctgatgatggaaccatcaacatcttccatggaaccgtctactcagatctcatgcaaaacccgctgattgtccctcttaaagtgctccgagggcatggtgtgaggaacggattgggagtgcttgacctgaagtggcacccgacattgcctatgctcatgacggctggagcagacggggaggctaggttgtggatgccttagagagcaggggaggacgaggacgaagaatggccgaggaaacttgcgctttcttcttcgatccaattttattagtcgtagtattttgattacactgcatgctatttcattctttctattgagaaacctgagactggtggaacaattattgtgttctctgttttatatgatcacgtgatatctcaatcctctattcgatgacgagggagggtaaatcccggggagtcatcttttcggtctctctacaagccatgtcgcccgaatgaaccctcaaggtcgtcaggaagaatattcatcatatcatcacagtgaaggcgaagaagaaaacgaaaatatcatcgacctcagtcagtttgatcactctcctaagacgacagctctctcatcgacaccatcagccgttgttcccgaaccatctgaatctataactgctggcttgatgagacgaatcttcaccgttgtcccgccttctccaccttcttcccccgctctctcctctgcaaccacgtctcttgtgtctcaaggaaaggctaaggctagagatcaaatccatagaccgagcggttccctatcctcccatgtggcctccaagcctccaactactaatgggactgaggcggccgctttgaatggactcaaaaatagtcttgaccttgggttgggcggttggtggtctgggaagggaaaggcatctactacgaatgatgatgagatggaaaagttcacagaagaaccagacgagtatttgactttgttcgacgagagagacgtcatcaggccggtgcctcaagcagtctcatcaatggatggcgcaaatctcgacgcgtcttcctcccaggggtccttatatgacggatttccatcgttccaccatcatttaacccaggagcgatctacgtccccagacgtcagctccagattgtccgaggcgctctcttctacactcgatgtgccctcctcgagcgcgcccgcctcggttctctcatatcctccccaagctcatatcgcgcctccttccccgtcgtcttcacgtacaaagtctttgttctcgagccgtcagcctggtagatctggtccatttcacgcggttcatagaggtccctctccagtaccgttcttacatcagcgatcagggtcggtttcatctttagagtctttaagagagctgcaaaggaaacaaagcgttcaagagcagcaggcaagagcttttggagtaagcgttcctagcgcattgtcagcctccgggctcggctggtggagggaaaataagacggttcgtttaattctttactccctaggtcacacgtagacgactgtgaagtaaacatgtacatcttgacctggggggacggcatacagatggttgatggaatgctttcagatgaagataagggaagtacggtcgaagaggaggaggcaaatattgctcgaaaatgttcgtccataatcattcgtatcatacttcaagagtggtttggcaaaatagctgatatatagatatccctaaagatcgggcgccgaagaatcccatcgtcttctgtcatggagtgagtgaccctcgcttcaacaaaaaaagagagaaacacttgacggtacatctgatcgctgattgatctgttctcttcttcttcttctgttttctctctcttccgtttggcgctccttcagttattcggatttgatcttatcggtcctgcatctatgcctactttgcagatatcacattggcgaggtatccgagaggtcctcgaagccaatggggccgaagtgtttatcggtcgagttcctgcaacgtcatcgatcgaggagcgagcaaacatattgaaagaagagattgagaaaaaatttgagggaagggaagttaatttggtcggacacagtatgggcg

SEQ ID NO: 1945 - DNA, 16438 bp, Xanthophyllomyces dendrorhous
caggtatctggcctcgaagctgaagccaatgaagttcaaagtattatccgtcaccacggtcgcaacacctcaccgagggtctgcttttgcggattatatgatcgatcaggtcatcggacgtatgtttctctcttcgctttcagtgttcatcttttttaatacccggatgagctcaccgaccgcttgcattgaaactatcaggtgcatatctgccatctgttttgtcggtgatggacgtccttcgattacctaaccaaggagacggtcgggcattcgatgcgttaggaacaatgtccatgtcaaagttcaatattgacgtgcgtgatgacccagatgtgatgtatgcttcttggggagcaagattcgatccatcgtacttcaacaccttcaagtatgaacgccttgtcatcatcaaccttgaggtttaaggtttagaactaactctagcatcttcgttttgtcaccaccattgttgttcaaaacttcagatggcctcactctgtcatcttccggaaggaaggcccgaacgatggtttggtcagcgttcgaagcgcacaatggggagaatatatgggtactctagagaatgtcaatcatctgtgaggtttttcttatcaatttgactttcttgcccagagcggagtcttttatcctgtatcagctgctgatcacagagctttgttaccaaccctgtagagatctagtgggctgggtcaaccaagtcagatatacactttccgaatggatgggtcagcctatcaagtttaaaccggctagtttctgtgagagaaagctttccgtcatctggacctagacatgccttattcgttgcttccttctttcgtgctactgatccgacgaacgctttgatgtacgttatcgtctttcttgttctgtatatgctttcttgatagatttggaactggtgagtggtttgattaagaatcagaaatgacctcgaaggtagcactgaatggctgaccaactccgatgatatcctgtgccttggtccgatctctagggcgacatgttagctaagagaggattctaaagaaccgtatagatccatataccatgcatgtttgtagagagaggagcgcaagaaagaacgcaaacacggaaaagaaaacgaaagaaatcaaaacaacagaagcgtgttaacaaagcagacgactgcgcaggatttcgcatgagaagtcgtttcatcattcaccaacaatcatggctgtcatgacttccgtcttgctcatcaccacatcgtccttttttcctcctttcctccaccctgtctctttggtctcgttccctctggctctcgctcttgctcgacatatcttcgttgtaagtttgatcggataggttgtaggaatctttatgctaacgtctgtttcgtacacgattggtcgtcaacagatagctactttcacccttcggtactcttctttctttaagcccgttcaacatcgagtcctccacaccgcatacattcaggaagaacacaaaaaatagccactgaaccttatactaccctcacacacagaagcatcacccacttcggttcacgctttaccttgaatctttaaaaccatgtccgcctcttctgctcagttgtacgtctccttccttgtcttcgattcctgtcaatggttcctggttcgcagttgaacggtcaggctgtgcccaagctgatttcaattcgacttttcaattgcccctgatatgtgtgtcatctctcccgatatctcctggtgtcggtacgatatcgtcttgaattcatcactgtcctcttttcgatctacaatctgggtctatattgggctcaatctcgacgaacgatcacaaaacctctgcctgtcctcttcacgaccttatgcgattctacttgccactggtgacttctaccttttgcgacttcttttttctttggccgaaccgacttcaagatcagcctcagttactcgaatcctctctctatccaactttccaaaagagctgaagacgagggatttaattgctgcgttctcagaatgggaaggcgaaccgggtggatttaaagtcaaatgggttgatgatacgaacgcgctcatagtatttggagaggcagctactggtcagtttgtctggtgttctctcttctattctgaaaaaagtcaaatccggatagatcgacgagtcctcatgtctcgtcgtccttgttgtcctcaatctatacggtgtatcagccaagaaagcataccttcgaacactacttcaaccccactcccacctcaccgcggaagctgtcgttaggccatacgacggacccgatgcgcagaatatcatctcgaatgtcaacgctcggggctcaacagcggccccaggaacaacaggtacaggtagtaggcacggacaaggagcaggctccatctctggacgagagtacgtacactcagtcatttcatcgtcttcgataaagttatatgcgtataagtttcatgttttgttccaagagattactcatttaatcaatctgtacatacatgcgctatctccagctcccttgctcctgccacgacttcttctcatcatcgatctccctctttcggaattgctcctcctatcgctggttcccatcatcgccagtcttctttctctcacacccgaatgggttcctttggttcctctaccaaatcatggggtcccaataccacgttctcgtcctcattttcgaaaccgtcaggaggcagagcccacactacttcttccagtagtggatcgggctccggttctcaagaaggagaccatactgcagtcggtggagcggatgctgcactaggagagatcgagaaagctctgaaaggcgtcacgacaaggggtgctcagattctagggccagggcatatgatcggtggacagggacagcttgtctaaaccctcaaccttcttgttgatctcatcttctcttgcttccgatctcttttttctttcctggttttgttctctaggttttccttgttccttgtcttttcctctgaagcaaagcaataaccgatcgatcaactccccgatgccgttttcttctctttctctatctctgacatctctcggcttctacataaccagttctatagtctgagctgctttgtccgtctcgatttggttcatatcttccatatcatgcatcttgatcattcgatcttttccttatcagcttctctatctagccttctccccatctatttccgtcaatctgttcagttcactctcctttctatctccagttttctatttcacgctttctctcgtctttactcacctctcttctctttctctctctcctctctttctttgcttccctggcttctttatcgctaccaatcatgaaattacgagaacacgttccgattgttgataagccgtgaaggaatcaagaacgtgtacgttgagaagatgtccgggagaacacagttggtaggtttgatctcatcgacagttctcacaagagggaagacgagaatgaaacagattcattcctcagtcaaaacgaatgtttcttcttcctttttttaaaagacatctctgacgcaatcacctttccgagcttggaagattatggactgcgtgcgaaactggatttttcatagcgcgtgagccatatcgagtctacacaagatgggcgtctttccattcttcaccagcctttccaagtttcatgctgaagtgagatatgcgcgaggtagaggtcacacatcgactgactcgatttgattaagcaaatacgcattataaagattctaacgaataagaagagcaagagcgagagcgagaaacggagcaagcgaggagaggtaacggataaacaatggcagatagtacagtcatagacattatcagcaataagaaagaaagaaaggaagattcataagtcttatcaaagagaaaaaaaagagaggtgggagaatagcctcataactatggaagccgtttcgaatcatcccatgatcacttggtgcataccgccgagctcaatcaacattgccagcatttctgattcgatcctcccgaactaatctcttcctcaccaatctttccatctcgtaattcaaagcaaacgcccaagaatctctctccaattttgaacgcgctcggagtacgatcttcttgtgcccatttttccccaagggtggaggctgaaaggaagcatcatcttcggctcgacggctgtatttctgggcagatgacgttaccacatgtgggcggtaccagatcaccagacaggtatctatcggcagttggcatcatgagtggtattcgccaagctgtcagagaacaaatttcaattggtagaggaaataatagcaagacttgacgtaccatcacttccatcagcggtctgcagtccgtctgcgtatcgtctcaactcgcctgaccaagcttcttcgttggacgaccttggtgtttcgttctgggccaacaagcctgtataaacctgagagtgtcatgaagaaaaccagagcgatcagcatctcgcactacgtcccaataacgagatcctcgttttgctcacatatgcatcaataagtgagatccgtcgagtgcgcacatggaacgccgtccctaaacggaacgagaactggaccagatgtccataacaaagcaagatatgtgtgtttctagatcggtgtcacagagatggttcaacgtgagttctcttgcagaatgtgaccgcactgaaatgacaggatacaccaaccgatactgtctcgaaccccgcttgatgaacagtcgtccactttttacgataggcaggcaaccgttgatgatgcaccagttccctgtaaatcagatgtcataaccgagtatcagtaatagaagcagaacaaccgatttccttcggaaggaactctgtcgcgcatcaacaaagttaatcactcacagatagtatccatgtgttcaggcggatcttcaggatcttcgatttccctatccatttcgtcagttcgtccggagagaatatcggatacggctatgtgcttgatgcgagcacattccatttccctctcagctctacatatgtatcaagaggtatagatcttgttgaggttctggtcatcgacagagttgggtatacaaaactcactgctcctcaagtttccggacccaatatatgcttagagcgttaagctaaataaataccaaattcagatgagtatatcgaagagaaccatacaagaagaagttgttgtattttaacgactcactcgatccacccattcacgggcaataagtcttgagtgggcctagaagaagaagaaacccccaggtcaatgtctgacctagtcaagattgacagactagacactcacttcgaataagactttctctccactcttgaattccacttcgaacatccgcgtttccctcaatttcttctgttcatgcaagccagtgcccttaaatacgccgtctccgccttcatcctcctcgtcttcactcatgctctcccaaccaccttcatccccgctagtgctatgcgtggagcctgaccctgtaaacccgtttgcttctcgggatttaggatttcctttctttttaacatcgcctgtcgatctgtaacgacggacttccttgatgtctctcaaatcaatgaaaccgttagaccccaagatttgctgaatcgctcgcttgtgttcgtgaaaaaggaaatcgtcgcgtgtttcaaatgaaggtgcatcatctgcggttggccgtctaggagggtgtgccttggaaggactgcaaacgaagagatgattcgcgctaaagatacccatgatgagagagtgtaagttaagagcccaggttgttcgaatgccaaggagtatacttcacgtactgggagacgaagtacgtctgggttctgacttgagtcttggatttgattcgatagacgaagccttctatgctagtaggctcggtgaggtggacctggttcttggtccgaacaaacgggacctggtgtcgaatcgtcctgagttcgagtttggaaaaaactcttctgccttggactcgacactgatagtggatatcaccaataaacagagatatcggtcagaaactgaagagcatacggaaagagagaacgggtactaaagatctacctgatacagtggtccagccccagcaaggacattccagtcccgtttgttgcctgtcacatctgtgtctgcccaaacccaatctagcctgctttctcttctccacgcaagtgccaaacgatcctccacgccttcgagctcatctccgtccgagttgaggatcccggaggtagtcaagagttccttccatgcaggaacgtccatcatgactttcgcgcagatgcgaatcaatttccgtctcgtcacatgccgaagaacatcttccatgctgtccactcctggatcctcgccaatctgaggaatcttgatcctaatccttgcgcggttcacctttggaacgtgaatatccaagtatgggggaggaaagttgaggacattgagttggcaataagtttcccacatccaatcaaccgaacgagaatgggatttaggccgaaagatgaaaatcgaggttcctgggccggatctgattggcattctggctcgaaaacgcgcacctcgactatcaggtttacaaggaggggtggtcaagcaaaaagtgtagtctgtctgagagtctgttataagagacaaatgacataagatgattattttgaggatcagcacccagattctgcagactctcaggttgcgctcgacttacagagagacaacgaagtttctttgtgaagccatattacataggccaatttctttttccctacaaatttctcttgaaaaggaaatgtctgtggaacaagaacagaaaaggaggtcagtctcaacatgtatagaatgccccgataagaaatgagttgagaaaagaaaaaaaatgagaataagctacacatacccaattttgccaaatctcgattcttcctctcctcatgaccaccatcatctcctcccaaggctcacttctgttggctggctcttgacgttgagtataagcatcataaccgctaggcaagctcgacaagcgtgaccattgtaccttgacaagcattcgatctttctcgatgcacaagattaaaggtgtttagaccaagatatatttatacgaggccaaaatatgttctctgagacaatgacatacctctcaagacaacatcattcggtccaagatctctcacctcttcgtcttctgagctatgttccttaccgtttgctatcctttgcaaatgatcctgactctcgactcctgttccgctcgaccggttgagaacttctcttggatccgcaggagattggtctccatcgagagtgtttccccattgagcaaattcctcgtcattcatcctttcttttgcctttccaggtagcagtttgcttgctaccgaggatatattggacggagggttgactggaaaacgaactgaggttgactgctgattactcataagtcggttggcgataggtggaaataatccgccaagagttggctttctattaatcgccgggaagggaccgttcaaacctgaagaagcgataggaacatcataaggctgactagattgcttgagcgcggatcttagaggcggagctgatggcgtagattgtggtacgaccggcaacgaggtgatatggtcttgggaggaggtggatgcccaaccatcattcgaggccaagacaggtgatgcaggagtatgagaaaacgtaggtaaagaggtggatgtaggtacaatgcgttcgatgctgatattggggggcatattgatgtccttggtcttgtcgatagacatgccgactgcagacacactagagaagttcctagggcgacgcccggtatggtatggaatggcttggatgctatctgcaaaagaagttttgcgttgtcgggagaggatcgttttagaaaacgaggcggacggtatgttcatggccgaggttgctgagctatcaggtatacgtaatgcagcgccaacatctgatgctcgacgacttctattgacattgaagaatgtaggttgggcagggtcgagtgagtgtatagaggattgacgagagacagggcgtagggagtctgtgtcaagctcgcttggatcccagtcgcttacgtcgaggtgggtttgagcagaaacgaaagattctgccccaccgctcgatgtggagattgtagggaagagcggagggatcgagagattatcaagattatcaggactcgagactagaggagcatcttcttcgtccagtaatgttgttcgtagacctcggcgtggagacgaagtcgaaggatcactgaggaaagctcgttccgtatttgggttgaacaacccgttcggtagtaaaccggaccttgctctaggatgcgcgacagacgaagtagaagcacctctcttcctcgttcgcacacttccttcgtcaccgtgccactttatcgtccaccaccctaattgatccaactcgtctacttcttcctccgtatcactattcgcttcatcgtcaatgttggtgtcatcaccctcgatcttgccgtcttcttctagcatctgccgagcccagctcttcatgtgctctcgcttgcggtgcctggtttttgcttcaagcccatcctccccccattcggattcagatctctcgcgtgttcggataaaacgacgtctgcgaacgatgtctcgtcttttaagtctcctagtattctcgtcgcctacatcgactgtcgcagtggtggctgtgctgtcagaacggagacgagtatgggccattgattcgtgttctccatggtgcggtgaagactctttgtgtgataacgggccgataaagactcgaacggtccggtgagggttgctaggcatgcggtatggtgtttttggaccggacgacatcgagtgagttaaacgaatgagccactgctcgatccagaacctggttcggtcacacaattaggaagttctataggtgcgcgaccagaagtcgaagcacttaagataacaaaaacgagagaaaaggaatgagaaacggaacaaagcagatacacaagaagaagcagagtgggtctctgttccgagtttctttggagctggagaactatgttgagttgtgagagcctggacgaatgtatgctcgtggaggagaacacatagatgggaaggaatatagaacagcacttaccggcaaggtccgatcagagaacccttgaaggaactatactttctggcttgccggaacttaaggaagatatagcttgactcttactatctatcagagaacaaagatgatagatgtcctcttccgagagattcgattgatgcttgtggccgatcgaagaagaatgaggcttcgatggatggttgttatggtgtctgatggattccgcttcagagaattcattcggccaaccatcccatcaacaactccgagtgactgacaaaggaccggataacgtccactctggaaatacacatatatacacccatggtatgcttcgtcatgcttcgttctaatctatgtttcttttggagtcatcatgggatacgattaccttttcttactttgtttctttttgaccatggcctggtcatcacttctctactccgtgtatctaactaggaagaaacttcgagtcgactctcatccctgactgtcgccgaacagggtgttgagcctcgtcgactgccttgcttaccagcagaaatgttcgtgtgactttcttcatccttggagccatcttcgaaggtcattactgattaaacaaatgatgaacgcttagctggcgaaagatcatcatccatgcttcccctgggagagtatttgactgtggcctaacaaacagtatcgaagaacaggaaggctctctctctgggctcggtttctggcgtgtaaacattccctctcgtgagtaatcgatatcctaattgctatataatgaatagtctcagtttctgaccatgtcaaattgattgttctttccgctatggacgactatcgctcttagaacataccaggtacaacatatgtctcgtctctcgtcagtttcgggatctttgtaccccacttctctatcgggatcttaaactatcttctccaaactcgatacctctattcgcgcggacaatatttcggaatccaatcacggatccctggacactagaacagagtaccggctggaagctcccaaactatgcatcctatgctatgagattagacgttgatctcagcaggtggttgaataaaaccgacgctgaaggaaatccgatctggccggaagatcaagaagatgccgaaagtgatgacgaggacgaggaatgggaggaagaccatccgatggagctaatatcgagactgatctggaagctggacgggctgagaatgtttctttgggtttgttctaacctttgcattttcccgccctcgatgttggcgctgatcgaactctgttcttgggtcatttaggattcaacagaaaaccttcactcactcccaaacagtatccttcattcactagcaagggcgccatgttcacagaatttgaaggatctggactggttcccagtttcacgtaagaactttgatggtttttgcgagttgctcatgagcgcaaaaggtattcagcatctagaaatcggagaactgtacgtatctcgatctgttttaagacttgttttcgtttctgaccaactcatttgaattgtgttgtggcacaacagtcatgatcatttcttcatgccgacaaccaaacagatcgtcctgcctgatttgcatactcttgcgatttctggtttgtttgtttgtttgtttgtttgtttgtttgtttgatttcttccatatcaagagacacagactgattctcttctatgtctctctttcaacaggagatggactagtaaccaggttgggccggctgctgttcgaactcttccaaacatagaattctacccgtatttctaattgtattctctattttctgtagtatactcttttctcaagcgagcttgccatcccttaaacgactcacacattggtccaccttccatccgcatgcattgatgaccttgatcgctcttttgagagcgcatggagaaaatctagaatgtctgtctttatggtctcccacgggcagagagttgatctctgaagaacacttccaattggtgacgatagacatgttaaaatcgtgtcccaacctgaagttagtccaaatcatgtttcttgatctcttccttgtacgaccctaactcagtttggttgattcgctcggtatggactgaatcttctatagattcttggagcttgatatatttgctccgcatccgcttccgcttgatatgagcccgcatcgatcgattgaacacatatcgctcggtctggaactcttaccgaccaaagaagatcgtatcgagtttgatgtttctccaatggatcaactcgttcgatcaatcaccaagaaatcgttcccaagtttgaagagcgtacatttgttgagcgctgatatgtcggcggtgtttgattctgcaaagggaaagaccggttggggaatgttaccaggatggtgtaggtgggccaagtcgcaagggttcgatctgaaggatggctggggtgacgtaattagagaagaggactgggcttggctagaggtgaaagcggaggtgagtatgaatctcgttcctcacaatttctgttttggttgatatcgactctgttgacattctgttcaaaactatttgccatttgacccttgggataaattgaacgcatcttttccattgaaaccatcggagaaagttggatagctcggctgagtctctatagatgaatgttgaatacagcgaaaagaagctcgttctagattctgacaattagatacctggtctacgtcaacgtcattccagactaatttaattcatctagaatccattctattacaagttctacaagcgttaccatgccttccttgtcccctttgtgggttttttatcgggcggactgaatgtaccagttggcttcttggtatagaacgcctggaagaaggcatccttgtcttcccatccaaagccgacctaaagattgacgaagaaggagcgaaattggtcaagagtgtcatcagaaacctatatatggaaatggagaaccagcaaaaaaaaaatgttgctctgatagaacaaataggcttactctcttcaggcgacctgccgtagtgatacctttcgcacaggcctcggtcaaaccaggagaagaacttaggggtgaatcgtttggcgctaacagggtgaaactcgtgggtaaaccacgaacaaaaggcgggaagtctgtcaaaatcttcaagagatgtgctaggatagggaaagcactggggatagagtatgtagcggatgaagtgagaggggtcggagatgggtatctagaaacagaatgatcaatgaatgaaggtcagtccgagaagcaacaatggagactcgtgaccaggaagagacgcgatgaagcttaaagagacagactcacttaacacaaaccaaccagattccaaatggtgtccatccttttctctctccatgatttccaaacacgtcttcaaacttcaagacaccccgcccgttactggtcgttccttcggggaacaagcagagcactctatcttgctgttttgctcttgtctggacgtccgagaaggtttctcgaatagttgatgtaggaggagtcgatggagtatatccagtgtagagcagagttcgagaaaggggcagagtgaacacggtcgggggcgtgcccaaggatgaagcctccgatgggaacacaaagattggatcgaatctatagaaagaggtgaagggttacaacagataggcttaatttactttcagcactgtatgagatgacttgaaagaatgagcctacttgtatgtgaaccaaagaagctcgatccaagagacccagttggaaacgataagatctccagctttaggcttccatgtgttcttcaagtcagatttcctgtagatgatgaaacatatcaacggtggacaggctgagatgccgtcgagaaatgttttaaaaaatgcgtaccctctagaggtagaagccgagaacttcacgtcaagtcttagcgctcccagaaacaatagaatcagtcgtgtccagacggccgacgcgactcgacagtaaggacgatggatgaccgaaggcgtagtagcactctatacattcatcaaaagcgttcagccggcagccataagaagaattcatgaggtagttgttactgacaagtatcccgccgataatttcaacagtgagcagatacaatatcccgcaaagaacgataggtatagccttgatgtacacagatggtgacgaaaagctctttcagccacttgacacaaggttcaactttctatataggcagtagacttactctgacgactccgactacataccggattccggtaaagacagattccagcgggcttgcttccgatcgaggaggtataggtgtcaagaacggctgtgaataagtacaagcagaagaagtaccaagtaatgagacaccggttatgtcggagggatttggagatcaatcaagattacctgaatgcccgttcccggatcctaaatgaaacaacatgagacaaacgacgtggtgagaataaactcgggatgcaaatcaagaaaaggcttgaactgactctccatctagaatacttctccattgcaacggcggtagcggatgatgttgggagctcaagagtttgggaatgcttagtggcttgtctcacagtcgtagccggcttggatgagtcagcgaaaaatgcgatcatcagaataatcattagaaaaaaaaaccgaaatacagagtaagaccaaacgttcaacattcaaacatccctcaaacagtcgttgctcgtattatatccagcatgtccagctcaataagtccgttctcgaccatggaggacgctatcgccgcttttggtagaggagagttcgtcgtagtcatggacgatgaggatcgagagaacgagggggatttgttaattgccgctagtgaatgcacaaccgagaagatggcttggttcatcaagcacaccaggtttgttctattcatatcattctgtgtgcattctatttgatgtttcactatataggtgtcgaagtcctctggtttctttgtggacaaacgggcgtggtcgactgccccatcacctttgcgctgactcttctttcttctaccctcttcttgacgtcaccattgtggctctagtgggtacatatgcatttctctcccccagagtcgcttggaggcgctcgacatcccgatgatggtcgctcgtaatgaggaaaccaaccagactgcttatactgtcactgtcgactacaacaaaggtgcggcccatcatctctatctgtgccgtttcgtccgattctaggctgatgtacttcgtttttgtttcttctgtggcaccttgtgttacaggaaccacgaccggtatctcagcccatgatcgagccttgacagcacgaaaactggccgatctttcttcgtccgcttccgacttcaaccgaccaggccacatggttcctctacgatatcacgacggcggtgtgctcaagagaaaaggccacaccgaatctgctctgggtccgtcgtttttcttctcagattctgcttacgataacatccttatatgtcttgaaccaacttctcgctcccttcgctttggcgcattgttgctctccgaatcatgattcatattcaaacacagatctttgcgttcttgcatcccttcccccggcaggtcttctctgcgaattggttgcgccggatccaaacccgacaggacgaatggctcagttggacgactgtattactttcgccaaacagtggaacttgcctctcatcacggtggagatgctcaagaggtggagagagcagaagggcctctgattatgcccaaatatattgaatatgaaaagtgaagaaatgattactatcaaaaacggagtcaattctgaagcgatatatatcttagaaggctcttccacgacgataaacaagttgttatgcatgagtcctattgacagcagatacctatgtacggtaaggaggtgaggcagaagaataaatcaaagacgtgcttccagcgtttccaagatcaatttagagagtaatcgatttccctatgttcattatccaacgaaaatgtgtccttgtcctgaatcagtctcacccgtttctccagaacgttgtaacgagtttgccgacaaaggattagacgtacgttctcatttagatgtacaccatccaccaacaagtcctcgacaacatgtccctccccctgtatatattcttccatggcctgtcacatcaaaagcactcttgcaatcagtcaaaggcagaaagagagcgagaatgatcaagactcgcgtttacaaaggacagtaaatcaactgacctgccagaagtctactaatatcaccccttcgcccacagcttccagctcatgccctaggtttcgacaggcatccgcgtacagagccatctgcaccttagttcggccgttccacgtgacctcggaaggtatgggtggcgttatgagaagtttgatgactgatggggaaagcatgttcagtatcgtatctagattctggacgtattcacccaaaggaacctatcaagcgtgtatattaaaatggccggagtttcatcagaccaaatttctagacctcaaaagataagataaaggaaaaagtatgaaaagaaaagacgtgcgcgagattctccccagccaacagagtcattagtccctaagagaagagtgatgaacttgattgagctggaagaagtgccatttggcacaaacaagtctcgtgcgattggtaggacaccccgagtagatatgcctccgacccctcggttgaggattgagaacgttcccccatatctccctgagttgaccggaacacgacacacacacaaaaagcgcaacatatctcattattaaagatactacagccatgctattgatgtctatggctttgaatgccctcaaggaaggtgttagagtgcgtctagaaggttgaagacgaacgagtaagttgagttgtgaacccctcaggcgaggtacttctgtcagtaattgaatctcctaataatatggcataaggtatatctgatgaaggtagttccatcgtcgacacggtcgaagttcgaaggtcatccggtagtttagatgactgggccacgtgggggtgggaagttaactgatcttgcatgactgggtcagagaagccagaataggtaatatcggaatgccatagctcggtgttcacagtcaatgcttcggagatgactggtctagacagtcctagtgagctcaatgttatgaaccccagagcaattgctgttttaatag

SEQ ID NO: 1946 - DNA, 10218 bp, Xanthophyllomyces dendrorhous
gtataagtatgaattctataattgacaggttgttttatagagaaagatgattcgtcagtgaaatgagactacactcgaaagaaagggactgatgcgcacgtgttgtctgttcttagcgagtagatcacatctccttctttccctaataccaagcttgacaccccatatgatctcttccaacttgatagccctttctcgccggttgattcacctgactcttggataggaacagaaggtgacttggaagaatatgagccgtgcatcctaagatcccaaagcttcactacactatctcccgttccggctgagatcagagtatgaggacgggatggaagatagagaagcgatgtaggagatctagaggccgagcgctgaaaaattggatatgtcaatatagtcggctaattagaagcagcttgtgcgtccgaagggacaatgaaacacttgcacatactatttgggtccctcgcttcggcttcaaccctttatctccatgagcttgacggatggtatttactggactcttattccctatcgtggcctctgcgtggattcaagcaagagagacgaaacaaaaagaaatcaaatcctgtgatgaacaagagcatttgaacattagaagtatggaacatacgaagtgttggccctggcttgcctcgtttgttcggctgctcaagcgcactagttgcgctcccatcgcgcagatcatacacatgtatatttccgtctctggaagcggtagagatcacgtctattataattgtgatagatatagtagccacagttaagtatacatgatccgacgatcaatcaatgatgaactcagtagaacgagaggcatacgaggagaggaaggatcccaacaagaagtcttgattgttcccaagtggcctttcaagcgcgcgatcggctttgatgtgggcacatccaggacatatgcagtctgatcaccacttgaagttacctattggtatattcgatttgatatgattgagtgacaaccctacaggcaggagtaatagacacagagtggtatggatgtaaacgatatgacacgtacaacacggttatcgtccaatgaccaagcgacatcaaagattgcattctcgtggactttgatcgaacgatgggcgcgttcgccgtcccattgagacgagtggtcaagattgagaaagtctacgcttccttcttcagtcccgacacaaagaatctgggaaccgcctcgtttggcatctaatgtcaggacatataacgagaaggatgaaaaatcagagctaaatcctttgctacgtgttttttttacaacaaaatgacacaaactgtaagagaaggcgcaagtgagagggggcgcgaaatcgttttcggattgatgagagggtattcgatatacatccttcgtgtgagatgagactaagattgaagggtatctatctatcatcgacactgaaaaacattaatatgttgtgtaacacgtcattagaagtatgcacgagattattggagtgacgagaaagacaagatattaaccttgaaaatctagccaagccggtcctcgtttgtttcttggtatagagcttctttgatccaaaaattgcagaccacccatgcttctcctgcataatctatcctgagtcgtgccctgaacaggcatccttatcccttggggttctacgataagttcgtcctcaacacccgtttccataatttctcgtcgctgcttcttcctcgtttcccttctccttcccgttatagtgtcctcgtcagaagaagactcattcctcgtgggagaagaaaaagtgaacttgagtcgtttggattttgtttcacccatctcctcgtcgtcactataaggtgatctatgagcaatcacttgctggtcgttatccgttcgttcttcgaacccacacgacaagtcaaagcggtaactactctttctcgcgaaaggtgtgccactcaaacttccagcgaccgaagaagatgcgtcaaagatgggagaggatgagaactcatcattacgaggaagagatgagctgatcggagatagtggaagctgctcaagtatgttggtttcagaaacgaaacaagccttgggagtggatccgaacagagtgtcatctatgatattcgggtcggagacaagatatggtggcgtgagaagtcttcccgacatgatcggttccagcggctcaacgtttttctctgctgatttgaacgtcagaacttctatacttcttgatggatacaatgttgataagctgaggaattgcgtagaggagtgaacgaagcaagttgatgaatgatgatggatgatggtctgaaagaacaaaagcgcgttccgtcattaaacacgtcacgtcgagcgagacgcgtcgcgtgttcctcttctatcttcaatgactttgtatgctcagatattcataaaagcattctcgttcataaactttcgaagggtatgttggttctatgacatttttatcgatattacactattgactttgagtggacgcaaatgttcgtctacgactctatcgcttcccgcgcacttcttcgtcgcgaacgacatgtagtccgacccggttaaccattccctgattggcacccgcactataagacaagtacaatcagatcattagagaagtattagttcaaaaagcattgttcggtacgtagggactggccgtaattgagtaggaatgtacttactgtccacgagaccaactgtttgatgggtcggtcgagaggcgtctgataagctcacagtaactcatcatatatcagtgtcgagatgagaaagaatcacttactcgtatgattgagcccaggctaagatgctatggtcatgattctatcgaacatgaaagcatatttgattaaattaaagcttttgagtattcaaagttgacgattcaagttacttacgaatgctgtggacacaacaggggttggaatttgatccggaccaagattaggttgcggtgtgaaagctggattttcaaacgaaggacctatcaaaaatgatatcctcgaaaccgaataggaaccttcgagacacatacatttaagtcttgatcgagcaacagcatcccagatgtgaaaggtctgtacgagtaaatgtgcattcagtgcattgatatggaaagtcaaaagagaaagagagtgatcttaccccatcgccacctgctcagcacaaaagagacaacatgagtaaacagttgacgaatatgcaagaaggaagaacaggacgaaacacttacctcccgtcacccatgttccgtatcttttatggaagctgatagtattcacacctagacaaatataaatgtgtcttctcttgttagaatgttccattgagataatgtaaggaacctctaagttcgaaggggttgataactcactatagattgctgctggctttggcggattcgtccgtggcgggggaggttcttttctgtgacatttgaatgagaacgtgtctgctgcattcgcctcgttaaccaaactgtgatttaataagaacgtaagtttgtggatagattctcgagttgcaaattcagtattaggatgatcactcacttgtaagccatccttccttcaatagacccgattgcgtaccccggtttatctgttgaaggcaaacaggcgatcactcttgtctgccacttcagcggcgagtccatttccttcaacgctgtcccagggtttctgactggtgaatcgtagagaacagttgattttgtattcaatgatctatacctggcgctaatgagcgcatatgcaactttggttcagattgagaatcaagtataaacgcacggtcataaagaaggactttgcgttctgctgtaccaacgacgagcagatcaccaaatgtatccattgcgtaacatcgctcaggaagggcaagctggcccactggttgagctgggagattggaacaagacagtggtaaggatcacaagtaatctttagcgatcgaacgtacttcctgatatggaatacaagaacggaatgtctcaacttgaaagtagtagacgaacggtttttgagatcccaaaacttgaggtttttatcccatccaccggtaatgaagaaagatgacccgttggtcgattttccaaaacgacattgagagatgactccttcgtgcgccgctacctgagctgtccgacagttgagtcagaagcagataaggttagttccgcattgccgaaatgttatcacagacctacaccatagaactcacaggattgaccggtcgtcaggtcgtatgctcttccagccttatcacctcctacggaaagcagcttgctcccatcctttcgtgtggttcaacaaacatttgccacgaccatagtttacacgcagaaaagtttcaaggtgtcaggtgttgtcgccatataaaggaagataaacacataccgatgtccaggctacgtccaataccggtccttggtggttatataatgcttttggttgcgactgcccgttactattgacctcatacaatcgaacctacgtcgctcaaatccgaaatgaacagaaacattcgtaagagagagtcgggttcatctcattgtcatcgaaacgatatgtgtctaactagaaggaagcattcacacctcattgttccagcttgcgacggctaggatgggagcgacaggagagaacgcgagcttgctgatcgagtccggcggttgactgagttctgggtctggatttgaagggtttgaattcccaaacggaggcatacttcttgttctgtatcgactctgacgagattgttaacagactacgataggagtagcaggatgaaccaaagaagcaaggcggttgttgatgatgatgatgatggtgatggtagagaaacacaaattgttctcggaggggagcgactatccctttcgacgtctgaccatcatcaacaacgtcttctattttctggttctctcgtcggtcttctctacctgctcgatgaaatgactattctaggatttggcaatgacctgcttcacatcccccgactggcgaatctcctgagtcgaccaaaccgattggacgcgttctccaagcgaatcctcacgaagcgcgagttggatttactcgctttggtcgaaccgggggatgctcagacccgatttctagctgttaggtcagtatttttctcgacggtatatcaagactgttaaacaatagatccatcgaattgttgtctgtcgatatgctcactatgtgcatgtaatgatggctatggtgacttagatgggcggccaaagaatctctgtacaaagcactctacccagtattcaagccgacttggaaggatgtctcaatcctccctcttcctctcccatcttccacgtcttcctctagtataccattatcaccacgaccgactggttcgaagccgatggttgtatttgaacaagaaggccaattggctgataagggactcagagcgcacctcagcatcagccatgataccggcctagtgcttgcaggtgtcattgtcgaggaagataagaatgaaataaagtagtacaagaaataaaagaatcacatgagagaatccaagatggacgagacaaagttcttgattgtgtagaggttggacgacaaacgaagagtaagacaagaaccgagtgtcttgagcgacacctagtttctatcatcccttcttaggattgtgtcagctagtatcaatccctctcatgggcgtgcttcgcccaaaccaacagctctgcctggatcatggaaacaaccgcatccagaatctttcaaggttgctcgtcgtgtctatttcatatatttcatttctcttctgatacagggactgcccctcctggtaccgatgacttgtgtgcattcacaccgatgatagatacgcttggaacaccttcctttcggttatttgttgtcgaaggattccctcggaatcgtttcctcatgtcaagctgtgagcagagagaaggaaggagaacagaagggtaatcattcgatcgtcagccttggtcgagcaagggaacacgcttcctaacagtctgacgtgtggaccgtgttggaaagaggcaatcgacatagatagagtgatacaaaatcaaacggaaagaacaagcaacataccatacccctcttgcactgagtcagactctttctcaagaattgacattcctcggcaagttcgtcgatatgtttcgtgaggcattctgccggtgtgttgccttgcttgagcacacagtctgttcggaggaggcagtttgccaaatccatccggataccagcgcatgcacgatcctcgggagcggtagcaaaggcggtaggaactgctggtgccatatgaggaggttggagtgataggataggaaagaaaggtcaatatgagggttggttgggtagagcaggtcgaaggtagaaggaaagagaaagatattccgatcagtcttcaatcccatcctcgtccatccgacataaaccatcaattgtcggtcaaccatcatcggccacctttctgtttttgaaggactatccacatcatattcgtcctcccgtgagtgtccctatgagtattctgtcgaacggtctccccatgctgacaccaagctatcttgttttctttacaagtgttgctttgtgtagatcaaccgaataccctatcgcctagacgttcatatccttctcttcttcacagcatagatcatctttcgttctatcttcaaccatgccttctctgccatctaaatcacggtctacggacgaagacgaaactctttctaacatgtttgcccggctacaatctcaccaaccttcgactagttcagaactttctccgcccggttcggtttcctccgatggaagtaagcatgccgacgacgatgacgaagaagaagagacttgggcagatgccttgacgggggaggatacagaagaggatctaccgaaaaaacactggacgacagatgatctcgtggttcgttctgattttccttcttaccaacgacaactcttttattcactgttgttcaatcatccttcgttgatctcctctcttcacataggcgtctgtagcgaaagcagagtcattgaagactaaagcaaacgctcagttcaatcctggaaaggcatatcaccaggctctgcaaacctatctctctgttcttgccgctcttccatctcagtctgactcgatatcaccacagaagactggccaaccttctcagcttaaagaggaggagggacttcagatagtcgaggtggatgaagaggaggcagcacgaattgagcgaggagaaaccgaggaggagcgtaagcgaagaaatctggaagagaaagtagtcagactgagagcggtcatctggggaaacgtcgctgcttgttatctgaggcttgtcagtcttcacttttcttctcatcttgtgtgaccactaaggatgctgacagctggtgttgtatgtataatcgcttccttcgcgccatgcttacctttttgtgctcggctagaatcaatacaaggagaccgttgaagcttgcacagaaggtaggttgtggttctcgactagaatgatttattcgacatcgtgacaacacatagttaatccgaaaaatcttgttgctattaacagccttgaaagacgatccggaatatgttaaagcgcttcacagaagaatcaccgcaaatacagcgatcgattcgtggtcttctctccaatctgctcttgatggttcgtttcttttccatgtttccacaagagggaccgagtgcataccatccgttgagatcaatcgttcctcacctcccacacgtctctttcgaattttgaaacgacttcagatgcgaaaaagctccttccactccttccttcaaactctcctatccgatctgagattcagctctcggtccgagacttgccaggtaaagtgaatgctaagggcgagaaagaaaaggcagagatgatgggcaagttaaagaatctagggaatagtgtgttgggtactttcgggttgagtacagacaagtaggtcgatttctgttcatcattcatactcttcgcccctatctatctcttcccgtccttcaacaggattctctcctgttgttctatcttctcaatctgatctatcttgtcttggcaatgttctctctctcgggtgcctttcgtgcgaaaaccagtttcaagtttgagccgaatggacaaggcggatacagtatgaactttgtacgatgacatcatgtgtttcgttctccatctaattttgccactctctaccgcatacaacctaaagtgacatttgtgccttcgagtgaacgaactcccactgccgagctcttcccgttccggttatgacaattcttgaatcattcatagaatgaagactttgatgatcagataagacttatatgttttcacttgctctcggaaaggtacccatcagagtcgcgctcctcattggagttccgaatctacctcctgaggggaaccctggtccacttgaagagctcgacccgccttccattgagtttgttggatagctcatctgagctattccagtggccgaagccgttctcctcagcaaggtccctccaccaccggccccacttctgattccttcctgttcatcctctgctcttacctcttcgttaggatcgtagaggacgccagtcttgaatcgaggagagagagtggacgaagggttgccagcgtcaaaccctctgggcgcgtacattctctgagtgacgtggcttgctgaattcgatcctcctgccgtcggttgactcacgctcgccgtcataggtgatgaactggccgacaagaacgagggcggttttctgtatgatgttgactgaagcgaacttcgaggagaggatggttgttgagatgatgagagcgaagcttggttgtttgggtccaggcccgaatggggggatagtagaccttcggttgggtcgagctcgcgctcaaagtatttccttgggaagaatcgagaaaggaaagaggacagtatggatttcgatggaggaggtaaggtgaaggcagaagagctaggctctttagaggtgattgggtttgctccacctggagtggagtctgagttgcgattaccgggagaagacgcgtcgggtagaacacatgagagaccttaacgttagtctttgtgtgacagagtatccatagatagaagaaaaggaaccaaacaagaaagcatgggatttatcttacttagactcagaaacacgaagaacgggacagcccagaccgctaccacataaaacgtgaatctctccagtccgtcatacctgacctcggctgctctctccaaacgagctgccttgccgtacaccggtctaatcttgagctctttagattgcgcttcaaggaaatggtagtaccatgataggtgggtcaccggtagaaggataactcccaagatgagtgtgatacctggagaagctaagctaggcgtcgggatgagtgtgatgattcgctgtcggttcatgttaaatacgagtcagcattagaaagaggacaagattgaaagtcggatatgtttgtaaaatagatgttgtgagaagggctttaccaggtataccaaatgagctactatcgagagtaggatcaacttcagagggtatgaatccactaggtagagtagtacatgagcactgatcaccgtctacaagttgatcacattcgtttgtgcgtacatcaaagaagaacaagagccaaggaggacgaagagtgagggttgaatcagtaaagagagctggatacatcaagacacggcaggccagtcgtgtatcaagacaagacgggaaagatcccttctgatgggcggcaacagaacgaaagagctcacgtaggttaacgtcctgccccatctacgggaagcttttgggttatgttccagcatatcggccagccagaggagtccagctcctgtggtttcccatagggccatccggatagaagtgtagaatttgttggttaacaaagcggaagcctattcgggtaggataacggagaagcgactttacctagtgcaaacagacagaacaaggccgtgacgagacatgtacacgcggtgagaacccagagaaagcccatggggtccaagtatctgatgaggtcttcgagacgaatgcaggagtgaacgtaagatgttgtgggctatcgcgagggaagcttggttgatctcggtgaactgtgggtgtatggttgtgtgggt

SEQ ID NO: 1947 - DNA, 41185 bp, Xanthophyllomyces dendrorhous
taataatagtagtaataatagtaataataaagcaattaataaaaacgcaacaaagaatatagttcacatgtttcctatgtcgtcagccgatgtacaaacacgaagcatatggaagatgactttcgcgcataggaaatcacacgatacaacataatacacacaggaatagaattagcagtatcggaaggattgagtacggcggccgtgaccgaggaggccaaaaggaaaagagaagcaaggaacttcatcagagggaggcgggtgaaaggtctaaaagggactctgtaataagccacgagatagttatcagcttgcgcgcctgcgaaaaggagagcatgagtaaaagaccgacaatgaaggaaacaggccacttttgagcagcccaaaggacaactagagtgaacgagtgtgggtagaaggatgcgatagactgaacggagggaaagaaacacaagaaggagaaaggatagatctcatcttcagattagtctgtataaataagaagacaagtgattgttgttgttttgatcggacctgtgcgccacgtgaggaaaggttgctgcggatgcaacgccggtgttacatgaccgtaaccatcttgccagagtattaaacggcattcgtcttgagttcttcttttcttttcttcttcttcatctcttcttcatcctgatttctttccttttttcctttttatcttctctttcccgttctcctctttcctgtttctgtatcttgtagtctactatgctttgattcaatgaataccctactataccatattatatcatattatactaccttttcttgtcttccaaagcaaaaccggtgccttcacgggctgagaacatacggtcaatagcggatcacggtaattcgtgcgacgcgaatgtgctttggagaaaccattgactcgaggtcgtagctagttctcgatttcactaaccgagatgtcttggtcaaacccaaaaattcactaacctaggcttccgaaaagacctacagcgttgcactcctcttctgagacttactgtggcaaaaaaaatgtaaaaaaaatgtaaaaaacaaaaaacaaaaaaaaaacaaagacatctcatcagatgggcttgtcagctcaatcgtgatggaaccgtctctcggtctctatccaagctaatttttccctggacatatcagacttcatcaatagtctctattcgtccctatgaagactacctggtggctcagttgcctcatcaggcttgtcattgtctagaaaggctctttcctttttctttttttcctttctttttttttttaattcaaaggaggaattttttctctcgataaattgaataaagacgaatattccaatcgcgtccgactttttccccccaatcacatgggacggaagcacggaggtccgtctccttgcccatcaatttatttatctggcgactgtcgcctatagtagctatctataggtcattctcatagcaatcattagataacacaacgaccgctcgtgacgaactcgaacgttccgctcttctcttctccgccccagaagtaaatccggcatccatgcgtgacatgaacacgggtgccgcaccttctcgatccttctccgcccctattttcgactataaaaacaggcgcgaacagtctcccatctctctttctgcattttaccttcattttttcagaccactcccccttactcttcctgttctcaaacccataatcggcttcatccacctcaaatccatcctttttccaaactacacatcatggactctttcaaatcttcaatcgtggccactcgactcgcccctatgcaaaccaagcttgatagcgccccttcggttctgccattgtcacccccttcttccgtcaagaagactctctcagtcgcgtcttctgacgaggcggacgctcaggccgcaaactcaatcaaaggtcctgtcgaggacttcaacgggaactatcggttcgctcccagtacgtttcaatctttcctgatcgttaattttataatctatcgtatctgatatattcatctatcatccttggcctctttacagtcaaggaatatatggtttctcgggccatgacctcgaggtattacgacgatctcatgaagagtgctatctctggtgattattcttttactctacatcgatatttgtccatctcatatatagtttgtctccttatctaactcaaaattcataatctcttctcacctttttctatagatgtcatcattcttggtgccggaagtgccggtttgtcttgtgcatatgtgttggccaaagaacgacccgacctcaaaattaccattcttgaggctggtgttgcccctggtcagaacacttttctctcctcatcatgcatctcgtatatgactaagcaattccttttttccatggtctctgtctctaggtggaggtgcctgggttggcggccagctcatgtcggcgatggtgatcagaaagcccgcggatgcttttttgcgagagttgggagttgactttgaagacgaaggtgactttgtcgtcgtcaaacacgctgccttgttcacatctaccatcctttccaaggttcttcagtttccaaacgtaaagctttacaacgctacggccgctgaggatttgatcactcgaccggacgctttgggaaacggcgggctccgagtatcgggggtggtttccaactacactctcgtcactcttgctcatggcttgcagtcgtgcatggaccctcagaccatcacggccccgatcgtgtgctcgttctgtggccacgacggaccgtttggtgggttcgccgccaaacgatgtgtctccatcggcttggtcgaacagttgggaaacatgagaggtctcgatatgagaaacgccgaggattacatcgtcaacaacactcgagaaattgttcccggattgatcactggaggtatggagctctctgagcttgatgggtccaaccgaatgggagctacctttggagcgatgctcatgtccggagcaaaggtgcggtctcttctcttcttagcacgctgggctttatctagcttccacaactgacatagttgtataattttctctcttcaggccgccaaggaggctttaaagttgtatgatacttacgagctcgaggatggagaggttatcggcttgaaagatgctaagaagactctccagctcgcttgagtgtgaatgatgtcatgttttcttcaaattttgtataataaatacatgcaaaaagcatggtgagagtgatcttaaccgatggtggtcgatacatgatcctcttggactgggatgacctcggaccacgaatcaccaaggttcccatgggttatgggtttagtttctgccagcctcagtgccagcctcagtctcaacatcagcctcactagcagcagcggtgtcaaacgccagcattctcgccccttcgttctcgtcctggtgaagggctaggtgcagcatgtcgcgcgacgtgttcacatctctgttccacaaagtctgagagagagcagagagaaagcatagaaatcaatgagcaagcacagagaacggtcagtcatcgagacactatcataagtatgtaacacacggcacttactcgacagacgctccgacattccttgatcgcccacgctttgttcctcccagagaactcgccatgacacttgaagcacactctcgacgtccgatacccccggactgtgcgaaaatggagcagcggagaggccctcagcttggcatacatcgtcttcacaggaccaggtgcatgcccacgagaagacgacgagaaggcgccgtcgccgaaggccaagaaggtgcttggacttcctgccgacagacggagcgccaccttgtggtacgcttgttcgcggctgatgtgcgcgccccagcgaagacgtctccaccttcgagcagcgaagaaggtcgcgagccaggagtaggactgagagtgtatgacgagagcagcgcggagacgatcgagactggcagatctgaacgaaggaagatctggagaaagacaccgaagaaagaagccgaagcacgacaccgaggtgggcaagacagtttgcaaggtcagtaaggctgttcatacagtcagcttgaacgtgggtgtgagcgtgagaggcactcaccatggatagtggttgacacttccgcatggttcttcatccacagccgctgtttccgagcgtctcggtccatccccgcaaggtgcctccattacttgagagagagcgaccactgcgtgccgtgctcggccagaccgccgttgtccagagacatgtcgatccctcctgcggttgtcgagagcagcgtccgacggcctgggtccagccccacgacctcgtcctctggccgcacaccccacggcacatactctactcggtgacggtccttttcttcgccctcccatctccatccgtaggcgtcgatgccagatgaagacgacatgggtctcagcattccggcagacacgccgatgccgtccgtgctgagcgacatggcgaactgtcgctttctggtcttgactttggatatatggaacgacctcttccaccaagtgtcagagtcatcccggaaggacacctgagtcaccccgcgcatatatcccatatccgcgtcctccgatttgagctggcaccaaaggtcgtagagtatcatggtgtctacaaagacataggacgaccggtgagacgagagcggcagaagcgagaacaggcggaggccatgcccccggcgacgagtggtccgtcttgtagccgcatcttgggggccatgttcctcaaagatggtcagtatccggtacagagggcggagatataatcgccacgaggtcttgatggcctcacccgtcagaggcaaacctccaaagatgtcatctgtgaggaagtcgaacaacactcggagatgcgcctccatcaccgtgcgctggtcaggaaggaggagtttgagtagccagggcgaggccgccaaggatgtagcagcttgtggtggctcctcctctctatcctcttctccctcttctctttcttcaccctctcctcctcctcgaggtgggagaggggacagttgctcctagagttgatgggagagggcagtgcgctaagaacgaacagatgtatcggataggtcagataggtcagtcatcgctgcagcctttattcagatatctcctcagatgacttgtcttccttacctggctgatactgatccgactctggatcgcttctccaacgtttgtctccagccactaagagatgagccgagaagcccggcgcggcatgttcagggcgacatggttctggcaggccgtggtctacaacagggctttggcgccgatcattctgctcaggaatctatgaaagcagcaaatcagtcagtccctgttcgcagccagctgcatcaccattaccattgtcattgccaaagagatcactcgctttgagtctgtgaactggtgctcagcagggaaagaggtgtcccggatgtggttgatcccttcgttcagtgttggcgctccttggtgcagatttcctccacgcttgttaaagccaacagcctgaagatagagccgcattatattgggaaggtttggtatctcccctccatccgcgcagacctttgacatgtggatattgagaaggcgagacgcgtcgaatgttatctttcctagccgggcaacggcggactcgatcgggccagccagtggcttaaaggcgagtaaagaaccaaagcctatctttactgtccctgacaccatagggaccgctgacttagcgcggatttccaccctctgacgagggatgtaaaacgggcagaggtgattagatcgcatagagtgcccaatctgaccgcaggctgagcatgtggcagtagtagtagtagtagtagtagcggtagtagtagcggtagtgttagccgcaagggaagactttgtcgaggcctgaaccgtcctcttgcgcttcatgtcgaacacaagaggagcggcactcctcaaagcaactgatgagtgttctggtatggagaagtgttctgatatgaagagatgttctgatatagaagagcgctctgatcgtctcgagttcgttgtgtcttataagctgttgggattgatgtctgcttgtttgcagaaaatctcctttgaccggtttcccctttgatcagttcgactggctgtcggtcatgatgaacgacctggtgaaggctctaccgtcctcagacaaagacaaagacaaagacatgaatagataaagagacaaaaatataaggtaaaagtgaacctaggtagagtgtgagcaatgaacaaaacttgtaggacgaagagaagacagaggacagattccaggacaacaacccatcgtcattcaattgatcattgattcacgcttggttggagaggttgtcaataatgtaagccgccgattggcgataactaggcaaagatcgcgaaccttgtgctgcgcgagggcaaccctaactgagctcggctggcacgtggtcctctgggattctgtcatcctcaggatcgcacaccaccagaacactgaagacaacccatactcagcttgcaagtatgtagctgtatgtagctgtatgtagttgcatgtagttgcatatagttgcatgtagctgtatggcacatgcgctcctgacacatctcacgatcccttcttgcgtgcaagccttccgcgcggtttgtctggtgggaacaccgtctttgttcggtacctttgtagcttgagaatcatatacaacacgggcatcctttcccacctacgacatagtctcttcatcagatcttcattacgagtgcctttcacactcactctgactgtgcaaactgccttgctaacactgcagactaattttcttgcctcattgtcttgcttcggttttcttcttcaggtgttccttcattcagagctgccaatctcgatgttctccgcgctgctctcgcatctattttgagtctcgttgacgattttccatgtttctacctgctcgacggtggagatgcctccgctgaggtgcagacatcagccgagagaaaacgtaccacgagctagcaaccttctcatcaagaggacgctcacatgcccttctggcgtcaggagacggtaccttctcatcgacttcccatagacatgatcctggcccaatgaagacgctgctcttcaagctgaaagcattcctgctgctccaggctcgtaaggtttggggttctggacgccgagaatgtgatccacatgccatggcgagttctcgggaagggcaaagtgtgggcgctgaaatagtgtcgaagcgtctgtcgagtaaatcgcgtactctgtacatctcaggatagtgtctcaggatggggtgtcaaatactgataattttcactgatctctctgattgctctcagacttggtggaatagagatgtcaatgcgttgcataacatattgtacctgacccttcatcagaaggacaatgcgggaatgagtatgcttgtattcgaccctgccgctgaagctcaccgtgaagttgatactgaggctgaggctgaggctgaggctgtcctatcgacgagggcaaacttgacccatgacccatgggatctcggtggtctgtggtccgaggtcatcccagtctaaaagggccatgtatcgactaccatcggttgagatcactctcaccatgctttttgcactaggtaaatatacaaacaaaccgctacccgaacgacttcgtcctccttttttgtcagtaagaatattgcatccactcccaatgtttgatcttcgcagtcaagaaatgcagtaggtgtcgtggtatggtttaaagggaggcggcgacagctcgggaaaatattggctcaattcttgaaatcaatattctcactctgtaacactgattctggattctagtacactgaagactgtttcgtccacgatgcttggtatctgttcactcctatatacaggtgaacagtgacagaaagtgaagagctaacgattgtgaatttgagtataagtggaaaaagagactgggcggaactcgattaaatttgataaattctcttggctctgttgtcgagttgctcgtcttctgttcggccaacttcgctcatgtctttctccggtcgtcagtcgtctttctggatattcaaacctctgtttctctcttttgttaaaaacgccttctgagttgcctctcgaatatgttctcttctcgtttttcttcattgtcaccaaagaaaacgcgtcttccagctgggcttaccttctctctccttgctctaccgcatgatgtcctccaccactccggcatcccaaacctatcaagagcatatgggaatctgtgtcgagcccactcatgcccactccgacggcggcaaactcgaagatgataaaaagaactcgttcgacgacaaaggaaaacgatcgcttgatgggtcaatgtatgaggtcgcatcccttggccacgagtcaacttcagaatttataaagaaaagatccaaggtggagagacgattcctccgaaagctcgacctctgcctcatcgcctgggcttggtccacgtacgtgatcaaggtgagggccagattcacttctctcatatctatctatccgcctcccattaatgttctcatctacttttcgcggttggatttactcttcatcgatagatcatggatggagccaactacaagactgcctatgcaagtggaatgaaggaggatgtaagggattcaaactgagtctgttgtagcttgtgcagcatgtagactaactcttcttgtacacccctctttaaaaacttcagctcagcatgtacggcctcgaactcaactttatggacactacctatcgaatcggctatgccatcatgttcgtctctagtttgctcagatcaaatatcgtctgcgctgatgctgaccttctattcttcttcctcaattccattcgatcattcacaaagggtcataccttctcaaattatcttgaccaaagtcagaccgagtatgtggttgcctggggcggagcttctctggggactcatgaccggtctcatggctgcttgtcataacgttcatggcatgtatgccctccggttctttatcggactttttgaggccagtgcctatcctggaagtgagttgtccctttacttcggcaagcccttagaaccgcgtgcgctgactgtttcgttcaacaatgctatctctacagtcatctgtgtactttgctcgtggtagtaagtcaactagtgtccctagacgctcttctttgaatgtctgtaaactcatccagtgcatggtacctattttctcgaatagcactccgagggagctcgctgctcgaattgccatctttggaacgagttaccctgcggctaacatgtttgtcggtttcatgcaagccgctttgcataccaacatgaacggtgtcgccgggctatccggatggagatggctgtaagtagatcttctcttctctatttgatgtataaaccgatcttgacgtgacccgtcatccttcctgcaggttcgtgttcaacgcgttgatgactgccgtcgtcgctctctttggacacttcatgatccccgacgatccggtgactacgagggtgcgttggttgaacgacgaggagaagcgcatagctttgcttcgaatgaatgaggttgaaaaactgcccccaaccagactgagctggagtatcgtcaaaaagatcttcaccaactgggttttatatgtcttttgcttggcttacaggtaagtttctttgtctcttcctcttgtttcgctatttgaactcagtattgaatcttcctgctatttattgttcagcacttggtcgtgggctcaaaactccaattcatggatcgtgctcttccttaaagccgagaagaacgctgacggaaccaagcgatttggtatttcccaactcaacatgatccctatcattggttatgctatccagatggttgctatggtaggctgtgcctgggggagtggaaggactgggaaaagatggctttggatctttggtcagatgttgaccatgttggtgggactgatcatcctcgttgttcgtttcttttctccaacctgttttttttccgtctggggttcaagctgaccatgtgtttccgttcggttatgtttgatgatggtagatctggccgaaagcattctcagctaagatggttggatactatctgctttggctctcgaacggtgttggtcctatcttggttgcttggatggccgatctatctccctctccggaggttcgatcgatcattgttggagtagcggtgacgctctcctatgtagtggatagctggttgaacgtgttagtttacccggcccgcgaagcaccacgttacagggttggttacaaggtaccccttggattcaccgttgtttgcatggcttcctcgttctggttccatttgaaagccaaaaagagggctgtctcctcagagaaagtttgattagttttctctctgttattttgcttttttctgcttttctagccattgtaatttgtagtttgtgctctttcttgttgatttagactgtagacggtttcttcgttctggttcaatctgaaggccacccaagcccagaaggattgtgtaccaaccaccatcggtagaggttgccttgttgctttgttgccctgtctctttatatgttcatgcctttatctataagttgtagagccatcatgacgttgctcatcatcatcgacggtcagtcgagttaattagagaagttttctgcaaacaaagaggaatcaatctcgacagcttgaaaacatatagaaatcggctaaagaggacactcgtccgcgttgaacactcaccagtggtgctagtgtttaccactgctgcttctgctgctcttgccgctgccgctgtcctatcgacgagggcaaacttgacccatgacccatgggatctcggtggtttgtggtccgaggtcatcccagtctaaaagggccatgtatcgactaccatcggttgagatcactctcaccgtgttttttgcatggctcatgcttcgttttcttcggctctcgtgatcgcgagtcactccagttccatcatatgtattttacctagttacagaccagatgcgcggggggttccgatacacaagaggatgctctcacaccttctcacacgcaaggtttcttcaagctgattatctctgttagaacctcttattcaactctcttattaataatccggtctgctttaatcactacaaacattcttgagactcgcgccgaaaagtcgaagtgccagtccttgtcacaagttttgtaacttggtcacacctcaaactccgtgccttacagccacagccgtaaccatgaataccttgttctttttcgacctcaaccttctccttgctctggcctgtttcttccactcttcctttcctcaatcccatctcccgtcctggtggttctgttcttactttagcaagtacagcacgtaggacattttcaagagggacaaagagcttctactctttgctctacatctttttttcgctctcgatcttccttctttcgttttatctagcggcaaggaaaaagaggatctttcgtgaatatcacaaacccctgttggaaaaatgtctcttcctcctcctggtttcaactcggctgctatgcctcctcctcctggattcgcctctcagcctcctcctcaacctcagctgtttgtagatgccaacggtgctggaccctcatactcttctctcactcctgaacagatcgaggcgaagaagagaaaatggttgcagacccaggcaaagcgatggggtgataagcgaagagctggtggtggtggtggtgtcgatggtggcaagcaagtaagttgtttttcacactctactagatagctatggtttcatcgaagacctcttgaagtatagaacagttgggagtagcaaatgtggggtttcaagacgtgttgagatccgatcgaggattagtcgcaacgtgattttgtcgttggtggcgacggttttttttcctctcgcctcgtttttttccttcttttcgatgttgatcgtgtgctcattaatgatgatttccttcgactctctaggacctccctcctgagcaccttcgaaagattatgaaggatcatggggatatgtctgctcgaaagttccgaaacgataagcgtgttcacttaggagctctcaaatatgtcccccacgcggtcatgaagttacttgaaaacatccctaacccttgggaacaggtcagagaagtaccagtattgtatcatatttctggagccatcacattcgtgaatgaagtccctcgagtggtagagcctattgtaagtgtcgatttgccaccgtggtctttcctattacttgcattcaaggttgtcatattgaacgcgtcttttttgctcttctttaatcccaacagtaccatgcccaatgggccaccatgtggattgctatgaggagagagaagcgagatcgacgacacttcaagcgacttcggtttcccccatttgatgatgaagaacctcctcttgattatggagacaacgttcttgatgtggagccgttggagggtattcagttggagttggacgatgaggaagacgctcctgttctcaattggttctacgacgccaaaccattgcttgacacccctcacatcaatggaagcagttaccgaagcttttctttgacactcccccaggcggccaacttataccgattgggaaggacgctgctcagtgattttgcagacaagaacgcgttctacctgtttgacctcaagagcttctacactgctaaggctttgaacatggctattcctggtggacccaagttcgagcctttgtaccgagatatggattcgtttgatgaggattggaacgagttcaatgatgtcaacaaggttgttattcgaaaccagatccgaacggagtacaaggtcgctttcccgcatctttataactctcttcctcgatctgtccacatcggtgtttatcacgagcccaagaacgtttacatccgaacagaggatcccgatcttcccgcgttctactttgatcccttgattaacgttagtcttttatatgttcaccatctatcagagtctggtcgtatttcttaaaactaagcttgactactcttgatcttatactacctcctcagcccatctcttcccgagcagttgaagccgctaaccttcctacaatctctcacgaggacactgtgttcccctacggagaggatgaagacgactttgaacttcctgaagaatgcgtgccgttcttgaatgatcaggatcttagcaacgatgacacggccgatgctatcgctctttggtgggcaccttatccatacgataagagaagtggcaggacacgacgagcgcaggacgttggtttggtcaaggattggtatttggagcattgccctcctaaccagcctgtcaaggtcagggtgtcgtaccaaaagcttgtaagccctcccttgcctttttctcaccaggagctagtatctcgagctcgctgtttgactgacttgattctcctttaatttatcacattagcttaaaatatatgtgttgaacgctttgcaccgacgacaccccaagcctcaaaccaagcgtaacttgttcaggtcattaaagaacaccaagttgtgagtgtatacccctagaaagctctttccacatgcatacaaagttgactggcttgtatttcataagcttccaatccactacacttgattgggttgaggctggtcttcaggtctgcagacaaggttacaatatgttgaaccttcttattcaccgaaagaacttgaactatctgcatttggattatgtgagttattctttcgccaagtatgattttcacaaacttttattgaccatcgccggtgttatctgcgatttgtcttgtagaacttgaacttgaagccggttaagacgctcactactaaagagcgaaagaagtctcgatttggaaatgcctgtatgtaaatcttcctctgtccgtacatgttttctaggcggtgactgattgcgatctgactctactaccaatttgtgttctagtccatctttgccgagaaatccttcgacttaccaaactcatcgtcgatgttcacgttcagttccgtcttggaaacattgatgccttccagcttgctgatggtttgcagtatatgttcgctcatgttgggcagcttaccggaagtacgtgtcgttcgaacacatcgataaataatctgtatgacgctgactagtttttataatttcttcatcgatagtgtaccgatataagtacaagctcatgagacagatcaggatgtgtaaagatctcaagcatttgatatattaccgtttcaataccggccctgttggaaagggtcctggagttggtttctggcagcctggatggagagtttggttgttcttcatgagaggtatagttcctctgctcgagcggtggctaaacaatttgttggcccgtcaattcgaggggtcagtcgtttctatctctaatacccatacacgatgtaatactgatacaattgtgttctggggttttctagtcgaaacgccaagggtgttgctaagacgtcagtttaatatctcctcttttagtcgtgtctttggcgatgcgtgctaatcttgcttctttacatcgacagtgtcactaagcagcgtgtcgagtctgtgagttgtaacctgccatcgacatcagtaacgtaaagtctaattactgaattcatttatttcctcagcactttgatcttgaattacgagcggccgtcatgcacgacattcttgatatgatgtgagtatctctctggtcctgtccactacgttctttccagcagttgcttaccttcttttcccttcttttaggcccgagtcgatcaagcagaacaaagccaagactatcttgcagcacttgtccgaggcctggcgatgcgtgcgtattttttctctctattctccctgccaatgtgtaccagttttgttctgacttgtttcgcattcatctctatttcaacacagtggaaggccaatatcccttggaaggttcctggaatgcccacggccatcgagaacatcatccttcgatacatcaagtccaagtctgattggtggacttcggtcgcgcactacaaccgagagcgaattcgccgaggagctactgtcgacaaggctgtgtaagcatttctggtcgccctgtggacgatttggtcaagatgaatcaacgccaatcattatttctttttttgcttgtgtgtgaggacagggtcaagaagaacttgggtcgactcactcgtctctatcttaaggctgagcaagaacgacaacactcgtatctcaaagacgggccttacatttcaagtgaagaggctgttgctatctactcttcggtcgttcactggctcgaaagtcgaaaattcggtacgtcccttcgttctgctcgttcgaacctgatatgatactgatcagctatggtttatctcggaactacagctccaatccccttcccgtaagtcttatcttcacatcgaatagcagacatttcatctgcagaccaacctttatctaaccattctacttcctaattctgctgaaactagtcctctctcgtataagcatgataccaagcttttggttttggctcttgagaagttgaaggaggcctatagtgttcaaggtcgactcaatgcatctcaacgagaggaattggctttgattgagcaggcttagtaagtcgttctcttctcaaccttaatgactagaatgctctctgatcgatggctcgtctttcttgctaccatagtgataacccacacgagtgtctttctcgaatcaagcgattgctccttactcagcgagccttcaaggaggctggaatcgagttcttgtaagtttttgtcctgtcggagcttgatctagtctaggggcttacgttcttcgtttgtgcaaactcagcgacacatatgacaagctgatcccttgttacgatatcgagcctgtggagaagattaccgatgcctatctggatcagttcttgttctttgaggccgacaagcgtggtcttttccctgcctggatcaagcctgctgatactgagcccccgccgcttcttgtctacaagatggctcaaggagtcaacaacttggtatgacttcttgtcatttcactctcacaatctcgagagcattcatatctaaccagctttctctgtatctggttgaacagaccgatgtatgggagacaagtgaaggacaagccaacgtcatgatggagaccgtccttgctaaagtgtatgaaaagatggatcttaccctcctcaacaggttgttgcggttgatcctcgatcacaacttggcagactacatcactgccaagaacaatcctgtattgacgtacaaagacatgtctcatgttaacacgttcggtatgattcgaggtcttcagttctccgctttcgttttccagtattacggtttggtcttggtacgtactagtcctcaaacagagctctgagatgtcattagtgttgcggagactaaccacgatggcttgatgtccaatgggtttgtgtaggatcttcttattcttggtttgcaacgagctagcgagatggctggtcctcctcagcttcccaacaacttcttgcagtttagagacacggccaccgagactcgacaccccatccgtctctacactcgatacgttgatagaattcatatcttctttagattcgaggcggatgaatctcgagacttgatccagcgatatctctcggccaatcctgaccctaataatgagaacgtcattgggttcaacaccaagagatgctggccacgagattgcaggatgcgacttgtcaagcacgatgtaaatctcggacgagccgtgttttggaacgtcaagaactcgttgcctatgtcattgactactatcaactgggtacgttaactcttctttggaatgaagtaagaagatacttgagatctttccctaacgattgtgtttatctgtttgctctcaaggacgactccattgtctctgtctactcgaaagataaccctcagatcttgttctcgatgtgtggattcgaagttcgaatcttgcccaagatccgaacgcttaccgagagtttctccctcaaagatagtgtttggaacttgaacaacgagcagacgaaggagcgaactgctcaggctttccttcgggtctccgatgaaggtgttcagcaattcaacaaccgaatccgacaagttctcatgtcatctggttccactactttctccaagattgtcaacgtgagtatttctcattcttcccgtctctattcaaacgtatgacaagattggtattgatattttctcttctattgcagaaatggaacactgcgatcattggattaatgacctactaccgagaggccgttgttcataccaacgagcttcttgattctttggtcaaggctgagaacaagattcagactcgagttaagattggattgaattccaagatgccttctcgtttccctcctgtggtcttctattccccgaaggagttgggaggtctgggtatgttgtccatgggtcacgtattgatccctcagtccgatcttcggtggtccaagcagacggatgttggcggtatcacccacttccgatctggtatgacctcgactgaggatcagcttatccccaatttgttccgataccttcaaccctgggaggctgaattcttggactctgctcgagtctggagtgagtactcgatgaagaggaaggaggctgccgcccagaaccgaaggttgacacttgaagatttggaggatagttgggatcgaggaatccctcgaatcaatactctcttccagaaagaccgacacaccttggcttacgataagggatggcgtgttcgaaccgactggaagcaataccagctcctgaagcacaatcctttctggtggacttctcaacgacacgatggaaagctttggcaactgaataactaccgagttgatgtgatcgctgctctcggaggagtagaaagtatccttgagcacactttgttcaagggaatgtacttccctacttgggaaggtctcttctgggagaaggccagtggtttcgaggactcgatgaagttcaaaaagctcacaaacgcccagcgttctggtttgaaccagattcccaaccgaagattcactctttggtggagtcctactatcaacagagccaatgtctatgtcggtttccaggtccaactcgatttgactggaatcttcatgatgggaaagatccctactttgaagatttctctcatccagatcttccgagcgcatttgtggcaaaagattcatgaatctgttgtcatggatttgtgtcaggtattcgatcaagagctcgaggctttacagatcgagactgttcagaaagagacgatccatccccgaaagtcctacaagatgaactcgtctgctggagatatacttctcttctcggcctacaaatggaacatctctcgaccttccttgttgaccgacaccaaggatgtattggatggtacgacctctaacaagtggtggtgtgatgttcagctccgatggggagatttcgactcgcacgatattgagcgatacactcgatctaagttcctcgactacacttccgattcgatgtcgatctacccatctcccaccggagtcctgatcgctatcgatttggcctacaacttgcactcagcttacggaaactggttccctggaatgaagcccttgatccagcaggcgatgggtaagattatgaaggccaatcctgcactttatgttcttcgagagcgaattcgaaagggtcttcagctctactcgtccgagccgacggagccttacctgaactctcagaactattcggagttgtttagtaaccagatcatctggttcgtcgacgataccaacgtttaccgagtcaccatccacaagacgtttgagggtaacttgacgacaaaacccatcaacggagctatcttcattttcaatcctcgaaccggacagttgttcttgaagatcattcatacctccgtttgggctggtcagaaacgtctcggacagctagccaaatggaaaactgcagaagaagtagctgcgttgattcgatcgcttccagttgaggagcagcctaagcaggtcattgtcacccgaaagggtatgttggatcctctcgaggttcacttgctcgatttccccaacatcgtcatcaagggtagtgagcttcagcttcctttccaagcgacgatgaagatggagaagttcggagatctcattcttgtaagtactgaatatgtgtcctttccgttacctactcataaacactgacacgcaatctttcttcgtctatccagcgagctacccaacctcaaatggtactcttctctctctacgatgactggcttaaatctatttcctcgtacaccgctttctctcgattgatcttgatcctccgagctcttcacgtcaacaacgagaaggcaaagatcatcttgaggcctgacaagtcggttatcaccgagactcaccacatctggccgtctcttagtgacgaggattggatgaaggtcgaagttgccttgaaggatttgatcttgaccgatttcggaaagaggaacagtgtcaacgttgcctccttgacggccagtgaaatccgagatatcatcttgggtatggagatcgccgctccttccatccagcgacagcagatggctgagattgagaagtcgaccgaggctcaggctcagatcacttcgatccagaccaagacgaccaacatccacggagatgagatccaaacggtgacgacgacgaactacgagaaccaggtgttctcatcgaaatctgactggcgagtccgagctatctctgctaccaacttgccgcttcgagttcagcacattttcgtttcgaacgacgatgttaaggatgacgctgccagtctgacgtttgtgatgccgaaaaacattcttcgaacgttcatcgtcaatgccgatcttcgaacccaagtggcttgctacttatatggatctagtcctgccgacaacccccaggtcaaggagatcaaggctgttgtgtacgtgccccagcgaggaagcaatactgctgtcgagcttcctaccctacttcctcaacacgagttcttgctgcagggtttggagcctcttggttggtgcaagactcagtctgccgaggctcaacaccttggacctttggacgtgagcgctcaggcaaagattatgtcggccaaccctgaatgggcgcctacttcgatctgtttgactgcatcgtttacccccggatcgatctctctctccgcttgggagctcactcctgccggattcgaatggggaaggaaacagaccgacctgagtgggaacatcactgggttctccgcctcgatggccaaccgggtgcagctgttactctcggacaggattctgggttccactcttgtccccactggagacgtttggaactacggtatcggactttctcaattgttctcacctacaatgccttattcggtttcgcttggaacgcccaaacctttttgggacgaaattcatcgaccggccgccttcttgtcgtttgcccagcttgaaggtgatgatgatgcggatctggagaacagtttcgcttaatttttctttttgaaatttcttgacaatctttccacgtttctctgcttttctttttctcacttacttaaatatatcttgccaacttgtattcttctctttggtacatggtctgtctcccttatccatatgatcatgaagttcaaaaataaagattaagtcaaaaatgaatcgagagattcctagccaaactcaacatcagcctttgtctagacgtcctccattcagacatcagtcgagagggcgcctgacagagatatcaacgtgaagtggttcatcaagacgaagaaacgagtcattgaattatacaagaacaaagaagatataggtttcgagaaagaaaaagagaagggttgtttatccctaaatacgatactgtaaaataggaagggagaagggaggaaggagaatatgtttgtttgtgtgtgcatgtgtttgtatgtgtgtactcgttgaagagttcagaaaaaccaagaaaccaatgaaaccaggaagacaaaaagcgggtaggcgggagagggaaggatgaggaagatcgaagatcgacggagaagacaaggccgtatacgtaagattgatcgagagtactttcaaggagacatggttcagaatggaggaagggatggaggaagcaaggaaggctggaaagaacagacgttccctcgctcttgacaaggggaagggcggatgtcataagactgacaagaaacaagaaaacagtaaatggaattggacgccggcaaggtcgggagattctatgtatcagtatcgacgtttttttagattttgagaatttaacagataggagcgaggagagggagagaactgatgacaagaaaaagagaaagggatccgtcaataaattagatgatatcccagatctcctcctaacggccgcaaagcacagcaggggagaaagagaaagagaaggagaggaagtcggggcaaacaatcgttcataaagtcagtcagcagttcttcacgacacaaggaacacaacaatcaaagtgggacgaaccatggcacagcagaactttccacaagccacactggcactaagcgagtactctgagatagaaaccttctggtcgatcacgccgtccgcaaagttatcctctctgttttacgacaaaaaaaaaagacccaaaaggtttaacgaactgatatatggataagaaaagagaaagaagagaagactgaccctcgagccatagctcctacaaagacggctatactatgcgtttccggtagggtcggcaagaacttggacaacctcacggtgggcacgtctcctgagagagtcaatttgatggtgttggtagggaagtggtcggtcaccgggttcttgtgggacggacaaagtacaaatcgaagtaaacagttcagaggtggacagagaagggagtgaggaatacatgtatgtgatgtgctcaccttgacgactttaagaagcttttctgaaccgttcattcctcggatggaaagtttgtgtaacagttggactattgttttatggaaaccgaagaagagtaggacggcgagcatagataagcatagtggatggacgaagagaccgcaagggaatctgaccagagacatacccatgagtccggagaaacgcttgaaagtacgaggaattcggacatgcgggttgacttctatgaggacaccttttgcggtgtgaatgtagacttgcagtcgcccggccttgttgagcggcgaatctaggagggtgagcaaacactgtttatacgcgaaccaagaccacggatatcgggatgtaagattgaggtaaagagattgggaacagaaagaaagccgacagggaagggagatgagagctaacctggtgggtgatatctggcctggcgtcggcgatatctctcccagtcttggcgaggataccctggtggtcgtcacagttcaacaacgcgtactttgcgtcctttccaccctttccatcccttcctccactcccagcagagatcctgtacacctcgagacacgcactctccagcacgacgatcagccgtctagcattttccttctggacaggtgtcttcggaaccgaggcctgttgggggaccatggtcgggtttgatcgtggtggcagcggttttgtcggtcggtccgtggtgttggtgttgttggcagaggaagacgatgacgaaggagtcgggtctgaattgactccgttctccgtctgggtgtcgttcttcatgataacgtccgccagcgagttgttcgctgctccggccgatggcccagagacgtttcggccagagggcacgaacggggttgccgtggcggtcaggtttgatttcaccgcctgtttcgtcgggttgcttgacattatgagaggtttcgatgggatgacacgcaagcgagcacggatgggtctgggaggacgaaggagcgagggcgaagaaggcagggctgggaaagcagtcaagaaaaggaaacagacggtcttccgttcggtccgtcgggtttgatggtggttcgatgtccaaaaaaaagaggaaaatgggaaatctcaaattcgctctgcctatttttccaacatcctcccagcctgacgccaggctcggagttcccctccaaattatgcaccccacgcttgatcgtatccaccccgaccttccatataactcaccagttcttacctcggtcatgtcggatacagatagccagccagctcctttggagaagacaaagaagtccaagagatcgagaaccgagggagagaatgttaaggagaagaagtccaagaaggccaaacagacagagtctcaggaaggaactgtgaccgtggtaggatccgaaccgttagctgagagcagggccgaggaggatgaggagactcccgcggccgaagccgagaccaagaaggtcaagaagagcaagaaagataaaaaggacaagaacgagaaaaagccaacgacatcacttcctccccagctggatatctcggatgtaccagcttccatggacgagacgtcgtcttctgaacctaccctctccgctcaggccaccaaaggtctgtccatcatccgatttctctctgtcttgctcgtcaagatggctcagagacgactcgaattcagatgactgaatatttcatgcttgggttggatgcagcaattgaatacgcaaagacgattggaacgccagcgttcaagtttgctaaagccaaacaaggttggctcatgcgcaacgtcttttccgccatcgaggtgagtgttctctcagtacgcgacgttcaccagagccgaaccgactatttagggacgattggaaactggaattttctgttaatggctcatcgtgtgtgactgtctcgcctggttagattcctgattcatcattagagaccgtgttggagtatttgaagacagtcaagggtggcagccgagaggtgagttttcccattctatcctcaccctaaattgttcacatacgtgtgtgtgtgtgtgtgtcactgacttgacttggatggaccggtcgaccgatgactgctagcatctcatccaacaagcccgcactcttgcctcgcctcctccgacagaacttcccgcgtcgacatcaacatcagaagatgccgaacagacggcagaagaagccgaggaggccgagccaggaccggagccgaccgatccggaacaagtagaagacgagacgacaaagaaagagagggaatccagacaggaacgggcaaacttggtcttgatggctttgaacgtcactttatctgaatgaatgtgtgctctgtgtgtatgtgtgtgtttgtgtgtgtgtttccagagaggtcgatgaacaaaaaaaaacttcattgacacatcaagacgttcagacttccagacactcgtacgctctacaaggtacaaagagaaaaagtgaacaggtcaagaaacgaacgacaagagcccaagactgatcgtttttattttttttcttccctcctgcgcgcgcgctctcctattttcactttaagatccttttctgaaaatgaccagagagatgatcgtagaggacggcaagaaaaaggagagaagatctgaattgagatcagttcactctgggtgaaagccgaggcgtccgtggaacgtcgttcgagtgaacgtataatcggtcagttgtgtgtgacggtcggaattcagctagctactgaatcgccagaccgataagcctaaaagattagtgagcgagccgagcgctgcttgcatgttatccagggagcaaaaccggacaagagaaaaaagaacaagaaggaaataaaaaaagacaaaaagatcaaagatcgaaaatcaaacgagaaatgaagaaggagaggctgctcgtccagaggttttcatggaagaagaaaaaaaagcagctgaaggacagaaagaggcagagaaaagaaggcaccatagataacgaacacaagaggaaaaagaggagatatcttgatttaagaaagaaacgaacgtgttctagatataaatctatttcatcatcaatgagaatgagaatgaaaacgagacgaaaagagtgtgtaaaaagagtgttaagaatcttgttcttttcctccatcagtgaacagtgtatgtatggataatttttttgacctatttaggtatgccttaagagtgcataacgtaaaaaaagggtaataagaaaggcagacatggaggtgtgagaccgaaacggaagaacgaatggaggtaggaagctcgcattatgagatgtagattgaacatgctagaaaagaaaaagatgaagcgcggcagcaaaagaaaatattaagcccgaaaccagaaaaaagatgcagaagaagaaaaagaaagaggagaagaaagagaaagagatttttttaaaaaaaaaaggaagtcgtctcccaggccttaaggcgtccggtcttcatcctcctccgcccaatcgtcccactcgtcatcgacccgttttgtgacggccttctctctggaacctagaggcctcgtatctgtccgctcgtatgacggcggcggggtctttcctctgatcaactcacccggctcttgtttttccgacaatggcggcactagaaaatgagcagactcggtggtgatggtagcggtactactactgctgttgttgccgtcagccagatcgtgcagtgtggactgttggtggtatgaagtctgcatcgacgtcctcggtgtagccgcggaagaggatgtggaggaggaaggaacactcgagtacggactcgggctttggctctgttgaacaggtgtcaagaaggcaggaaggaaaaacaggacgccccgtttgggctgggtccgcctggaagagtatgagccagggtaggaagccgacgaggccactgtggggagcccttggaaggagggtctcctcgacccgagcgcagaaggggacgaagtggatgacacggtggagaaaaagatggcggggatggagtatgtgttggccgctcggcggaaggcgtgtgcgatcgccgagctcggcgttgggctggacggtctagagccaagaccggccgaatgggcggtcgaagacggagtggacatgtctaaagagaacggaaggaggggagacggcaggggaaccgtcggggacgtcaacggcgatgtgtgtgccgaggatgtatccgaggacgaggatgagggaaggaaggacaaaagctggtacgttccaccggcggcagcaggcccggccatcccggctgcagtatcgccgagagagaagactagtctgcggaggccgccggaagactttctgacggctcctctgccacgcatccagatgagccagatgctaccgagtgtcaccacgaggacgcccagacgcatgagccacttgcctctacggccaaggaagatgatgaaaccagagtcgtcggcgtgccaggatgagccgtaaaagtgggagaaaaaggcgtgtggagcttcttcaggagaggcgttctttccatagagagactttggcatgactctgatctccaacgttgggtttactgggctcaacggatgggacgaagtgtaaagcgagtactgtgccgagaggaacattgggctggatgaaagaagaggggtcgtgtaagtttttttactgcgctctttcatacaacagagggaaaaaaaggagaacaaataagatgattaccctgtggaaaacatgacggtagggtagtttgtgatgtagtcatggttgaatgtgatgagcccatggatggtcatctccatgaaagcggatcttttggaggagagcatgatatcgttggagacaccgacctgacggaaaagcaagaaccaggtcgaaggcaaagacgtcagcaagcttgagaaacaaagagtgtcgaaaggaaaagaagagaaggacagacttacagggatggttttggcaaggacaacgtcccaatcacctttgaggagcgggccgaggtctcgtttgcagccgacatcgaggtccatgtagataccaccaaagtgataaaggacaaagtatcggatggcatctgctctctggattgggtactgatacgagtcgaacgtcgccaggaaggagggatagtgggcaacgatgaaggctctcgaggccgagtctgtccatagatggtaggtatagtttgggagacctcgtctgcattctttgtagacgtcctgtatggttcaagagggaatgtggggaaagagtggaagcgaggtgagtctggggaagcaccaagaaggaattgaaaagagacgagggcagagtggaacagctagaaggacgaggacgtggctggaagaagagggtggaagagatgatggaccggaagaagaggaaaggatagagaaaggaccggaaggattgaacatggaaggaaagaaagcactgaccctccatttcaagggtaactcatcgttcatccaagtttgatgaatgattcgagggatccgttcgccttccctgttgaccgaaggatcaaagatgaatagagcatgagcgttgacgacaagagaagaagaacagcagaacaagaaagagaggaagaaagaagcaaaagaaaacaagaatcaagaagggacacctacaacggcttgatgtgctccaacctggtccaatcctcggttaattgaacatgtccggaccagttgtctgctgcccaagaggcgttcccatcgttcgaccgatccaaccctttccagacctcaccgggcgcatagggaacgtctcgctcggagagaagcgaccaattgggaacaccaaagaaccaggtgaccgaggaaagcacgatgacggtaccgacgagaaagatggcgagcaagatgataaacacaaacaagggccgtctgtacctggtctgttttgatgaggccatggtgtctgagtctttctttgcttgacgatatgggtctgatgggtgttgggtagtgaaagaaggcgatgtgtgtatgtatatatgaagaggcgaagggaacgaggcaaagaaagaagagagggttggatcgatgaacacgtcaagtgggtgacaaagttgacgataaggcgacgcgggtgtggattgagccgggccccgggggagagagaaggagggaggaagaaccgaaggttgggccacaatagggaaaccgatggatacgatggctatacacacacacacttacacacacacacacacacacacaatgtaagacacactcgtttgagagatgcacgaacacacagaacacagacacacacgcaacaaaaagaaaaagacccagaaagagaaccaacagaacgaccttcatggaaaggaaaagaaaagaaaagacaagaagaaaaaaaaacgatcaaatgggaagttgggaggagcgagaggcgaggagaggagaggggacaaaagagggcagggcgccaggagagcgcggtgctgtcggtcttggttacggtcggtaaccagggcatgcaggctaaaactccgtgtttatcgttattttagtttttatcgtcattttttgtgcttccgcagtggctgtgcacggcttcaatcggccccgggccggtcggctcgacggccgggcggcatggttacaaggcggagtggctacgtaagtcacggagattgacgggtaagccatgacagtggatgacggtggatgagagtgggtttgtaacgttggggggagaacgagggggttgacttgtaacggatgtcgtgaatccaaacggtgtccgatttcgtccgaaggcacgtgggtgtgtcagaacgagtgggcacgaatctaatggggaagacaacacgcgcagtcgcgcacgacctacacgcggtcttaccagccatacacacccacacgcaacagaaggtcgtctttccttccttatcggacgtctgacgccgatgataaatctagacggccccgagaaagtgcagccaagtaaacattccacataaacaaacacagtcgatcactttccccctccctctcgacactgtccttgctctccctctcgactttgttggggtaatcgaactggacgatcagccaaacaggcatgcatccagagagaggacgctttggtaacgttctgctaccggaaagcgattgatccgatgagcattttttctcttttcattcttcgttcaggcgcctcattgttatatgattttaaaataaaaattaaaaaagaagagaaagaaaggtagatgaaagaaaaaagaaagaaggagcttctctgtccgtcttcctctccctatcacctatcaatctctcttgccgccgtgcccgcgcctccatcagccgtgtgtttgtctgtgatcgccctgtctctgtcactgcccccccccctcttcttctattgatcatccgggtaagtgagccttttgagtgttcctgttgggaaatgaaagggaaaacagaaaggggctcgggaagggaaggagaggaaagactacagaaacgaggatcgaccgtctcgacaagacgtcactagccgcctgtccccggtctgttgggggagaggctagagtgagcatgcatgttcgcatacacgcacacaggcatccaggcacacacccacgcacccacacacagacacttcctcactcactcactgactttctccctcgactgatcgaacgccgatcgggttctcctctctaaaaattctctactgccttctgttccggtatcatccttgaagatatgtttgtgcgagggtgtatggttgtgtgggtgtatgatgtagattgatagatgtaatgttgtcaacgctagagacgcgtttgttttctgcgctcagcctttccttgcccgagattctcttgcccggttggtttagccagcatacatccatacacacggacagacacagatctagatgacgatcccttatctatgagagagatcttgggtggcttgatagttgaagaacacatgcgccgctgttgatcgttgaacacgatggatgatcccaataaaactctttagactattcatagttataacctttgagccttgctgggatcgttccaccaggatgcatgaagttctgaatgaggtcatgttctattctatgttctatgttctgtgtcctgcttcctgtgttatcgaacactctgcgatctctcaactcgtttgcttcagtgggtctacatcgttcgttccatgtgtcactctgttttgcccccagcctgttctgcacgcgctttcaccatccctaggtgatcgtgtatccatccgtctcttgatcgatgctccttgctccttcccagaccgacaacttggttggcttgttcgagtctctgttctccttgttctacaagaaccgattcatctctctatagcagattgtttcttgatcctttgtatcttggtcatctacaccaacaatgctcagctctaactctgtctctatctctcacttgatccgtttcttcatttcccttcttttaaatatctgcaaactatcttcttcctcagaatcccggcaagaccattctacgatctacacgacctccaaactcttccatctttgaaccaagtgcatcgctcacggagaccctgcgcgctgtacgacaacacactcaacccaatgctcacctacgtgatcggccaacgtcgtgacctttttcccgttcaaactccgctggactttttcacttcttatttttcaagtcttgggcattcggtaggttgactccctctctcttcttctcttgctcaagccagtcgttgttgccatcaagagaagatcggcagtgaacaacgaggtcgtccctctaagggatatgactggagttgttggcgagatcttgtcttgtggaagaacggcttggtctttttctcgcctttctatttccttcatggtaagtctctaagccatacagcaatcctacaacatcatcccctccctcttcctccctcacactctccgacgtctaaggatgaacaaattttacaagctcaacagtcttaatcaccctatgtggattacaactcttcttcttttttattctctgaaatcactctttcacctcagtttttcttccagcctgatccttttttgagaatcttttttactaacggatgttttctcttgctcgggtcttgttggtcctaggttaggtcgtttggaaacgttgatcattcgtgtttgccatactggtcttctgaaaaggttggttccatccaattctggctgatacatatcatttcccttccccctctcccaccgcaccgcaaggtggcccttctaaggatgaacaaattttacaagctcaacagtcttaatatccacatgtggatcacaactcttcttcttttttatttctgaaaccatctcgtctctttgatcttatactttgaattctgtctgaacagtgcaaatttactgactcgaagatgccatacatttactctgtcggtttagatcagggtcgctgttacacaacaaatcgtaagaaacactttagtcttcacgctctccccaagccaccctcccttatgatgagaaccaatcacatcccttcctggcccgctcgtctcgaaacggtcagggaggacacctcaatcatctatgtggatctcgtaattctgcaatcctgaggggatatccagtggcttgggatctttggtttcagcatcgttgtcaccttgtgctgacttttgcttttccatctgttcttagtgtatgtctgtctttatctagtcaaattcttgttgtatatatatatgtgctctcctttcatcatcactgttgttaagatcatccaacgcacatgcgtccgaaagcctcttgtcacactcaatacacgcacaagaacaattattcttctaccatgttctcatgtgaacatacgctatgacagacacgcttcgacaaacacactaagcatacacagacaacaagcaaagaatagcgcacaagaaagatacatccaacgggaaaagtcatgacgacgcgcagtcggctgtagatcctatccttcaacctcgtcagccgctttccttccaggctcaccttcttctcccgtccggtccgttagaagagacatcgtcccatcctttgctcttgacaacgacaacagttcattgccattgcgttcttggttcatttgcatatatcctctgtttcttcagaattccatccatccatccatccttctgtccgtctagtcagtcaccgagcaggttatcgcctcgatcagtcaagctagagaaaattcattcaagcccaacaacaggaacaaatctcaacgcccgatgatcacgttagatctcggacacctccttcaatcgactgctccggaggatgcgcctcttcggagacagctcagctcgatatcaaccagcgtcgcaaagagtaagaagatcgtggttgtctctggagcgggcatcagttgtagttgtgggatcccggttcgtccttccgtcttggaacagagagaggactctttgttgttctcttcccttcttttttcttctcgttttcgtccaatccgctatgaaacgctcccttattgacaaatgtttttctttcacggtctgtatgttctccgtctcttcaggactttcgttcacaagacggactctacaacctagtgaaaactagataccccaatatcgtccttacgggcaaagacctcttttcgtcctctctcttccgatctgccgaatcaacttcactcttctactcctttatcgccgaactcaaactgtcgatcgatgcggtcgaaccgtccaagacgcatctgtttgttaaaaagctcgacgaaaagggcaaactcatgagaagttatacccaaaacatcgatggactggaacgacgagccgggctggcgtgcagttcgtcacctccgccagatccgtcatcctccataacatctatagcttccaccaccccattcacggcaccttcgagtgaagaatcgcctctcgatcagccacagtcttctcaggaatcgtttcctccgtcatctcaatcatccgattacccgtcttcctcccaagactctattctgtccgccgcgtctacgtcaacagcccgatcgagtggaggcccgacgatgcacaaaaaatggacgaaaaatgttcaactacacggagacattcatcaggtccgatgtatggtctgtcagagctcttatgatttcactccagagtatgtcgagatctttcgagagggtgacgccccggaatgccctgcctgtgaagagagaggttcgttttctttttctttcttctttcgttcttcttcatagcgcttgtctcttttcccatcaaacctgtggctccgactttcaagatgtaccgttgtatactgacagttttcatcgtcatcatcatcacagccggagagcggcgggcgagggctgctcggactttggctacgggcgtgttgagaccgtcgatcgtgttgtacgacgaggtacgcatatagtcatttactcttccctaggatgcttgtctttctgatcggctgattttctcttgcttccttcgatcagaaccatcctaatggagattcgataggcagtctgcagacacatgacctttctaaaacgccagacctgctcctcgttctcggtacctctcttaaagtccatggactcaaaaggctcgtgaaagaactttcccgatctatccattctttgccggtcaccaaggctagaccacacggaggcaaaggtcgggtggtgttcgtcaacaagacggaacctcagggagcggaatggaaaggggtgtttgattattgggtcaagggcgactgtgacgcgtttgtgagcaaggtcgaagaggaatggcgaacggtcaagaagagtgattgggagaggcaggagaccttgacggggttgggcgcaaaaatcgtcaaaaacgtcgacaaaaaggagggagtcaagggggaaaaaccagtagaagacatcggaccatctgcaaacggagtcactccggaaaacatcgagttggatttgccaaagccaaaaacgaaaaaagcggcagtaaagaagacggctagtaaaggttagtagtggcttcggtcgtttttcttttgaatgtagccctgtactcatttggtctttatcttttgatcgtcacagctaaagtaacgcccgtcgatgcttcgctcactccgccagtcactttaccaccatccccgatatcagaacctttccaaacatttgatgagcccgttctttccatgtctccgtcactctcttgcccgtcggctcctacccttccatcgactacccgctcgcctatacgtacaccctcctcccatcaccatcgacatctctcttccccttctcgccggctttctcgcgagaccacgcctcagcctgatccaagctcgtctctctcacctgtctcttctcctacttcttcctcaaaacgatcgctcagctcttcaaaatttcacgcgtctacagaggatccaccctcaccttccaagaggtccaaacgatccatcaggcagacggtctcggcgactttctcctcaccttcatcctcgccttgctctgcccactcgccacccagagatctatccgagatggatcggccaacggagacgacgacgatttctttgagcggcatcgaaaagtttgctttcaacctggatgatgaagatgagttcgagggggaacgacaggttgagatcgagcttacggaggtcccgcaagagaaagtacttgaagagaaggaactatcggtggcagtggctccgacaaagagggcgacgcgatcgaggtcgcgcacacccagtgtcaaaacctcagtcacagagcttttggcaccggctttgcttcctccgaacgatggcgtatcaggtgacggacaggtaaagccagtgatgtcggtgccggtaccattaagaaggtcgacgaggagtgcgttgagagctgccagttcagaaatcttatcttgagcccaatcaagaggtttctttctatcttttttctttctccattcttttctgctctcttcgtttcttgactcgttttgttttcttgttgtatcgtctcttgttcccgctttctttcttcgtcttctgttcaacatgatttctcaatcggctagttctctcgcgccatttgttcttttaacttgtcttcttgctcccttttgttcgatggtcacgatcaactgcttccctcttcctttcctcatccgacgttttcttcgatcagatactacaacgataccaccatgatacccgtgtctatttccgataaatgtctttagtttctaattcatgagccttaatcacccggagcatcgtccgagatcacacaagcttgagaccgctgatgttgctggagcacggtggctgctcgcacgtttcgaccgtgcccgggatccaggaacgaaaagatcgctaaggtctgtatccatccggacaggccattccctcagatcaggtcacaacaacaacacttgtgttcgctcaactctctgttctcgcaacaagtagctcttggaatctcaccgtacacgttgaactcaccttgcgagaagcgccaccccaggtcaccccttcctcattgattgtctttgactcgagcacgcgcatatatcggtatgggttacttttcgtcgttcgtcaagggacacccaagcgtcgagacgataggatcatcgatcgaccatccagatcatgaccgtaaatctaaacgggttcggcctccagtttctctctctcttcttaagcttgggtcttttgaaagttggacgttggagatttcgagtttggtttaaaccgaactgatcacacgctttcattcgcatgttctccgtttctccctcgttgtttcgctctaatcttgcaacgtttcgaatagatgtctatacgctcgatcaagcatacgcctcggctgtcggtcatgaacgagctgaatccgcaattcaataccattggtcgacctagcgatctatttattaaaggatcggaagtttccattgctctcgcaaatccttcatgtaatcctacagcggtagattcgcgtctgctgtccacagaaccacctgagaaaggactgataagtaagatcaaattcggattaggctcaaggccggtggcgatgtattcccagactatgcccagtatataccagagaaaatctcacacctcggtgtaccaaccgagtgaatcaatcagaagagcatcacatcgagaactggatagagatcagaaagaagatgtggatacgtgagtgtatatccctgtcaaccctcctcctcctacggtttgactgtttctaatccatcctgataccatattgataactctccatgcgcgcgctttatctgatcgaccgataagtatggcgagtagattgaatcaactagcgatggccaattccaacagtctcctggggttagttcatcagattttagagagaacatataggtttcatcacccacatcaattctgatcgactgatcgacatttccagagatgaagactaccgtctacttcgacaaatattatttgacgagtgcgcgagtagacaaagctcttctctgagcaacagctcaaaccgtacgaccgaaccagccagaggctccgttcaatcagtgcggggtatgccccttgactggaagcctgctcctatttcttatcacgagcgggccttatcattaagttcacgatacaccaggtatagtagcaggccctctttctcagcccagtactcctcgatgggcttaccgaaggtgtcgagctctgaagccgggtcaccggaagagattctgtcgatgatcagatcagccgagtccgaaagcagtcatatggtagagatgtttgaccagatggagagaaaagtactgactgaagcagtagaaaatgggtggatcgtcgaccagaactcgaaaaatcaaacggaagtgagttctcctgctgtatctgttgggcgctgttgtatattcagtgaatcaagagactgtttgcatctatagtcaaccagtgtggctggatccaaactcgaatcaaatcctctcgtttcgaatacttcggatcgaatgattcaaatcaagctgagtgatatcagggagagaagacgagacgttcagtatcgatatgatcttcggctagatctttttcgaaagaaactcagagcgtatgttccctagctttcctatctattcggcttggttatccgtctttctgatttatgtcagctcgcattcatgactttagagcggaaatcagagtaaatgttatgcgttgatgaatgtagatagtatgatgctattttctcctcctgggcgtgtgcccctgagatcttctcggtatgagaaaccctgagttctctaagtgttacttgcttcctgtctgtgattgttgattgtccatttaggtgtcgctactattctctctgtcacacccatcaacttgagtgttctcccctatcgatgtagtttcctcgtttgtttttgttacaacatcacgtcatcctggcaccgtctacctacatcgcttattattgtattttgagtgtacatataagtgttttgccacgatgtccgttagcatctaagaagggtcgtgatagatcatgatatgtcgtttcttataggtatattcccgtccctccttccatccattcacgagctatgcgctgccggtcaagccccagagcaatccagcgagcgcacagagtttttcagggtcctgggcttcttcggcagagagtaaagttacaggggtgatgtttgattgagcatcgtttcgggcgaggatcttgtttggtgctgaaggaacgttgattgatgaggtgtttgatggggagggaagaagtgtatagcctagagattgaagtagattaagccgaagtctgaagaaatcgtttggagcagagaaaaataatgagaacatcggagggttgatcaatgataggcaacggaagtttgctcagaataggaaaagggaatgatgtggcagataagaattgacatacgcttccccatctgtttctgctgagtctccgtctgcatcactccctgacaaccggttctctctccactgctccctttctttctccaacgctgcgtattcttctttcaggttctccaatgcccgagctttagaagcgatcgaactctccttctcgttcgttgccttgccaagcgagagctgggtcttgccgagttgttggatggattctcgatgttgctgttcggtcggttgattcggctttcgagttagttgggactgcgcttgcttgagtttttttgctagagctggtttggttcatgtgaacatggacatgaacatgttcgtgagaggaactgggttgagactcttctacttctccttccgtggtgaaagagtagaacaagaacagaggcaaggacgcaccttttaactcggcctggatctggtcctgttcgaccgaacgttctctcgcccgattatcgattgcattctgggtttcctgaacagaataaagatcgtcgtctgtgttgatgagctgacaaacactctggaggacgggtctgttgagccgtgtctcattaatatcagcatcgtacacaccccaacggcaactgaaaacggaccgatgatcaaggcaagagaacgagagaagcaaacggttcgcgcacatcacatccgtccaagcttgatgagatttgacctgaggagatgccatggatactgatgtttgagcaaagaaagaacgaaagaaaccaactggcttggaccgactgaaggttaggatgatgttgctgctgctgctgctcaaccgaatctactcaagttaacgcgtaaacgcgtcgcgcgtcgacgcgtcggtgccaagaagatcaatatcctagctatgactgcttcgcccacgaaattcagaaaattcactcaactatcatgatgatccggctgaagctcagggtttctctaatccaaatagtcatccgtaggattcgttaggtcgatatatacaccaacaaatggctactccgttgccgaaaaagatactattcgtcttgtgtctggccaggttgggagagcctatcgcatactcggtcatctttccgttcatcaactctcttgtcgaggggttgtctatagtaaaggacaagtcccatgttgggttctatgccggtcttcttgagggcgctttcagtttgagcgaggttagctgattaatatcggttctgttgtgttagtgcttgaactcttggtcgcttacccaaagattgtttgtcacatcccacagatccttacaatttacttttggggaagtctgagcgaccgcatcggtcggaaacccgttatcatcatcggtctctccggtacggcagtgtcgatcgtttgcttcggcttatcgaccgagttctatcaactcgctctttccagagcgctcaacggagcattatctgggaatgtcagtgtgatcaaggcctgtctggcagaaatttcggacgaaacgaacgagagtagaataatgcccatgttcaacttgatgtggagtattggactggtcatcgggtatgtttccttgttctccctatgtcattgtccgtccgatataatcagatcatatcctctgttacaaacaagaggaaatcaagttggttcgaccattctgacgcaagatcattcgacctggtagaccgttaataggtggttatacatcgaagccagccgagaaatttccaaccgtcttcacttcccctttttggaagatatacccatacttccttccttgtttaatcggaagtagcatagcgttcttgagctgccttgtcactctgttcttcttgtcagaagtcagtcgttcgcacattcaaaggacatcgatatcctcttgagtaccttggaatactcatcatctcttacattccgctttatagaccctgcaaagcaaaaaacggagagatgccgaggcgatattggccgcacaaatcgaacaagttcctctgctcacaccttcaccttctacaaaccatcttcctatatctccgtcttctcctataccgaatgctcttacttcgaacccacccccggagacatggacactcaaacagatactcgggacggtatctatccgagtagtcttactttcttatttcttcatcgtgtttctggcgagttctttcgacgttctgttcgtcctattctcatattcagccaagaaacgaggtggactaggcctatcggtatgttgtatctttgacagctgttctttgttagaaacaaactccctgtgagctgactgaacaagattcgtttcattcattcatcgaaaatcatcaggatgcaaaaattgcacagttgttgatggcaggaggcgtgatctcgttagttcatagtcgcttttcggtggctcatctcccagttttcttcaaacgctgatcgctgggacttctttcctccttgtctgtttagtgctgtatctcagctctccatctttccaccccttcatcgaatatttggaaccagcagattataccgagcttgcaacggagcatttgttctcgccttcttcatccctctcgttctcgtcgttcttccttcgtccaacacaaacggctcgttatcaggttgggagtggggagctgtgggaatgatggttatggtgggcagagctgctttcttggcatttccgttcgttcatcatctcctgtcttaccttgttacaagaaagtgaatactctcgttgagaccccgtcgcgctcaccgtactgttcttgctctgtctgacaggctgagcatgattgcactcaacatcgctacaccctctccatcagctttaggctcggtcaactcgatcaatcacattctcgcttgtatttctagaggagtcggaccagcgctcgtgggcgcgctcttcgcgctttccatcaagacaagtaacccgtgtgagttgccgttcaatctttcaatgttctgaatcgatcagaggattatactcattctgcctctgctctacataaacgaccgaatgaatggggaaaaaaaatcaatcttgaaaggggtctggttgttctatataatcttatccct

SEQ ID NO: 1948 - DNA, 25521 bp, Xanthophyllomyces dendrorhous
atataatcttatccctcgtcagtctcggctttgccttcccggttaaaggtagaaccggcacatggtctggtgtcaaaaacggattcagtcgggttcactatgacgatgacgatcatcgagaagaccaccgtccacctgctttgatcgtgcaggcctctctacctgcacccatacccagatcaagtactctaccggtatcggtaccagggacggtggaagacagcaattcagacgggaagggtggctcttttcagagatctcgccggcgagaggaattataactacgagtgtagaaggaagagtgttttggtcgtcgtttatatagacttataattcatatgtgtagttaagttatcgttgtatctgtctttgtctttcatagcaaatctagcaagcggcaactcgttgggacttgatctttgtcatcttcatcatcttccacgtcgcctttttgtctctaaccaagacatagattcctgattccgttttgaaatggagcattccccacaccgcctgaaatcatattcgatccatactgatactccatgcacaaacatggccttcctgtcttcttcttgtgtctttcatcctccgacgactaccttctacgtcaggaaggtagtctctggacgtaggaaaaaatttcgagagaaaactctattggcgttatttcttgaatgataaaggaagctgacgagattgttttgtcgaagaagagggtatggtcgggtattccagcaaggaggatgtgtacaacaaggacagttcttcgtatggtatgaagtgacaggtcgggtgaatatgaggggtatacaagaagactgagtagaaaacaaggcgaggggagcgcgctcaacgccgccagactttgatggatccatctacgtgaatacagatacaaccggccgtcagattagaggtttttttttttaatcgcatcagagaagcaagaaattagaacggtaatatagataacggaccagcaccggcagtaagcatctcgtctttgtcgattgggtttgtttcaacccagagcacggctttactgtgaatctgacgaggtgccgctttcgatagtggtttagactaagcgagaattggcacagaagaacgaaatagaatcagaatgacttgctgcatgaactgatatataaaggaaactaaagcctacgtcaagaacgccccatccccaaagttttccatcttcatcgccgcacactactccgctctcgcctaataagaaagcggccttagatcgatagctctcattcttgtgcccttgaaaagaggcgaggactttcccgttcgttcggtctagaagccggatggtagagtcgagtgtggtgacaagtacagttgtattcgaggtgggagagaccgtgagagacgtgataggatctaaatgcggcaaaccccaggacgtcaaacggtcaagtgaatgctggatggaaaaggggatgggggatgggggatgagtgacttacgccctatgtagtcagaacgaagctcgcccattcgaagatcatattctctaacatatccatcgacagagcctgtcatgaggatcgttccggagatggtcacagacgtaatggaatctttcgcctctgtcaatgtctgcaaaggcgctcgactctgcgatcttggttgtagaacatatgacccaaagcttgttcagccggatgactagcagatgacagataagatgtagacatacttgagatcccacagagataatgtcgagtcgtacgagcctgaacatgcgagtttgaatcctggtatgtcagtaaggaattctaccgagagaactgtagaaacagtagacgaaccggaggcaagaacactagcatctgcattgaaatcaactgcattgactttactggtgtgtctctggaacttccggatgaccgacccggtagtcacatcccaaaagagtaccgacttgtctccaccacacgatgcaaactttgaattgtccggtgttctgaggacgagggtgagggcgagggcgaagtggtgatcaggatacagagttcaagatccacagagcagaaagacaagaacgaaagacctacacgcagattcccaacacctcatatgcatgctctttgtagcatttgatctctttgcctgatgttggattccacagtctgatcgtccgatctgttcctccggagagacagtactttgctcctgcctacaaaacacacaaaagatgatcagcttgaaaggatcaccaggaggccatggaagaagtctggactcacattatatcggacgatgttcactgagccaatgtgggacgacaatgtgtgtgccaacctggacggaggctccataggtgatgtgagatcaaccatgtgtgctatgctggatgggacggatggctatatgcggtcggatgtgagtgcgttgggtttgtggagaaagactagagaacgttttgtaatggcttattagaaaacttcagaaagcattaggaaaaactctcctaaggcttttgccaggcttttatcagcctctctccttcttccttcctcatccttccttcaaaggctagagtcaccatggcaaactcgagtgagctcattgatccttcccttcaggaccatcaccatcatcagcatttctctcagctgcatcacaaccaacacgaccatcacgttcatcctcatcactcgcatcgacttgatgtcgaagaagacgaagacgatggaatcagggatccttctgctgtcgcgggtctagttgacggtgtggtggaagatgaagaacaacaacaacagcaacaccagggctcgccagaagactttcatccacatcaagaacagaacatccttcaccatcagcagcaacagcaacaacagcatcatcaacaccagcatcatctcagacagcagcatcagagggaacagcttggggcatctggcctgactcaagggagagacttgagtaatatctctgaagcagagtacgtgttcacctctcatatgccatcctgtactttgaaaaacttcttgggatcaactcagtaaactcttctttcccttactccatgtgatttcggttctcacagcattcaatccatcctgactgcgtcccaaatccttcaatcaatcgtacctcagtctcaggccggtccagccacgacaagccgtattccctctccgcttctcgctcttcgaaatcatgcttcacccgcgtctggctcctctatcaatcgaaagagacagtatatcgaactctcggatgggaatgaggctgatgtagacgaaatagaggatgtcgattacctaagagaagaggtcaaacgattgaggatgctcctcagagaacgagacgcgtctaacaagaatggagaggaaatgggcaggtccggaagcacaggacccggaggaaacaaggcaaagaagaaagatgacgggagcatcgggatgagctcagatttcaagagggacgagacgaccggcaagagggagagcacggataggaagggcgcgctgaacgtttgtctcgttttcttcaccctcatgccatagacaaggcgacgcgtcgctgtgtgccgttcattcaaacttacgtctgttgattgaatatatcctcccctgtcactctcccatactgttatccttctgagcaatctagaaagccgttcgatccaagatgagaaacctgatgggcatagcggatgacgcgcctcttcctgatccagttgaccccctcttgcctcaacctctatctatgaatggcacgcctctcgctcgacccaactggaatgtcggtctcaaatccatcgccaacaaagacgtatgtccccttgtcttgctttactattcgcaacgcgctcattctgatcgatttttatcttgaactatctctatctattctcactgatttagtggattgaaatcgtggccactcaagtcatcaacgaaggataccaaactctccgatcgcctgagtctgctccgcttcatgctgttcgaatcccagaagatgatcttgatctagaaaaggcgagaaaggcagcgcggacggcgtttggaaatttcgtgaaaaagttagtttttttctttcttttcatccgctttttttttttttaattgcagacgtgatattggaattgaactttcgtgattatctcttagatacgcgactcagaatgatccgttagcaaagatcaaggccgttcgagacgctaaacggggtcgacgatgggctcgcaaggaccttgttcgtcacccttcttcgctaattgatatcttgccagatgcttacccataatgatcttcttggactggtgggaatcgtgacagaaacaacgcaaaagaacaaaggcagcgacggacccaacattcaattctcagtacgcccaacacccgtatccgcacgttctcaggatagactacatgtcatccgaatactcttccgaaggcgaaggcgacggacctggtcgcgctggactaggaccaggcgtatgggactcggtagcagggaagagtgacctaatttcggggggcggatcgacaccaggagcagggggtatctctcaaggaggcgagcaggatgaagcaagcaaggctgagaaagttttagaagtcagaacacctaggtggagaagcggcgaggtgagttctattgcttcttcagttgtctctcgagatcgcaccttcaagcttgcgtgcgcttgtttagtagaaaacacgtcccaagatctcttgtccttattttttctttcttttccgttgccgcagctcaatacaatctacgccgaattggatagcattgctgccgcccaatccaaagcgatcaaaggcaacttttatactgcccctcttctcagacggttcaagctcaacccacttcgagaccttcctccgccagctgatcctacatcattgacgcccttcgaacgatgggagtttgatccatcctggttggatcaatctggtcaggagaacgagcggatgaggaaaagactcggattggcaggaggcgctggttcttcttcggtcggaatgggactcgggggattaggattaggcgtcgggatgagtttgggtcacggaggggatgagattcagatgcagagtgccgggtcgatgttggatctagagtatccaccagatatgcaatcaagttaaaactctttcttgtgtcgattatctttaactatatatgtgtatggaatcgtgtttcaaaactgtccattactacttgttaacgtgttttccgattgtgtgtagcctttgcatggcctagagacgaaaagagtgtcaaatgcaagatgcgttgaatctatgggctatcacatcaaagaagcagagtcctggcccgataccattcgatcagacaggcctcattctcgtcactttaggtaacatctgtttcgcctcgaattatttcacgatcagttaaagtcaatggaaagaaggatgaagaaattaaagagaagaaaaagagctatacctctcgaagatattgtgcatgtttcactctcagatctcggtctccgtcctcctcgtccctgttagatatccttctgccgactcttctccctccgtcctcgtctcctagaagataaatgacagtgtatggttctagcacttcgtctctgttctcgtcttgttcctcttcggaattgcgcgtatcagatgcagaagggacgagcgcacagccggcaccgattatacagttgtcggttatccttgtcgaggccgctgtggatgaccgaggatgaaacgtattgaatgaaccgaccgaaggagattcgatacgagaattgattgagaacaaattatggtcccctatctgcatcgtttccttgcggctgtgtgatcggtttcatgagtgatctctatacgtacaagacgaggaagagcagaacgaaccggttaacgatgactgctccttcttcgatgatgttgtccgaacctggccgagaagagaaacaagaaccatttgtcgcatcaaacgaagacgttctacatctatacatctgagatgtaaccgagattcttaccaatcacgataggtcctgtaatcgcaaatatggtggccttggaatgaatgattgtccctttggcgttcgaatgtcacagatgataccatcagcctaggttcggtcgaggcggtcctgagagatggacaactcaccgcttccaatgatgatctctcctttgagttctacatcgtgacaaacctgtttctcccggttggggttgtacgatgagatgcggtgcttagtcgaacaagagttagagagcactcaatacggacgatcgctgtgtgagagatctcaaagttatcttttctttccagcggaaggagaaggggaggtgacgatgaggctaggtgagttaggtctatatggctggccgacacgtctatctgactctctttcaatatgctcacaataagcgtgccatgctatatcatctgattttagtcaagtcgtctgctgctacttgtgagggggagaagagagcgtcgagatgagatgtgagtgtgggttcgttgtactcaattaaagacttgccgcctttttttgctcacctcttcttttgaacatcgtccataaccatcatcatcatcatcaataaagatgtcgtccaaaaagatgtttgtactacgttctcttctttcctttgtctgtatcatatggcttacctcttttctcacttcgttttctcttctatcctctctctttctcatatagcgacttgctcgttcgtgttcgatacgaaaacccgttacctccgccgccgtttcctccaaagctacttgatattcctacatccatctctcgatatgctcgtccgagcttcacctccaacctcgctaaagcaatcccgctgccgatgatggtcgatgctgagtgtggtatgcctttgaacttattaggctatcctgctatctgggaaggagacatgtcacgttcgttcccttcctttcgccttaaccgagattctatcgagacgcgatctgaccacctacttttgatttcgttctctttctaaaaatccgaattcttgcacacatattcgcatatggatgcagagctcaacccaaaggcacttcatccatcattacacccttccgatgcttaccttctcaccgctcctacccctgacaatctacctgtcgacccctcgtccgcttcgagctcaaagcttgtcgcgaacggttctagctcgaccacaatcactggtggtctcaagccggaagctcatggacacgtcggctggctccgaccgacagagtatattcaaaatgaaacaaagaaggctagatcatcggctgcaaatggcctcaagcagctcaaacgaccggaaaatctggatagatcgatcgagggacaatggaaattaatcgaaagctcgtttgaagaacttgaaaagtcaaaattggaggatatgaggttccctggaaagccccacttgcgtgcagaggaggtctgttcacttcatctaatctcttggtgttggttttaccttcgtgggctgacatcctctttgtcttgccttcactccttccgctagtcgtttgactttttgccagatcctcaatcgtggtacaacgggtactctctcttccgattccaagaagctcccggcaaagaattgtcggatcctgatcgtgtggtgagttccagttgataggtctcagtcctctcgaatggccgataagcttacttctcattaattctacgtttggaaattcaaggacgaagacctagcgctctcttcggctatcttccgaccagtcttgcttgacgacgagacaacgctggtgtactaccttcctgattctgaagaggtcggacggaaagcagtggagggaatggtcgaccggggtgagactggtccatctacagatgaggtcagttctacatttcttgcttctcctgtccctctctttttttcaattccgtatcgcgagaattcatttaagaaacccctgacgtctgttcttcccttgtcgttacactcttctactctttttcgggcgctctgtgctcgtatagtcgtacaaatacaatttgacgaggaagtatgaagttgtggatcaacaactccgacaggctaccgaactaggtttcattctttgcaccgataactcttcgactgaagatcaagctgagaatggtaccggaggaaagaggaagagatcgaaaggagcttactaccacgagtatcattcgaggaccgtcctcaagaagaagagagccaatgttcgtctcgtcctcttccctcttcctttttttgtgctctcttcagtttcttactatctttcacgaatttcttctaacacgacgattcttttctatgcgtccatctttacaatctacccctgagtagaaagaccctcaagcgcaagacgaccaagaatgggacgagattcacctcacattacataacccgacggctgaatcactcgaagaacgacaagagacaaattcgttcctcgtcgatccagattgggcgatcaagaccaaagaagcccagttgagagccgctcaggctgaggctgaggctgaagttggaggtgacgctcaggcccaaacggggtctggaaggatggatcgggtcagcgatagagatgctgagggtgaagctgaagccgagagtgaagaggaaacgggagcgaatgaatagaccaaagaaaacgccgagtagagagctcttctctttccttttcttctgtcctcttcaggttcgatgccatgtatatgacgaaaacaacactcctcagagtatacgagaagggaaagggaagacagatatcggccgtgtatcgagaacgaatggagctagacaagaaagaccgaagttcagtggggccaagctaagaacgagagtatgcgtatgcgtgtatacaggctatcgagagctgtgtgtttgcgaatggcagaacgggttcgatgaaccgaagagtaaaaagaaaggcagaaagaaagaaggaagaaaaaagaagcttgttgaaatgtcctgcaatctctatcgcccgatccggcctgaagaaggagagacataagtaggaatagaagtacggcaagagttggggtatggtgtaacgtggagaacggcaaagaaggtttcagctggaacgctgcttcacacgctaccagaaacaatcccaagagaaaggaatggatggatggatagatagatagatagatagatagatagatagatagatagacagaaaggactcaggcagtgaataccagtattgatatcaaaaaggaaagtatccgtcatgggagaccatgtccaagagagaagattgaagagagaaagtatgcaaacaaaacagagagaaatcaatgttgacgactctacaccaggactacgcgtctgagcagtccgaggacaaggaattagtaacacaagatactacgagatcaagcgagagaagagtccgagtaaacagctaagcaaggagaattggtatgtgggtgatatatcagaaacaagaatagaacccaatacagatagaacggatatatatagagaaatacgagattacagaaggtgaagataaacatgcgctcgagaatgtctcaaagaggaaagaagaaaacaagactgagcaaaagaagtcttgaaacgaactaatcccaaagatgggtgagaaagaagatgaacgaagaggggggggaacagcaattgtgtctcgtttcttgatcaagccaagaccttcttctcattcacctcgacctccggccctagtccaatgccatctatgtttggcacccctttctctatatcggatgaccctacagagtcgttgccggtcattccatccgatgacgccaacagctctccactgtttgttcccttgcccataaccatgcccgtattcgaggtcgaggtcaagttcaccatcacggtgctcacaggaggtgtcatgggtccgttgctagagaccatagttgaactgtgagagtgtctcagcgagggcgccgttgggattgaacgttttgaggcaactaacgtcagatcggatgaaagttcggcttgaggaggtggagaacgatctaagaaatccgagtgcgtcggcttagtcgaaggagagagtgatggcacgacttttgagggtgtatccgttcccttaatctcttttttcccagcatcattcgacgtagcattgggggacgaagtagacgagactttcttggaggatgagaatccaaagatcttccagaacccaccaccccctccttcctttgccttcttctctcttcctttcagactcttcgccgtcgacttgttctctctcgccggcttaacggtagcagcactaggggaggccggtacaggagtcgaagctgaccggttacccggtcttcctcctctgatggaggaagaggcagtagcaggggtagtggcaacaggagtattattttttggctgtgcaattctatttggcaaaggcgtcaaagatgcttgacttggcggatcgacggtggtagcggcgggttcaggcacagacaaaactatcggtttgacccctagatctcccttcgaggagctagtggtcgagacagcaccagtatcagcagcagcagcaaccgccgatgcaggcacagatacaggcgcaggaccgtcggatggtaaggtggcaggcaatggccttgtcggcgctacaggcgtcgatgccgttctctccctgatgccaaactcggagctcccgttgacgaaactggtcggcacggggggaataggcggtatcaaaccaccttcaatctctctgtctgatgaacggcctgtccatgttcggttccttaacgccgtactctcaagcgacgtggttgatttcatgcgagtccggtctttgaagagactcgactgtcctacttcgtcagtcaaaagaatggcatcttcagatgcgactgaaatattggcaacgttcttagaagatttagatccccaaagggaaagtcgtttcttcttagtcgtcgttgtagttggcgaacgcgagacagacgccggcgctgatgcagcctccgttggtgagggtggtctggatgtctgagacagtgggcttttggagaacgtctgatgactggttatcgactgaacatgttcggaaaacagaactgtcaacgatggggcctaatcatcccagtagacagataaaggacaatggaaaaagatggcccttacaggtgtgtgtctcatcccctgaggttttccctcatccccttccaacacagtcgacacgccgttgttgtccgagttgttctttcccttcttccggatcgtactatgtcgtttcggccctttcccttttgattccttgtccgatgtgggcgaaggcgggaggggtccgttccagaccggccacgggctgctatcgccgattgattccagccgggaagatctggagacaggcgaagtatgcattgtggcaaaagggaactttattgggtagtatgtggagagagagagacgcggttgtgagtaaagaatgcttgagtgaaagtatggacgggttggtgaaacactcaccggtccgttcatcgataaagaggatgggtaggcgccgtccattgaaagggacgggtaggagcctaccataccgatagcggtcgatgggaatccatggctaggcgattgaggggacgaagatggactggacggatacgatggtctgaaaggagttgaggacgatgattaacatgcaagcctgataggacgtagaatgagaagaaacgacttgcatcctattcatatacagatcgtccgatcgatagaccgggactgagggctgagatccataagatgacaacctagagtaatcctgtcgatcggcctgtcggctcagtcttttgatggtatccaacggtcgttctgtcgcagagcgatacctggaaaaagggaaagaagaaacgaactaaaacatcagattgtttgcgtggtacataacaatggtgcgaggtaactcacgggttactcagatccatgggtgccggtagtttgccgttattgatggcgacaagacttgaactcgatacggatgattctgcgctgggaggaatcgttctgtccgtggacgagagcgaggagtctgaaccggaggtccgtctagactcgcttctcattggaccgggcgagggaatgatgaatggactcgaggcgatagctggatgtggaacaggccggttactcggcggaggttgatgcagaggcatcgagagaggtggcagagatggctgaagtcgttgagagtggtgtggtggtggttgttgctggtactgctgttgctcctgctttcgaggaggaccagaatgaatgcgaggaggggaagaaagcgaaggaggaggagacgaagacgaagagctaggctgccaaacgatcgaggcatcttttccgccaggcgacgtaggtgaactaggaatgatcggttggactgtgggcaaatctggttggccattaccagggctttgtggcagttggtcggactcggttagaatactatcggagcctccgatggaggattgtctgccggagaaggcatttcttttgaacgatcccttaatggatgtgcgggatttgtttctagagaggatagatctagatccagatggaggagatgtgccactctggtgaagagagagagcctggagggcggcttggtcgggaattttagtcggagaggaaggcgtaaagattggctttggcggaaactcgatttcgggtgatcttgacgtgacagacgaccggcgacgccctgagagttgggaagagaagattgaccatacaggtcagaggctgtgtacgtacaggggaagaattgatgatgaatggaaaaactagagagagaacaggacttgcaggcaacggagggagtctgaaagtaatcgccctggatgtcgcgttcaggagagaccggaggaggagcggcctgagtttatgagttggttgaagggagaagtgagcgatggacaacgacaaatggggtttgattagtaaagagtatcaggcagattgaataaacaagcggcagaaaggaaagaatcgttgagagaagtgtacgcgtgcgatggatggtgagagatggagggaagggacggagggaagggcgagtaagagtgagagtgtagaagagaggaaaccctcggatccaaaggagagaactcctagatgaacgacctcgaccggtctgatcgatctcgaccgaacgaaagactagacagatgataggacgatgctgcttgcgagatggaaggcaaagaagagaaggaaggcatgtatgcgtccaagcaaaaacaagcgaagttggaagaaacccaagcccagcgcgtaaagaattctctttttgattgacagatacagatacaaactcctagctttactcacctcttcgaacggttcgggaagagcgttgggcgagtacattgtcggtttctctcctctctgatgacttgtagatctgtctgtatagagggagagctcggatatggggagggtaaagggcaaggagaaagaagctgggcgaggtcactgacaagggggaaagagtgcaaagagaaagaagacacagtaaagacgggcagggcgggtgattgacagcggagacagggacggcgatatgaatagggtcaggaacagggacacgaacaggaacaggaacagcaaacagcaacagagaatacacatgcgcagctcgatcgtcaacctaccaagcacggcgtaccgcacgtccacggccgcactctgcatccccaggtctcggcccgcgcagtcagacgtcagagctgtggctcgttcaccctttactccttcgtgccccgcgctgtcatcatggttcttatcagccggcccccgactgtgcaagcgtcaaacgtgagctgcgcattcacttgccggagtctatactcgcgcactctgacgcaactgtgcactatcaagccttacggtccgtgccctgacgcatccgacgcgttgtttcaatcatcttccttttaatcacggggaaacaaaaggtttcatctccaccaacgtcccttggctttttttttgccgtcctgtagtgtttgtgtggtttcttctctaacgacgaaatgcgtcgatttgtagtgtctctattgtaattagcttctctagcctctttctactttttttactttttttgcagtctcttttcccggtctctactgcggctccttccgccctggattgttccttccatttccggtataaccctaacgtccggggtctcaatccaatcaacggggtttcttcatcaaccaaaagagaaagaaaaactagcaagatctcatcttcaaactcccttgggtctttcttttcatcgtgcattttttgttttgtttctttcttgatgatacatgatgcagtacgatacgattcgatacggtccgtttgtcaccctttacagtgcgttgttatactcgagagaaggaattttttagaaccaatgtatccattcatatatccagacgccatctcttcatttgccccgaccataggtatatgatgctatgcacacacatatacacgcccaactacgtgtacacaaacacataaacactctctttcgcgtagtccctttcacatatacatatgcatacaagcgctatgttcatctctctcgcttaaccggtccatcccttcccggtcttggtctgcttcttggccgtctttggcttggccttggccttcccgttgttcgatccagcatcgccaacaaacgcatcaaacgcacctttccaactgttcttcatgaaaccctcgatcacgccctcgggaacgactccggcaacgccatcgacaaacgaacgaacggtctcctgtccggacgcatctgccggcttgcttcctctaccggatgaagacgaagagaacagtccggccagaggggaggatgtcttcttggtgctatcctgtccgccgagagcccaaccggcaacttgcttcagattctccagattcccactcgtcgctccaaagtaccaagcggccagactgccaatcggcccgacagctcggacgacttgggagaacgcgttctgagtctgggccacagcaacttccgggccgttggtgaacgcagagtagaccgcagagaccgcggccaccaacaatccccatttagcggtgaagtagaaagttctgagttcggcaaatagatgagtggtcgcgtcagttagtatctctgtctatccttctgcgttcctccgtccctttctccctctgtgtctctcacatacaaagagaacgtacctccacgccatccgggcggtcctcaacatgctcattgctccaaaatacagtgcaaccaaactcatcaccaacggcagatgtcgcttgatgaaccctacaatctcgttatcatcgttcccatcagatgaggtgaatgcagagacatacggtctcacagctggtggaagctgggatgagatcactttcaaagtgtgaatgatagacataaaagaaagattggttagccaactaagagggggatggaggaagcttcgaaagaagaagaagcttacagttgataatagtatccatggcgttaggtgtgtgtgtctatgtgtacgtctccttcttgttgagacaaaactgtcgatagattcaaagcgaaaagaaacagaagagctatccgaggtagagataatgtgtgttagggagaacgaacgaaatcgtatctctgccagcaggaggtaagtgggaaaaaaagaccaggtgggggggaaatcgaaaacgcgtcatcaatacagtcgcgtgccactcgacaagcttcaaagctagcctcacccccaggattgtctctcgcgcaagcctttatcgaactggtctctgtgttcttatggaaggagggtttacagctaatattatctattgtatcgggtgtgttcaataacataggaggttcttgaagttgatttgtctattgatcgaaggcagcctggagagattttggcatctcgtctgtatagaggtatcactatgtatcatcgtctagaggaaagaccaggatggcacgagtcaagcgtctctctttctctttctctttctctttctctttcgccttccctttccctcttcttccctcgcactctcccacagctcctccgatatgtactctggaaagtcagagatcgtccgaacataccagcaaaggtatctgaagcagaccaccgcctgggctcggaccaacacgtgatgtcgtgaccctttagccttcaaactccgatcgttctcggtcagcctcttttctttttcagcctgccttttttccttgcgaatttttctttcttcaaagtcgttgccagcaaaaggctggctgtcccctgcttttcattccagaacagacggacaaacggagcgacttgagaacagaacttccctctcgggttttctctttcttcttcctcatccttcaaacggtggggaaaaaggaggggataacagctttcgatcgtcttgcttttcatttcagagatggtcggttgtcgatatggtacattctttcgccttctcttttctttgctcttgcattcgttgtgccttgtttctgcccattgtgtgtcctagtgggaacattatttcttctcaactatccgatataatgacccgttctttaatatacgaaaagaactatagataaatagaaaacaaaatccctcccaaatagaaacactgacaagatgacgaaagaaatccaagaacgggatagaagcaagggtaggatagtctagcatgtataagtaaagaaagagagaggagaaaacaagaaaagacaaaacctatagtgactccagtacaaagaatcaccacccatccaacagcctccttgcagccatatgattcttcacatccaactccttcttccactctgtccagccttccggcgttctcttccaaccggcctggatcatcgacctgatctcctcctccgcacctggaggcatcgaccgtcttccgtcaggttggatctctggaacgatcggttcgaaccaaccagcacgaaggactctcaaagcggcgatctctcggagatacgtcggtcggttgatcgatacggaagaagatcgggtgtaggtatacaccttgtggatatgccgggtcgttagtagtgggacctcacacatcatcgccatcgccacacttgaactcgcttgaacctcgtaatctaaagaaaccccgaaagcagacaacgacaagggcgcgcctatgagtctgtggttctcttgaaagttctctctctctctctcgctcgtctaggaaggacagacatgaaggaaataaaagaaacaaaaataagagagacaagaactcacaaccacccttggtactcttgctaaaagcaggtatcgcgacatccatcgaactcatcaatttgaaaaactctggataactcaacccagtatgaaccaccacgacctccttcaacatatctggcacgttcatctgaccatctcctgcaagatgaagctcgaacggggtgacctctccgttcggattcggcttgaaggtcggttcggcctcggttacagggtgataaccccaagcgaccgggtcggccgttaattcggatacgagatcttggaagattccttcgtaatcccttcgattcggatcaaagttaccttggacgatcgccttggtcaacatcttttcagacgtcccacgggaagatgcaatcttgagaggaagcaccggaacatgaacgtcgatcgggatcaagtcgtatccgtattgatgggtgtccggagagtcagcgaatgaatcaaagtggtacatgaacactcgtttcacactgttcatcaagatttcgagccacaagacatctgagatcaacatactagagcgtgccacacacacacacacacaaagatgcaacgatcttactgttcagaaataggcatcactctgagcgcgccttccctcacccaatccgcaccgtactcaaccaaccattctacagagaacgcattgtggacgatgcataccaacgtaaatttctcgtcttcacctcgggcaagatattgttcaaatagtttttgcgaaaaatgttccatgctgagagtcatcggaaataaaaatcaaagacaagatacgcgtgtcaatctctcaattagatcaaaaaggaggggagagggaagagaacatcagcaagaaagagagcgcgtgctatgaacggggacatactcaatctcacatgttcctaagatgaccatgtctgctttctttccccgatcctccgagttagaaaacaagttgtcacgagagagatcgctgacaatctgctccgggtcatagtacttcccgctgtacaagttcagatcctggacgacatcctcaaagccccatcggaagcctttggcgtacactctaatagagtcggtgtacgaggaaatcgtatgaagaagggacatgtacacgtctgttttggtttcgatcgccatccagccagtcagttacacaagacatgttggaagaaacaggagaatatcagatatgcccgtctatcggaatagagcgagctccgaacatcctcatagacagacaaaaccggctacaacgaaccttcgtgtgcggtaaagtgactaccagctaggatccttcgtctcggggtccctgggtttatccacggatgttcatccgaataccgatagagtccagtagtgttatcgaattgaactccaacggatactgcagaatccaaacattcgaacgacgagtgtcccgagtacccaggaagtgatggtgaggatgacccgtgtgagcccgaagaagatatcgagaacaaccaatagagtatacagatggaaccaagggagaagaacgagagtctgaggagtcttgattgctgagacgttagactgatcgccgggtgaaacgggagctgcatcgttgatggtcaacaagagagaaagaacatgaaatatatcagaaccgtcgggctgttgattttcgtttgtagtcacgtcgaacacactctcatcgccaacaaccatcgactctcgtggggatacaacatactcctggcctcttctctgcttctcactagcccttcttatctcaaatacactaagtccctctctcaagaaacagaagaacgagaaagatggtcaaaggaaaacgtggggatccagatgacctcccaaagttcaagctcacttcattctgtgtccctcctcagtaggtattccgtttcacgtctaatcagtcatatcgaaatctgatcctttcgtcctcttgcatattcctcatgtagagtcaacagcaagaacatgaattcgaactaccttcgaactgaatctcagactgtctggtccagaaagtcgactgggactgaaaagagaaagcgcgatgaacaacgaacggagatcaacgaagctgtggctgaggttggtacttttcatcacagtttccctaacgttcgagcgatcctcattgagtggaacgaaacttgtccttggtcccctctctgcagacactcgccggctcaaagacgatcgtcatccatccaggctctcaaacgcttcggataggtctagcaactgattatcaaccccttcagattcccatggtcatcgctcgtcgtcggaagccgtcatctaatcctgtgcccgaagtaagctcaagctcgaccaatggaaaaggcaaagaaaagacctcagagcctaccgcggaagcgatggatgtggacccagacgagcaggacatagacgcgcaattgaaagcgcctgataccgtacgttcagtcgtcctcccacgaccatcctatcagaagcaagactgaccgtttcccggtgtaattatccagctcgagtccagaatcgccaacttacggcagacccatctcaaacgaacacacgcgctcaagcttagacctatcccgcaaggccgttcgctcgtccaaaattacaatagtgatgctttggaagaagggggtgaaaagattgaagacttcaacgacccactgcgtgtggaatggtgggatccctctacagccaaagcaaagtcgaccaaaacggtagtcggtgaagaggtgggcaggatcccaccggaatcggccgactgggtgattcgtagaccgttcaagggtagagcgttcaacctcgaggcgtatgagaaactacaggtgttgttggacgacctcgagctcttctttaatgaagttttggaaaagaagatgagaatctccaaaaaggagtatgatgttcgtttggatctccattggacgtacgtcatgtttacgctttattggctgacaagattactttccctttccttgtgtgcgcaaacacacgcacaaaagtcgtactcggtcattctagtaattccagatcatgtatccaaatcgtacatccgagaaatgagtcacctcttgctagccacgatgggtttcaagcagatgtgtgttcaacaggtacatcctcgttcttactcgagagagtgcatgcgtaatttcccctagatacatctcatggactgaaacatctttgtctatcaggaatcccttggcgctacattcggagcaggcatctcggccgcctgtgtggtcgatattggcgcgactaggacgtccattgcctgcgtggaagacggagcggttgtcaatgattcaaagtatgttgttttgtgatttgagacaagtggattttcccttctatatgtgcatacggtatttacgactgcatcttttctgtgtatgaagaatgtgtctgaactatggcggggacgatatcacccggttcttgtcgacgctgcttgtctcttcgttcttcccttatcaggagttggatctcggcaagagttatgatttcaagttgatcgaagggctgaaggaaaagatatgtactctaaatgaggtacgttagcatcgaacctctgtttgtggttcatcttgtctgagagagtagcttagactgactgtcggatgtatattccttatctttcccttcccttcaggcccaagtaggagtcaatctaaatgaatttgtgtcgaggcggcctggaaagccgacgatgaagtacaggttcaaagtgtttgacgaagtgattcttgcgccgatggtaagtcgagtgtagaaagataaaaaataaggaagccaagatatatacatatctgcagacgccaacacgttaactctgggttgtttccttcatctttctcttttcttctcctattctcaagggcctgttcgagccccgagcaatggaaagggaatcagagccgcctgttgtggaaagcgaggatcttggaggggacgaggtggatgatctctgtggggagtggacgttggaccttcctgtatgtcctgatgttatgttctctcggtcagcgaagtgtgatgatttgcttacgcgttcttcgttctatatccgaccctgccggcttgattaaatctccagacggtcgccatgatttctgctactcagcatctgcgacctcctcctcctcctatcgatattctgcccaccatactcccgacaacagctacagcggaacccagcccgatggctacgcctacgcctacgcccgcccctacaccaactcttgaaccagttgcagcggaaactttaccgcctcctgcgttgttcaccgagacgtccgtttcggagagtctcctaccggtagaagcagcagaattagcgacgacagctcttgctgttgaggtgcccccagcagccaccattgtggtcgatccacctacggagcctatcactaaagaggcaacgccggttccatcaccaccgccttttgatgttcttggagcggctgctcgaatcgctttagactttggaatcgttcattcaataggctctgcaggaggtgaagataaagttaagaagttcgcgggtaacgtgctcgttattggtggaggagccagatcggccaatcttggctggggcttagagagtcggtcagtcatgtttttcttccttctttcttctctttttctagtgttgtatgaactatactcttggaagactgggagatgggtataaaaattgatgtgctgattctctgtgcgcttccaccagactccacccgttgatcgtcagtcggttcccgagtttaactcaatcggccactcaacccgttcagatcattgctcccccccgagagattgatcctcggttcctcatttggaaggggacggcagtgtttggtagactggagagtattcaggagttctgggttggccgagcagagtgggagatgtttgggatgagagctctcagagagaaaagtctagtcatctgatttcctttctttgagtcgagggaagaacccaggtgacgaggaatgaagagtctttacttctcgctgagtttgcaacatgaccattttctccttgcctgtttgttcggtcgagaggaagcatggaaaagaaataaatgaatagaacattataaagctgccgtccgaaaaaatccaaccggttgaaaaagttgaagttgtggtataagagattacaacaaggtctatgttgacatatagaccgatggagatagacagaacagaggatggtaagatgtagacattgggaagcgaatctagaaccgaacaggaatataatacagagaaacaacaaaggaaggacatgggccagatcgatcgaaaagccgcgttgtttccttgcggtcgtctcatgcacggagcctagctcgtctggcacgattactgcttgcggagttatcgtctaaggccgcatggaagacctggatggcaatcgaaattagatgcagagtgctcagttaatgccgtgcgggatggaagaaagacgtgatggacataccatgggagagttctgaacggattgttcaagcgacgatgctgatattgatcctagcgaaggatgaccaacaggcgttcttgccgacatcacgtttgtcattggtgtcatacccgatggaccaccactcggagaatcaatctgagacatgacggcggacgggtcggatgataaagaagcgggaacattggtgggaaccggctgactggcgacaggcggttgatagtatgatggtgagaggtaatccacctgagtcggaaagtatacggaaggatgtcagtctggatgtgtgatgaagaaaaagagatgaacgagaacaagaaactctggagcttaccatgtacatttgagctatgagtcgagaaggatgcataaagggaagagggaaaggccaagattaagaatacagctcgttcgtacggatacaatcagagacacgaggagaaaggcctactggatgcgtcccattggggtcctcgtctctttctagcccaaccgagcaaagtgttccatgaagcagctccctttgagctctttgtcgtcgccggtcctcccgacccacctttgatccccatgatcgtcctcgagatctctccaaccgagacaagagagctgccctgctctttggcgagctgccgggcgatctcctcgatccgtctggacggtggtttaagagcgataggtattaggccgggaggcggaagagtaggacctggtgccggaggtttagtaaagatgatgggatgccggatgtggagcgacgaaggatggttccgagtcggaggcatcggagaatatatatcacggcactggcgagatttgtcagtttagttcttgttagtgtaaacctggttagcggaagaagattccaagtggtaacatgataagagaaaaggcaagagtaacaccggatagatgagtatccacggaatgtttcagattcagaatcactgcagttagcttttaaacactcttaagacggacacggatagagacaagaaacggatggtggaagaaggaaagaaggaatgaaaggaaacttgccgatgcttctcgggtttatatacgctgctctgaagaacgaacgaacgtgaaagtgaacgggtgggttcgtttagccgagcgggcgagaaggtaaagggttgcacagcctcgtcacacgcgtggtaaagacacgtgattgtggctaacttttcatcgctcacacccatctgctctaccatctgcctgtctcactcactcggtcgtacgcacatacatccatacacattcacataaccacaagcacacactctctcgtcgcaatgcaggcttcggaacccccacctcccaagtcgagcataaagaaatcccagaaggttcaatcggaaccgtcctcgagctcatcgtaccaacagcagcaacagcaacaggtcaaactcaagatcgtcatccgaaggctaccggcaaacctaccagaagagcttttttggcaatcagtcaagccttgggtgaatgagcagacggtatcatggaagttctaccggaaagggaagctcgctaaatcgtcagtcactctttcgtccgtctcgccagtgctttctgtcaaactcacctcggtttgtctcgcatgggtcgaccgggaaatcgtgtgaatagggtcaacaaggaaaccgtccattcccgcgcttacgtgctcttcaagtcgacaccttccttggtcacctttcatagggagtacgatggccacctttttagagacaagcaaggtaggatcgcctttcttctcactttccatttatcatgacagtatgttcacgcctggaccaatcggcaggaaacgaatcgaacgcggtggtcgagtatgcggtctatcaaaaggttcctactgatagaaagaagggtgaccggaaacaaggctcgattgatataggtaagcttaaaagctgcgatgttactacgggcaacaaaattctgatccttctgccgatggtatctttgtgtgcttcaccaaccgcatcgggctatctatttcctatagacccagactacttgtcgtttttagagtctctcaaggcgccagcaaagactgtggtcgacggagaaatgacatctcaggcagttgctaccgccgctgctgccactctgtcctctggcgctggtaagcctagttcaaacgtttatctctctgtcacctcaacctgtaaagtgagggctaacactgcatatatccaactgtttctcttcttccgttctacctctcttcacccctgttttctgttcatacacgttatcttttcacaatcactctagccaagccaaagctcacgcctttattggaacatctcaaggctcgaaaggaaggcaaatcccacaagcatggctctcccgctctttccgggatgtccactccccgaggggcaaaagctatattagccccaccaccgaacggccagtcgtctggcaagtccaagaaaggtgacaagaaagacaaagggaaaggaaagtcctcggctggtgcggataagaaggataaggccaccggatccgaaggagcaggaggggccactgatgccaacgggtcatccaccaagcgatcaaagaaacaaccaaagcagcatgcacaatcttccggatcatcagctccaggttcaaggcttcaacctcccgaaccggccgctcttcaggctatggcagctgcctcgttggctgctcgtcaacagcagcagcagcaagggaggtcaggagaaggagga

SEQ ID NO: 1949 - DNA, 18411 bp, Xanthophyllomyces dendrorhous
ggaaatagatcaggcgcacaatcacctgctgttggggaagcaaacgggactgggcctcctccgggggcttcgagatcaaagaggcgagagaaacgaggggacggaggaaagaaggaggcaaaggaaggaggtggtggtggtggaacagaaaactcatcgggtcctcctgtccaattcaaaatccttaagagagaagctacagccgagccatctccatcgtcagcatcaataccgtcgtcgagtactccatccgatccttttcatggacgacaaccaggcgcgtcgagctcacgtgcattgaacccgaatcttcaggttttcgaacctcagcagtcgcagccgccgccggtatcaactacagagcgagtgcgcgggccgagatcaggtcggggcggtctaggaggaggaggtggtggccagcagcagcagcagtctggcggcggtggaggcggtggtggacgtggcggacgcggtggtgggggcggaagaggagctaaaggagggagaggaagaggacaaggacctccgccgtgagaaactagaaactatgctctctttcttgtctacttttctttctttgtgccggacaaatagctaccagacttgtatccgtcggattatccagacttatctgtacatgcgaggcaggtgccatccctggcatcgaaatccatggtaactcatactcgtcatcatcatcttttcctgtagtctagctttgagactcggtctagatccaggtctgaaccccagttctacaactatccaatgcatcgccactcccatagtgccaccgacgactgcgaaagagatggatggattgaatgaccacggtcttggcgacggctgcacagccgccttacgtaatctataactcaacgcattaaccctaacatagcccaaacgcgtgcatccttacgttccaggaacggacgatcattaacttcctccaaacaccaccaggagtcttgctctcttctaaacacaccatcgtcgctggacaacgaacacaaccgacaaagaaaacaccgataggcaagtcagatgacgctctctagaccaccagtctatgtcgtcctcgccttggtgttcaccatcaatctcgtccttctcgccaactcgtaccgacatactgctcccgatggactactcgtccgtagatcgtcgatccctcggtcagttctttatgagccgccgtcgtcatggttgaccaagaatacgacggtcgaaacatcagcgtttcctttccctggcccaccacaagatccgagttggccagcttggacggtcctgcccgttctgttatcctacaccggcttgctactcgcgctcttggggatgattgctggagaatggctcgtaccaaacctcgcgacgttggccgacgcgctcggattatcagacaacacggctggagtgacactattggctcttgggaatggtagtccagacgtcctggtgagatatttcctccggattcttcctgtttcttctttgtatggagaagaggttctgagaatcttctttcggaagcgggagggggctgatagcaaattgtcatcattttctttcccttcgttttcaaaccaatctagtcgacttacagcgcgttcaccaacgactccggtagtcttgccatcggcgaactcctaggcgcagccaccttcatcatcaccgtcgtcgtcggtttgatggctttcgtccagcctttcaaagttcatcaaggtccattcctccgagacgttggcttcgccattgctgccatcagtttgcttcttgtcgtcatgaaagatgaggtgctgacactttgggaggctggtggtctggttgggctgtatgtgtcttatgtggtctgggttgtaggcggaagttggatcatgaggctcagaggcaaaggggagatcaggctcgaagaggatgaagaacaagaagcggaggatgatctcttggacagggacgaggaagagagtaagtctttggtcattttgtatctctctctgcgtatgattctacaggttgaatcgcgaagtggctgtatacgtccgttctgttcatgtattcacctctcatcctcgttctctcggatcaaggtctggcagggtataggtttccaggtggatctcactcgaacgttaggtctagatcgaattcggccgtttcgacaacaccctctctcctaatcgatccgtctgcgccaaactcccgaaagtcttccgttgatgtctcccaattcctccatccgtccgccgctctttcggtccattcaccttcaagacatcccactctccgactagaaaccgacaatctttccgtagattctcgatcaagcgaacctcgccactctccctcgggtcgtcgactgtcttactctcgaccttcacacctccgctcaagctctgccgcttctgtcgcgacgtttgacgtcagacggaccaagctttccctcctcggagctgtcgagtttagagatgtcgtgaattctttgaagaaccaagcgagtctagaggacatccagattgaaggtgcaaaacatttgtcacctagcatcttcaccgccggacattatcatccccacattatccatccgccaccgggctctcgaagggtttcaaccaattcccatcatcactaccaacaccatcgacagcatcactcggccgacatgacatcgccaagtgcttcccagaaatcatcgtatttctctcctcaaagacagactatccaccgagaacgggccggatcatcaccccgaagaccgagtgcatccctacctaggtggatgttcgggaacacagcagatgactcagcccaacagacaccatctgttctatctactccatctttcgcaagcgagtctggagtcgaagaggtaaatccgtgggaaacagaagggaacacacctagaagcgaggtggtcagtagtttgagtagtgatcgaacgatccgaccggggaacctgcccggttcaacacgagagttcaagactcttcgaccaccttctttggcgatgtctgatcgaccgagtcctcttcaaaacccatcacacctttctcaaagtatacacacacttgaaccccctgcaccctctccctcttctccgcttccgccaccatctattacccttcaagagtctccttcgataacacccatctcgcttctccgcccgactcaccaaaagatcaagcgtcggaaaatgatacacatagcaaagatgacgtatcatgttctgtttccatccctccagtcgttcaaactcaaatcggtcctcggcaaggtgctctccgtacttgccgtaccagcgatcttggcgttgacgttgacattaccggtcgtagacaaccttggtagaggagcgacttgttgttccgtgtcggatgatgaagaagagaaagaagacgaacaggaggagccggttgctggtggactgacggagggagggatgttgattagagtacaagaagctgagagtttagaaagtgagactggagatggttataccttgagctcgaggagaccaagttggacaccaagtcggagtcgaagtcgaagtccaagtccagtctcgagtcccaatgcgttggcagcagaggtcatgcactccaagcttttgagtctaggtgaaggaatcagaccgccaccctcgtcgtttggtcactcacataacccttcggagaacggcactccttccgatccttccgatccttctcaatcacatcagcacaaccatcgccatctccaacacacaacacatccaatagatagagaggtggagcatggcaatcagcaaggagagggtaatgcggagaatgaggaacatgagagcgaaccagacaggttgtcgcgaatcgaaagagagatgaggtgcgaggaggaagatgggatgaatgcgttggcattcaacaaatggttaaccatcacgcagtgcactttaggaccgactttctgtgggggagttctcttctacgacccggatgataccggttttgccgtataccccttcatcggtttcgtcatctttggtgtgatcctctctggattcactctcgtcttcgccaaagacggaaaacaacccttctggaggattggacgatgcctccttgggttctcgatagcgatgatctggatcatggcccttgcagatgaagttgtcaccgtcctcaccacgatgggccggatcttagggttctcagatgctatcattggtctcactgttttcgccattgggaattcttcagccgacctagtagccaacttgagtatagccaccttttcacccgtcatggctttctccgcgtgcttcggcggaccaatgcttaatattctcctaggtgtcggtttctcgggagcattcgtcattgtttcaaccggaaagtcatacccggtcaacatccatccatcgttggtcacaggtgtcatcagtctcttactggttctcatcatcactttcatcgtcgttcctttgaacggttattatatcaccaaacgatggggagcgttcctcatcgcgttctatgtcctttccatgacggtgaatgttgtggcagaagtcttgtggacagccgaatgaacgaatcgatggactgcaacagaccctttcttttcctctcacctcctttcgggatttctttacttttatatccatacatccacgaaccccttgacttctctgcttcttctcattgtacacacgcccttctttgcaactgtttcttgtcttcaattcgaacatgtatttctatacgctcaattggattttgtttttaaatattatccctttctttttctttctttaatatcttctcactcttggcgcatgatctagtttcttgtatgcagcttcctacacatcatgatctgccataactcgatttgtcatatagttaacttgatgaaaaaaaaaaccgatcaaatacgttgtgtaaggaacaagaaacgatatgtatgaacaaactcagggaaaggtgaagggacatatgacaatgatgaaacatgatcagaaccaaggttagagattgatgcgttgacatgctcggctgcaaagaattctcctcttgggttactgaatggaaccgaggcataagcggaataaataaagtgaatcagggttcaagaggttgacctaattcgattgggtgattggctgaggttgagccatccttcccctcgatctcctcgccgatggagttttctttaattggattttgacctgcctcgagacgtctattctttggctcaaccaacttgtctgacgttatctttgaccgatccaataatcctcgtttttcttcctcccttatcgccatctctaaatcggtatcattcccagatgcaggaacgtcgagcccctgatcgatcaacctatttctaaccgtttccagattctcattgcccaccaatcgaacagtgctcggactcttcactcctagatccttgagttttgcttcggcagaagatatttcagccgaaccagcctgggctgcttcgttttgttcacccgctttcatccagaacttcatcactgatgtggcagccccgctttgtcgaccgactctatcaaccgatttagcggtctccgctgcgtgcgtctcgtccgaccaaccgaccacggatgataacggtggtgtctctccatggaggttctttgtgagccaaccttgttgagaagcgagctttctttcggaggtctttatcgcttggaacgaagcaagctccttggaatatttcttgtcccaagcgtgtcgggaggaaagccatttctgtataggacctgcaccgtggacgatacctactttgttgagatcgaggccttggaaagtctcggactgggacacaggctccatcggccggatcacaccatgaaccgtcactctttctcggatcatcgaattgacaaactcgggctctgtcaacattgttaaaaggtcaatgactcttaattagaatctttctgtgaaggaaaaagaagaaaatagagacgaagaaacatagcgagcgtagagacacaccggtaccagtgacgctgatgtactttcccacatgcttcgatctccgatcgcctccagacccatcactcatctcgcattctgagctgtcagcttcactctctagatcatcagtgtggtcggtctcatttgccaatcgatgagcgctctccgtgatcgggattgctgtcgtctgaccatctttgtgaaaaactgatgtgctatggacaatggcttccggagggaaggacaaggaggaatgggtagacgttcgatcgaactcgtgatcatttccgggcttgtgactgtgttcgtgatgtcgatggtggtgatgggagtgccgattctcgttgtatcgagcagcggtgatagcccagatattgaagctaaataaaccagatcaacaggttagttactgttcttcataattcagcgcaccggtatgaaccgaggaaattatggcttacttggcagcagcgcgatacatccacttcgcgggctattctcagcggaaagagaggaaggattgctagaatcagcgttaaacgtatttactttcatttctgtctgcttgaacaagcgtacctttgtgaacgacagagtgggagtcacatgagcacaaccatcttgagttggttttccagtctacgtcagtcggagatttttatgggaacgtgaatgcaagaggttacttaccgtacatctgaagatgaactttcgtgggagggtattttccaattaagtctttctgaccagggtacttctttagaacactcgagctcgctattcagacaccacaccgagggtcttagcaagagaagtacagaaaccgtattgcggaatgaaagaagaagacagaaaggagagagacgaacgaggatacgcctcagggtccgctgctttatgagccaggaaaaccatttcatcccgaagcagctccccagatccccccatctaagagcagtgaatgggcgagtaagagccgatttattcagttcgcaagctttagattgttcaaaatatctacataaatttgaaatcaaggaacaataggacgaacaatcatcaacggacaaagtcctcctaagcttccctggttgataggcgagaccaaagggtgctgtagtagccttatggttgttgagtttccaaagaaaataaaataaaagtaaggacaacattggtcagttcgtgaaccaagttgttgaaatctcaattgcatcagaggcgagaagaaagtatgactgataagataactaacttgttagaagcatacatctgcacctgatcgtccagcaccttgacatgtttctctcctgtgcgaggattttccacgtcaaattcaattgaatctcctttaatgggaggccaagctaagcttggcttgtaatgaaatccttccgagggaatctgcgcaattagagcgacttgtgtcagcctcatttaacagaatatcgaaatggagaacgaagtgcacaagagagagcgcacataatctctagagtcatcacccatgatactcttgaaactatgggttaagtcaacccaaggcgagatcaagcaggcacctgcaggtagcgggactttgccgcccgaatctcgaataacacacagcaaggcgaggataagaccagctccggcggaatcacctgaaatgacactacagtagaacgagatcaccgtaaacaaagattattagccaacaatagaatctgtatatggttgagaacctagaccagaaagctgtggacttacatatccgaagcagcgatgggagcttgggaggattcagctggcgggtctattagataaagataactagctagggcatcatggagtccacaaggctatcaaacaaaatgtattaaattcacaaaggtccgagttgacaggcggcaaagtgatctgagaagatgacgcgatccttacaaatgggtattgcggcgacagtctataagaaggcgcgaaagctctaccaccaagttttcgggcgtgtcgctggatctgatacctatgtgtgtctagggaggagaagaagtatgctccgccttatctcggatacaaccaacggtgtcaggcgggtgggccagaagataaggagaaacaaagatagggccatcgactaaccgtggatatagagaatcacccggtcttgttgcgatttatctaacgggccttcactctgacccataactttttgaacctttccaactgttctattcaggtagtccttcttcatctcgatccactctccctccaatgatttccctctgatttgccaccatttctcgcctccgatctctttaagaccagattctccgtacacttgtttgaaatgggattggagaatctcagtagagtgatcgatgcttgattgaggtacaattgcaggagatagatgaatccagtcttgtagagaggagtcatagggttagttcgcataagcggagccgaagaagagatgtagagaaatgcagaacataggcaatcgagatcgagagaggaaaatcggactaactgggattcgggacgtgcatagcggtgaaggactggaaacccacaggttaagcatcgacaactgtgacttaacgtacacatacaaagaatcggttcttacctggagttcttcaacagagtaactcttcgctgtcttaaggaatgctttcacaatctgaaggccctcgtcgtaagcgagttcgtgttcgggagcttctgattcgagcgtccgactgtcgccctcgcctccatcgcccggctgtccatctgatccaactcgtctaggctttccgtctggattggccgaggcctcaagattctctcccgattgactatcggcaccctttctgggccttctgcgtttcttcgtacctgaagctctaaggacgtgtttgaagaacgtagagattacgaccggggtcgctgttgagcgggagagaaacaacgaggaaagaaacaagctgagacccatgctggtgtctttgagacctatcataataacctaaagccactacttactatgagcagcaataacgggaacacccaaagtcatgttgatggatgatggtagtgaggatgaaggaatgaatgaacggcagataagaatacaaggacaaccagagaacgattgcacgtgaccgagtgacgtcatgattagataagatcgacttgactgatcgcctgttgacgtactcatcctttttcttctttcttcgtcttttccttttcttttctatatctttcctacatcttttgattgagaacactgaaaggtatgccgtacatgtaagtaagctgttagattatgtgtgaaagggttgtatagctgacaagtccatcggttgaatacttcaagcctatccttgaattgtggatcgtcctcggtcaaatccaaattattttctatcccagcagactcatctccaccatctgcctcagaacacgatctcctctctacgctgaagcttatagctacagcagatgctggtaacatcggcgctaaagggaaagacgtcgagatcgagctcagctgggtggacaagaaggatgcaggacaaactgtaaagaagaaacaagacgaggtcgagtgtgcgctgttctcgcttctggcacagtcttacaccgcatcgagcctcgtcgcatctctgatcctgagtttattctctctatatagacaccgatatcatacccatcatcctcgaccttctcaccaaagagaacaaggataatggtccgtcactcgacaagaaggagctgagatacgtaacccatcgaatgtaagtacattctccgtgctaccaatcaattccctacttactatattcgacttgatattaaactaatttgattcaacttatcatcagtgttcatggatctacgcacacctcacctatcacagttaccaagaagcaccaagaaggtttgaaagagatggagaagctttccgagtttgcaccactacacaatcataatgccgtgcttgctattcaggctacgatagatgccctacccgagtcgacctctatcctcttattcgacacactgttccatcagactcttggtcccgagatctatacatatgctgtgccagatatcggtcacaagactccagtaccgctgagaaagtacggatttcatgggctgtcgtacgcttcggtgctgaggtctatcgccaaccacttgaaacaagatcaatcagatgtaaatgctgtagtttgtcatctaggatcaggaggatctgtgagtaactatcattttcatgctagattccaacgtgttctgatgagttttctacccacattcaggtttgcatgattcaagatggccagtcaaaggatacatccatggggttgactcctttagaaggattggtgggtggaacccgatcgggaagcatcgatcctactcttatctttcaccatactccggattgtgcagagaatgcattggacaaatctgacggtagatttatcagtaaggccgaaatggttcttaacaagtatgtattcagccatgatctttctatagttgcggaagatgagagtgaaattgaataggtttcttcttgtttcgatccctccgcagacaatcaggtctgactgctcttgccggtacttctgatttcgggacgatcactactcgaatgacgaatccttcatcatgctctcaggaagaacatgaggcctccacattggcgtacaaagtctatctagatcgcttgcttcacttcctctcattttacctgttcaagctcaaagcgcactctcatcaatcaggtggatctgagcccatcattgttttctcaggcggtatcggagagaaaggcgcagcgttgagggcggatgtaatgagatcgctgggctggatgggtgtacattacggagacgaggaattggggagaaataaattgaacaaaggagaaggcgtgaaggagattacgaccaacaaagccaaaggacccagagtgttcgcggttgagacagatgaggaagtccaatgtgctcttatggcggtgagtgtcaaccgcttgtctatgtgttctctctgttttcatgtcgttctgatcaccatcctggctacttgccgtgctctctcgttttgttctcctgatatacagagaaaggagctgggagtttaggtcggtttgtctgacggtcacttgtccgctcaccaacctataactcacaagccttgccaagatctatcaatattttctcctactctatttcttttatagacatgcgtcctgctttgccgcctctttgccttgttatattcggcactatcttgaagcatcccctcaccctccatgtagccattctactctttctttcctagttcctaggacatccctatatgaatatggctgccagtgtataatctatacatgatcactatgcaatataaattgaacgtgaatggaatgctaatgtcaaaacggttagtcaccacaccgatcgagtcagcctggtttttcttccagaccgactttgattatttcaaccgacggcgacggagacaacgacgacgattatttcctaaccatctcatagatctcaccccaagacatcgccatggtctactctgtgagtctttgcttgtcctatgtctttctagcgctttctaatatgagtagagagctgatcttctcgctcgctctcgagctctgtaccctccctccttccgaatcttgacctcaaaaagttaaccccaaaaccttcgctagaggaagtctcgacccttctctcagatccatccaaaggaaactgtgtacctatctttatcacgctcccggccgatcttctcacacctgttatcgcttatttgaagattagcgatggaggcaagaacagcttcttgtttgagagtatcaatggaggagagaatatctcgaggtattcgtttattggagccggttcgttccctttattttctctttctctcctttcttctttggtatttccaaaaaacaaaaaaaacaaaaaaaacagaggaagtggtggatccgacagaactatagatgaagaaaaagaattagaagcttaatcaggaaggtggagggattggagcgttgtagtacattgaccagaccgactacggaactgactcttaatccttcacttctgatccttctgttcactgtgcgtcgtcacgattgggaacacgaatcttagatccgttcaaggtgatccgaagtggagccgagtacgacatcaagggagaccctctgattgaacttgagagagctctatcctcttacaagtacattagcatccccgagattcctacattcaccggtatgtgttcttttgtcctgctcctactgattcagggacgttatctaacaatgattgaaaacttgttactattgattctcttctgattcttcaaaaacaggaggagccattggaatggtcacttacgattgcattcatcactttgaacccaaaacggctcgaccacttaaatccccgttcgatattcccgaatcaatcttcatgttccacgatacgctcatcatctttgaccatctgtttcagaacatcaagttggtctcccatgtgtatattcctccatcagccgagtcctctacttcgactgtgacctccccagagatctcggcggcctatgctgaggctgtctctaagctcgaagcactccgcgccaagacgatcacggagcatatcccgcttcctgtccaaccaccgatcattcccaaccagacgggcacttccaacgttggcaaagctggttacgaagcattcgtgacaaagctcaaggagcacatcgtcaaaggagatatcattcaggctgttccatcccaacgaatcagtcgaccaacctcgttacatcctttcaacgcatataggcagctgcgaggtttgaacccgagtccgtatatgttctatatcgacttcggagacctccagttggtcggcgccagtccggagacgctttgcaaggttgaaaagaggaaagtgtacaaccatgcaatcgcgggtacagttaagcgagggaagacgcccgaaggttcgtcgtaacttcttctgattgtcacatagcaatttgaaatctatcagcttatcattgtattcatcttttggaaaacaaaacgaatcagaggatgctgctcttggagaggaactcttggcatccaccaaggatcaggctgaacacatcatgcttgtcgaccttgctcgaaacgacgtcaatagggtctgcaagcctgagaccgtcaaggtggatgatctgatgcgactcgagaagtttagtcacgtcattcacatcaccagtcagatcagtggaacccttagagaggacaagactcggttggtttcgtttcctcttgctccaatgcacattaaatacaatcgtagctgatagatacctcctcatcatccggtccgttacaatcaatttcttctcaaggttcgacgcgttccgatcaatcttcccagctggaaccgtttccggcgctcccaagatcaaggcgatcgagcttgttggcggtcttgaaggcgaacgaagaggagtgtacgccggagctgttggacggtttgactttgataaagatcgactggacacgtgtattgctatcaggacgatgacattcaaggatggggtcgcttaccttcaagctggtacagtttcctttcccttctctctgttatcgcgtttatcaagctaatccgggtaatatttattcatgggattgactgctggttaggtggaggaattgtccatgatagcgtggagaacgatgagtatatcgaaacgatcaacaagctcggagcgaacatgaactgcatcgaccttgccgaaggttcgtccaatctttctcttcctttcttatcgtataaatgtgggatatgtgtgctcactttctgatcatattcatctctgtactcaatcatgttgattcttccttccaatcagcttactacacatctcttgaataaaagaaaccctcgtcatcaaaatatagaagacagcggatgtggaagaatcttgttcttgcaaggaaaaacgttatatttaatggactctccagtctgagactataccttcaacccttgctcttctgtgctcttcctctcttgctgttttcgtccagatacttgtcaacgatacactgaaagaagaccaatgtataagatatctgcaaaaggacaagtgtctcgaaccgatcgcttcaaaggctaagattccaaaagaaggtagcgccattttcttcttttttcgtttttatcttatatacatacatatgctcaagtgactatcgctgaagatgaatcaggacagttgagaagaaggaacagaaagattaggattgaaacaggcgtatggttttaaaaagacgccaatgagggttcaagggtgtatagatcaaggagtaggagtgggagggaagtgcttgaacgaccagcgttcggaccgagcttttttattggaaataatctggtttcttgagactaatacacccaaaatcaaaagaacgagatgtcgttgccaaattgatatcaatgggaggagcattgatcaaagaggaagagagaaagacgactgactgcacgcctcgttcggctagacttgcgctcaggtcatccattgtgagaacagtacgattcttgtcctattatcgagaacaaaggccgacgccggaaagtaggatcacccagtcagaaaaaaatgagcttctatgggtacctctgaccttgattcggtgtatattcattgatttcgaagacctaaagatgaaaagccgacaaactttttgttgttgggcagctccggccggtcgacctcggccacctggttgagcgtttgtccgaatccgagcatagtgatacgcatccgtcgagatatccgagaggagcttttgcgtagtcagggagaacagtcgggtgctgatttcgattaaggaagaatatacaaaaggaggacccaagaaatgagaagatcttgaggacaaaagatatacagacggtaatcaatcaaggcatagaagaagagctgcacgaacaggcgaggatcggcggattcgaatccagctttctgaagaaagtactgagtgatctcctctggtatctgtcgatttttcccaaagtttccagagtccaacgatgaagacaaagagaaggagaggaaaaacacacggttagcacaacatgccgacgcacacagctcatcaaaaagaatgtatagtaagtatgaggttgaggacagaccaaaggctcataatcatccaacatcgtcataaactctgtcaatgtcctgtcttttcttgcgagctcttcttctctccttgacggaccgggttgaaggtttggcgtttcagctgtagacatcgtcttttgagcttggcctagagcggatgtcgaggtcgacgacgcgcccgccacttgggttgagttcagagcagaaggagtgattgtctttggagaatttgtggaggcagatgactgtggcaggatctcttgcttcagagaagaaggacctgccgtattcgaaggagcagctgattgaggttgcatcactgggtggtgtcgtttggatgggttggaaatgaataatggtcgagagaaggaaaggaaggtgaggaaattcgtaggaaggacaattacgttttcaattccttctcttaccgatcatcgagtcatcaatcattcctcgaacgacaacgacaacgacgataagcgagcgtagacaagggcaaccaagaaccaaatacccgtaaaagagatgagcacaccaacaaaaaaagcgatcgtcgtaggagcaggtcctgtcggatgcctcagcgcactctctctcgctaacaagggatggaacgtaatcatttgggaaggacggcctggtgagcacacaagtgaatgtacccgacatgtagtagttaatatcggctgaacatcctcccttttctcatcgtcctattcttcactgatgcactcataactcagatcctaagtccccagaagcagagaaagaaacgattcgctcggtcaacctcgcgatctccgctcgagggatatccgctcttcatgcaatcgagccagaaatctgtaaggtcccacggtcactgatgtcgttcgatctacctatcgtcgtctaatactcatcaggctgagcaactctatcaatattcctctatcacagccgatgagttactttccttggctttgcctatgaagggtcgaatgatctgggactttgagaacaagtcggtcgatcttctttcttcttccttctagggtcttcctctgcttctttgaatgtcatcggttggagccgtctcactgatgttctctctgtctattttattttttaaatgcatctttctcttacagacaggaatctcagctatacgaccctcatcatggatctgcgatcaactcgatctctcgacagattatctcccagacgctcctcgacaaagttagtgcccacccttcgatcaccgttgtcttcaaccgaaagatcgccaaaatcgactgggctcgacgacgactcttccaagagggtgagcgcggtgcctgggtggaggacggaggtgaagaaggttgggatctgttggttggagcggacggaaattggagtaaagtccgaagtgaaatcatgagggttcaaccgtaagtgatctgttcctctctgaattgtaggtggatggctaacggctgtctcttcccttggctgttggctcacctgcggacactcacttgacagatcgtcttattctcaacaccaaattcaacacatatggatcgaactgagacttccgcctggaccgccaaacaatgcgaccggggaggattcaacattctcgatcagtcccgaacatttacatatctggccacgacatgaattcatgttgatcgctctgcctaacaaagacaaatcattcaccatgacgctatacgcgcctatccaatcgatcgtcccacttaacagtcgagctaaagcccgagcgttcttccggaaacatttcgggacacgaacgcttgagaacccggttgatatcctatcgatgatgggtgaagatcaggtattggacgatttcgagaacgctagaagaggtggcctgaccactatcagagttgatccggttggctatcaggatgggtcggccgttttagttggtgatgccggtcattcgatgggtttgtcttgtccttttccatttctccttcttcagtagcctcttctttcacatgttagaaggcgcttgcttacctcacccacattctttctttcgttcgttcgttctttcttatttccctcttcaagtcccattctatggtcaagggctaaacgcaggactcgaggacatcagagttctcgatctcgtcttccaatcccacgggatcaccggtcaagcaggaaccgaggctgacgtcaagcagtgtctgaaggaatactcggttggtcggaaagctgatctggacgcgattctggaacttgcgatgaacaactagtctgtcctttgtctattggcttttgtgtgtatgtgtacgtttcgaagcacagagatcgctgaagctcttcgctttctcacctgtagcgaggaaatgcgttcccacgtgttgacgcctttacaccatatccgtcggaagttggactacgtcctgacgaccctcttccccagcccgccgccgactgctgcttccctatcggcactcagtcgttcctctggcgagccattccctacgcgaacagtcaacagatggacaacgttgtactctatggtgaccttcagaccggacgtcccttatgctgaagctcttcggagggagatgttccagagaaaggttctgggtcgatggatcaaggctgtcgtcgtcggaaccggtgccggtgtcttttgggcggtctgggccgggttgaatttggggaaaaagttgaagttgagaggtcatagaggtcgatttgtttgaggaggcgtgctgtctgtcttcaaattctacttctgtctttttcagcagagtgtgtatacatgtatatgatcgatggtgcgtatatggtcgtgagtgtatatatgtataacaagaaagatagagaaaggggagcagaaaagcgacgaaggaggaagaaaatggttgtaaagaacttcaaccaacaagtagacgagacagatggccagatcggaacgactaagaagacaagacgcagaccaatctcaaagagagatgagcgccatatgcgaaagataggagagagtaatataaaaaccagggaaagagagtctgaggctgaagtaatcgatactaaagcgtagcgcgacgacaagagatggaaaacaaaggagaagagaaaaaaaaggacagaagcagaatgaaatataggcggacgaactgatcgtctgggaaagtgataggctttaggagaggaggaggaagaaaacaaggattctattgttcgatacagtgaggatttggat

SEQ ID NO: 1950 - DNA, 5248 bp, Xanthophyllomyces dendrorhous
  misc_feature (2621)..(2630): n is a, c, g, or t
gatcagacaagagaaaaagaaaaacagagatatgcatggaaagaggaaggcggagagataaaactacaacaaagatgtggccgagagatgagatcaagatagaaaagagaggaaggtagatgtacacagttagagaagaaaagatagcgagacaatttcggtattataaaatggtctagtagaattaaagaagagcgaagagagaggaaaaggggagagaagagcaaaccagtgtacgcctctgcgaaaaaaccgcgaagagttgtctgataggaagctgagtgcttcctatacttcatagatgccgacgtccctgaaagcggcacttctggcggtactccctctccgtggactgacaaccatttgttcgattgagctgctctcagcgatgctggaggtgctgcccattctgaatcttggatccctgttacgtcttgcgactgcagtgtttgctgcgtaggtaccaccaggaattttttcgagcatctgcatggtgtgcgcccagagttgctcggcataatcacctgtaggtgcgttcgggctcagcttgggggagagtgcgtcatctgatgggtgctctagttcggacggatactctgcatcggactctggttcggatgaaaagtaatattctgtgacatcattcatcagctcgtccgggctgcagtcatccattgcatggtcgtccggaacgtatggtccggcagaagaaaacgaagatgaagtggaagcgaccgagtgtcttttggaccgagtgtaggcaccaggagtccggtcatcttggttccaggctggtgcgaacgggtcaaacggggagaacagggtggtctcggccgaaggggtgagggtaggagtcaagccgggggtgctagtctgagagattccacgagagacgtttggtcggagcatgcccgagtctcctgtatcggaaccggaggtaaataacacggtcatgccctcatggttggccattggggtgttgatgtcgggagcggcagcggtagagggatgagatagagaggaggaaaagaattggagatcgaggttgacgcctgggtagctggacgtcgtcgactgggcgaacgagatgcttggcggatgtcgtcgaagtggcgaactctctgagagttgaacggaggatgaccgatgggagagaaagccaaggtggtggtaaccggatggactcgccgaggttgctgtgaacggagagacggttgaggtgtctactgagggtcccggcgtggacgagaaccttggacggatgggtgagaaacgactgtggtgtggatgtggcattcttcagattgtattttgaggtgtaagtgagtgagcggataggaaacgatgggtggagaaaggagctgttctgattgatgtaagagagagattgggcgacacggcgacgatctcggtatctgtaagagggtttgggaggaaggagagaaagaataaatatcccggtactgataggactcagccgatatgaaaaacggttactaaccttgttctgctcaaggtccgggggctgattcgatgtagagccgggtggatgaatcgaggatggagaagcacactgaagacacgagcgcctgagctcggacttggctgtatacgcgaagaagacgacgcaggcgtgccagggttgacggccgagagaatgcgaccagcagagaagagttgaagaagagacagttttaaccagatgccaaccaggaacgacaacacgcccagggcctttttcttgtgtgtgggagagagtgtgcgtgccggagaagcgagcacgagtgatcagaaaggataacgacaaaagagaaagcggtgagaaggaagaggaagagaggaaagggcgacggaaataagaaagagggaaaaggaaggagaacgaaaggaagagaagagatgaggaaagaaacagcaagaaacgaaaagaacgagggatagaagaagagaaagaagagaaggagaaggggaaataaaggaaacagagagaaaaaaaccccgaaagacatatgcgtatgccaccaggcagaaagagagagagtacagagagaaaaacggatgacgacgtcgttacgtaaggcgctcgagagagtggccctcctgtcaagagcagatgggttgctgtgcgggctgatccgaagatcgacgccacaatggaggatttatgtagagtaaacaagaagagccatcaaataacctttcttttcgtacttttttcagtctcaatgaaacggatgatccgtcggtgtggctgaattggtgctctttagtacattcgtctattgattcatctatcgctcgtggtgtagatcgcgctcgcagcacactcggtatctgtgtgtgattggattggggtgttctcacgtgacacgtgttggtagataacacgcatacgtattcatctactgatctatctatcgcctatggttacctcgctgtgtttctgttcctgttcctgttcctgtcacatatctatgtggtacccataagtttcatccataatttcatctatcgcatattacctaatcaacattcccgcgtgcacagctcgtctcccgcgctcgttattgcccaaacgagactttcccttttcaaacgcacacacacacacacacacacannnnnnnnnncgcacacacacacatccctctgctcaacgtgtagtgactattcccaactactcgtctgcatacatctccacccacgcctacacaatgatagagataatcctggcgacactgatcatgtgtctatcattctccatgatcggattgattgtcgtggtaagtcggccggcgtcgatctctcggccatctccatacgagtatagtttcctgaccgccttctcgttctccttctatcccaccctcagcccattgacggatcgattgtggttagtcgaaagtcatcctatcatttgatcacaattctttaagcactagtctctcattagataacctcggcgtttctttctgtatttctcagagacttcgtgcgaactatgctcctaggcaagctacccttctccgtcatctctcgtctttctttcttccaggctgatcttgatcgcgcttccgttgaactacatatctctatccacactcagaggactcgccttgtccgagatagaaactgaggcaggggatcccagagtaggtccggccgtcagaaaagtttggggcatgatctctagagtcagacgccttgagggttggaaaggtctttacaaaggtgggacccgtctttctttcccatcgtctgacgtgcttctccaatcggtctgctgatctgttcgtcgtattcggcggtcttgcacttcttccgcaaattctccctcgtcctctttgctccttcaaggcttcctgccgttcatattcaactcagtcctaatctctgtcttctcggtcgcgtttgtcgagggatcgagcacggtctctccaaaggggacatatcaagtccctgaggccggaggtgtcaagtgagaatttattcattctttttcgacccgtttcttccatgtactaatctgcttgcttgattgcaaaaacaacattcacatagaatgactttgtttggaatcgcgctcactctggtcggaatcccaatgacggtgcttattaatcggtgtgtctccttctttcttccgcctctgcctctcacctggctagctgaaatttctgacacgtgttgtgaattctgtctagatcgattgtcacacctcatctacttccttggtctcccaaaaaggctgcaaagatcattctgactccttacgagcgatccaaaccttggatcatctttctcactcctgggtaggattctctatattctttccctcccccctttcttgtctgatactgacgcgctcaagagcttctgccttttcatagccttctggcggccaccgctatccatgtgctctacatagtcgtggtttctaaaaccgttcgatccttcgttgtcccggaactcgcgaacggaatcttcaagaacccttcctcttctagagatggtccgttcgctaccatcagaaccggcagactctttgttttcttgattttccaggctctgtctgtcctagttctgtatgtggtgctgttcagttgctcttggccttctctcccattcgtattgatgctgatctgatttgccattcaatgaacccctctaaatcacaaacacacgtacacaaaagatgcccactcgaagtgatcgcctgtaggttatcggtccaacgacagaatgcagagggcgaacagtctacaggagagatcccctcgacttacgccgcaaaagatgaagacgtgatcacccttcgaggagaggaggaaccttataatggattgatcgttcgtcattcttcctctcttcttgcctctgtcttccttctttttcttctcttctcacaaggacgaaaacagctgatgagaacttttcttttcttttcgaaaacaggatgcagcgatgacgatttatcaagaagaaggagcaggaaggctgtacaccgcttggatcgttactctcttcggcgctctctttggcgctctctttgcctgatccaatcgatcgtagcctcgacgccttctctttctatctctctatcttttctttaatctctcgaacagaggaaggggtgaggagtttatttatgagcccggttgtgccaatatcttgcttcttctctccttctgaatcaagtcgtactacatcaatgtgaccatcgtaagagcaagcaagcagcccgttggttttgtgttcgtgcttctcacgtggttatctctagatttttaaatcgtgtttcgtttcacttgaattccattcgatttcatcgttccccgaacaataaagggtccatccagcctgatctaccgtcatcaacaagaatactactcttgatgctttggaatgaacgaggaaagtgaagaacggaagaagaagaaaaagggaaaagggggttattgacaaatcggatgcgtagatgagccagacatgtgcacgaccaatctggttgaaccagtgcttaacctccggtgggttggttcggccatgcgcttctccttcgatcatgcccaggaagtgggtcctaacttttaaatgcggaaaagcaacaggatgacaaaatagtagtcagatttcaatccttttagcacaaaggtatcaaaaaaagaagacgactgagaaagttgtcgaagcgatcaagaagcgtaggggaggtgtcgggaagaatcagatacatatatggtaatca

SEQ ID NO: 1951 - DNA, 2731 bp, Xanthophyllomyces dendrorhous
tatataggagaatatcgcaacgaaaagacagtactgacctcgtgacttgacaagggatgattgaggggatagcgtctttaaagtcaaaagacgaacatatgaccatcgctggcgactgtaaatcaccgcagaagaatccaaagacagtcagtacattgggctcttatgcgagatgaaagctataacaaatgagcagaggggactcgggaaaagatccttctttcttctcaaggtcggaagggaaaagatttaaggaatcagatacacaaatggtaatcgaaagataatttcacttcgcttttcctaggagcgatcgtagtgagctgagttgatatgttcatcattttgtcctcttttcttttcccctgcctagaagaagcctctcttccccgtcgccgctcttctcatcaaatattgcagaattgatggaattatggaaaaaagtagaaaaaccaaactcacacaagtactgaggaaacactgtaatcgggtgtccccgtttgttcgtctgctcaggcggtcaagcagatgagcgagccaatcactcgaagctgagtttcacacaggaagaaaacgcagcagattcagagcaatcagaatagatctgtacgtagcatgataagagaaaaagactcactgtattcaattaggatggattctttcatcgaagaatccgaaagaaggagcccggtttacgtaacaacattgggcctctttgactccttcttcgccttcttctctttcttgtccttcttttcctcttttttcatcttcttgacatgcttctttaaccgctctgcatccttcctgagcttgcgctctgcctcgctctctacctctttgctggcctttcgcttcttcgacgacgacgacgaagactccgtcgatgcggtcaccgtcaacaaaacgggcggaggggtgacgattaatggcacctttgcttcttccaacgtagtagcgatcgttcggcctttgtagaatcgttcgtagagttcccgcttggcaagaacccgtttggcgtacgcaaagtgattcaaattaagagctgacgaaggttcagtcggagtggccggagagacagtggccaacttggaggaatgatgcgtcggagcataaggagagataatcccagtcaacgttcggtgaatcgtctgagggacgagatcaacgctggggctttcttccggagctggcgaccccacgtcagacgacccagacgaagaaggagaagggatgatgatggatgatgcggcagcagcaaacacatgatcccagaatggaaaatcttcgatccgatcctttccaactcctcccaagttgtttttgacctttacaggaagtgggcgggacaggtggccttgcttgaaggctggtggaagcaggacacaacgttagtcaagatcgatcaatcgtaggatcatcttgagattcgatgaatttgtcaacgaaccttcgcccttccctttccagccctgcttcttgaggtgagcaccagcgtcgaacgacatcaaacgaacgggccaaccacgatacaaatcgaaagagagaccaagtgcacaacagaaggaggattcgaaggaaatttcaaaagcagaaagaagcaaaattacttatatatcacgtgactcgcaatgaccggccctggtgagtcacgtgatatacatgtgtcgacgtcataccggttactaacagcatgcgatctcattctgttctcagtctatccttcctttttcatccacgcaatccttcttgatcaattctcgtcttttttctctcttggttgatcgatcgatcaagagctcagagactcacatatctagactctgagatgactgcaaacctggtaccacacgactctgacgtcaaggccatcaaagctcacaacccttgtggcgctctgctcaccaggactctgccttcgtacagcggatcgtactcggtcggtgccagagacgtcgagttccctgttgagactaggctcatcgggtcttttgctttggccgatccgatcaaaggcacgagagtaggattcgagctcaatacggtgctttatacgttgttctacccatgcaagccagcgcacgatcaggcttcaaaagtgatgtggttcccaaagtcagtagagcctctatactttttattttcggatactcggtgtcatcccttgctctaagcgctctatttttggaaactcttcaggttggctcagacagttgccggattcttgcgcatggcacatatcaccaactggttttacaactcgatagctcgtacgaaacctctctgtccatacgtatttcggttcaagctcattccatcttaccgggttctttctccctcgtccttgacatagggttcttcgcgggtatcgccatccgaggaaccacttttccagcgttcaaagacgccccgcttcttagagcacccgagaaccagccctggcctgtcatcgtgttttctcatggcgtcggatgtagcagattgatgtactctgcattctgtggagaaatggcatctagaggatacgtcgttgctgcggtagagcatagggatggaagttcgccctggagtatcattacctttcgtgcgtgaagctactgagttcttcggtttcgtcatgtcttcaagcttcccatcctgacctttagcgtgaactgaaaaatgatatctacagcggatgggactaccaaagaaatggagttcatgcgttacacagacgtcaagtctgtcc

SEQ ID NO: 1952 - DNA, 29852 bp, Xanthophyllomyces dendrorhous
  misc_feature (2280)..(2289): n is a, c, g, or t
ttagttggccagaattgaaataccagccgatcgatgatactcgactgcgacatgatcaagtcagcatgcgacttgccgagatcgatggtgtgatcgaaactctcaagctgatcaccggttccatcaaaattcgagataaccacggtgggataatggaagacttcagaggcaaggactgggagggaagtttggataccgacagggtcattcttgctggacattctttgggaggtacagccgtggtgagtctcccaattgatcatatttctaattcatcaggtaaaacgctgacagtatatactatctctgtgtttctccacagatctctgccggcgccgaccctcgattcaaaccgcgagcagtcatagccactgaccctgctatgcaacgtcttgacccttgggagggtaccatccattgtcccgtcctctccgtcaactcggaggaatttacagattcagacgatttcgacagactgttggatgcagtgcctactttcaaaggaggaagcactgtgttttctattcgtaagctgtgttccctccatctttgaagcgacgacaaacgagatggctgatgtgtctctctttgtcaattggggctgtgggtactgaagctggatctacccatccttcattcagtgacgtctttgtaagaagccaatttttgttttgtcaagattaactagtcaacttattctctgacatctttccccatcattttatccgttttaatttcatgctagctaatccttcccggtttgagttcgtccaaaaaattccctttttgcgccttcagtaatcttattctgactctctaaattttctttttattccttctagtcaaccggaagacaggattgacctgttctcccctcaaggttcttagcaataccataattgcttgcgaaacttttctcgagggaacacttcaatacgtagtcgatcaatgtaaagtagtcagtggaagacagtccaggccgttctcggacgatcgaggaccgatgtgggtccaaggtgatgtggtcaacaagcaggatgatgaggatcaagataggaagcttatgggtgatgtgtccgtcgaactagctcaagatggaccacaagttttttagattccaaaggcccctacagatacatatgtttgtttacacgttcgtttgtctataagagagacgaaaccgcaacctgttctttccttactcgatagatgattactgaaagtgcataagacggctccatcagatcttttcgaacgcgaaagcgagatacagatctggagacagaggaagcaaacaatggtcaataaatcggaaaggacggacaaaacaagtgcagagagagaagaacaatggcttactagcggcttcccattgatcctccgtcatcgctgattcaccgtttgaatctacgactttcatcctacctagaagatctgtgaactccggtacatctctttcttcatcaaataccctatcggaaaagtaaaaaggtggccggtcactcaactattaaacgacttgtttctgactcccctgaatggatatatgcaacagagaaaagagacttactcataaaattccttcttgtagatcagtcttagaccatactccgacgcaagtctacgattgagacgaaaaagaaacaggacgaaatcaaaacctttatccagtcgggtcggaaaaaggtatgtcagactccaacagaaatcataatgtacgaaccgctcaaagttctcccagtgaaccaggtattctggaacatcctccaccgcgtcttgcaagaagaaagaatacctatgaccgtagatagggaactctataagagacagaacaagtcagccatggcatcaactttgtccatgtaggaaagtctgatcataccttctcgagagtcaaactctacagaatagacatcgtttccgaaggacaaagcctcagcgtcttccggtatactctgcagttgctcactaaatcctccgcaattcatcatgccatgatgagcttacagctagcccgttaaagaatgagagaagaaataaaataagacgagcaaattgctacttacacaagtttttcagcgttgggtacggtacccatgaacatgcctcctaacttcaagtttttcgtcacgtttctcaacatcattcttgtcttttgctctgtctcgaacgcatagtgaatacagaactgcatcgtcactagatcaaaaggctgtctgatagtgattacgtcggttattggaacctgtgagtttttagttttttttttttggggggggnnnnnnnnnnggcaaaagtatcttgtaagattcacgatcgttcggagagaacatagctagagcataacccacagtgaagcaatcaagggcatggaaatcataattaaagttccttgttcgaatatctcgagcacgggtagtagcttgttgaacagagacctcggcaatgtctagatcacaaagccatgatccccgttgaaatgaaccgcaagaatcgtcaggtcaggcaaaacaccagagttgtagaaatgatccggagcgatgcaatcgtgtgagacgtaccgaatccaatatacatttcgatcctggcagaattccacttcaataaatctcctccctttccacatcccagatctaacactcggccccgaggtcgcgcattcctcggtacaccccctccaccaggaatggcgcgccgagcaaatttggcgattagaacggatttgatccaattgttgaaagcttttagcccaaagatcggagagaatttgcggttctcgcgaccaacttccggacgatggttatctgaggtttgaacgatggtgggagatgaaagcaaaaggtttagttggctgagcctataaagacgaaatgtgccaacgattcagtagaaaaagaaagacgtacaatgtgaagcgacggcagctacatctccattcctctcctccgtcaatctccctctcttggcatcgccgccatcttcctgcctctccttccccatactcctctttttgtacacatcatccttctcgccctcttctggttgtctgacccatcctctcagcatgttcttgcttccgtctccaggattcctcagcgcgtggtcgtactctgactttcgtagaggtaaatccaccgctctccctcccccccttccataatttttgatgattggatcgtatggctttgtatacgaaggcagacggaacgttggtggcgaagaagatcggttggaggatctatcagaactcgggctaccaggaaatgccgatccacttggtagttgagcgtttgctgccatcatcattgacgacaactctggtacggatgcagataacggttgcgaagaggaggatgggacaggacggtaaggcaacatgtcaaactcttcttcctcagactccgagtcagagttatcttgggaagagcttccactacgactagagctcgaagaaggagactggttgcttcctacgtaatgaccatatgcatcatctggataactgatgggagagttgccgttgaggatactgatagagttgccggttcgatctcgatgcgcgagcggaggactggagggcgccaggtgggacatgttctctctttcaaaaatgaaatctatgatgtccctttggaatgatcttgaaagatgatggttgtgatagataggtaatttttttgtcctcagacgtaagggggtgtacacaggaagcacttctcgatgtgatcatcgctgatattattttttcttttttgttaacattgtgaatgtgacgacgacactggtcctgcttgacaaccgaagtctctcaacttctccatgaagcatatttttcgctgttcacccatcatcctcatctagacaagtgcagtagaacattattttgaaagaaaaaatccccgttgagaagagaaaagtatagaagcggatacaagtacaatacgatagcacggatcgcaagatgaaaccactcgacttgaagaaacaggagtcaaaatggaaatgagacgatggcgatgacaacgataacagagcaagtgcagaaaatgaagatcaagaaacacgtggatatactctaagaaatgccaaatcaagtagaggattcgacggtcataccctctccagcagcagcagcagaggcagcaggagcgaaccgcttgatctcttcaggtcctcgttgcctgttatccggagcttgaaggccggcagctcgtgcagactcctccggggtgtgagccggctccaaaagggttttgcatcgacgcctgagtgaacaggaagcacaagacaggaattgtagatcgaggaaacccttggatatgttagaatcgactcaaattaaacaaaccaagaagaatatgcgagaagaaggagaccgacttgtgaagcttggttgtccaatgggtcttgagagcagcatccgtttccatatatctgtaagtcggaatcaagaggttgttggattaaatcatgcgcagaaggcctggaaagatagagcttgtacgaaccgagcacactcaacacagtactgtggtgttgaagaagaatacacgattgtcaataaagagactcctgacgacaaaccaaaaacaacatggctggtcttacgtgctgtcccaatccgggcttgtcctcatcaagctcctgggcctcgagcttctttcggttcatgggatcaagatcatgcttctgaattaagtcgagatctctagtcctagctcgggttcgctacgaataagagatgcaagaaaaatgataggtaagtgacagtcaagagcagacgctcaaggatgacttatagtagggatactaacagcggctcggtgtacatcacgctgggctgcagatacgaataacacaaattgggagcatgtgttaatcacgaatcagaaagattggacacgagaatcaatgtatcgcacaagtgaaacaaacctttgtgagttctatggtaaaaatccggcaagtgggtaaaagtgataagtgagataattaaattttctcaatgatatcaggcctgagaaatttctggataaccgaaacatgccaatcgagcaagaaccaattaccttgatcttcttaatcgtcccatgttgatgtcgttctatttaacaaatctacaagaaaggcagttgagagtggacgttggtgttcgacgattgtgttatatttgaaggagttgggtgaatcaagagcagaaacttgtgtctcacagctgtttgaacgccacgcacgtgacctttacctctcactccgtcagccatcttgtcgctcccaactctcgattctcaactcctagctcactcaatcggcacctcaggttgtcttgaagagaggtgaactacagaaggtcttccatcgatacaaagctgctgagtctttggtctacgagatattcctgctcgtcagtgctagtagactgtatttatacctatcctttggcctgcaaatcggccataccgcatatacccgtctctcgactacaccctgcctttggtctcgatcgggtgcttggccatcaatcaaagaccaactgtatctttccgggcctgtataccagtaagaactttggtacaacatcttttgaaacggtcgtgtttcactcaacagaaggattaaggtcagaatggactgacttgcgtctggctatggcagcatgtatccgtctctgaatctctgtatccaaagaatctgagtagatagacaatcaagagatcaaggatgtctcttgaatttgaaactaagctcgaaaacgtgctttccgatctccgctcggagaaaatcaagactcgggagcagggtgtatcttcccttcgcgaactcttgttagacgctcggcaacgatatgatctactcgaagctggtcaaggccaacaagcaatattctcgagtttattcaaagctatattcttctgtgtgggagaagaaaagaaagcctgtgtcaagaaaggcgcagtagaatctggtgagccactccgtgatatcgtttctcatcttctgattccgattgctaactgtcccaacatgtgttgtatctcattcatcagcccctcctgtatctttgcgtcgcttaaccgatattgctttcctgctccgtcagttggttcagttctcctccccgcatcttgctaaaaagaccgttcgctccgtatacacacatttgatcgttctccttgaacatcaagggacacttttctcccccgtagccttggactacatcaaggcccttcaacttctgttcatacacaagcatcacatagaggccttcgaaccgacagaatgggaagctctcatgaaattctgttttgcagctctcttcgatgaggagctggagctatcgaaaggctcttctcaaagcttctctgaagccgaaggcagaggccaagtcctgttctcttatgcgcaagcgggcagaggaacagcagaagagagatataccgtaggaggagacgatagtgatttttcgagtgaagaagatcgatctatatcagcctcaggaaggaagaggaaaaggcatcaatcacaaggatcagcctctcgcactgtctcctacactccgtctctgacattcggaaacactcagtaccgtgctcagtctgtatctctcacaaacaccagatccttggcttcgacaccaatcatcaagcgaacgaccactctagaaaagatcgctctggcctctctcattcatactcttcttgtcccagcgcactctcttccccttcttggttcttctctgaaaccacgatacgaccaagatgaccgacctctcccagctgaaacaagctttgttgcgagtggggttttgtatggccttcttcagtacctcttaacgtacacctcggaaacatctgcacatctcgatatcctcaggtcggttaatatagtcttcagcgtcattcaactcaatcagctctgcaatatgaaactttttaccgtccgagcgtttccgatcctactcaagctctgggctaacacaagaagtaaggagctcagagaacagattttgatcagctggaaatggatgttcccatttatctcgaagatacaggacaagtacgggaaagacctcgcttgggaggattaccgaagcgagttagaagagcggatatcagaaagagagatcctggaagctttactaggagcgctagaaaatgaagtcaagaatagatgggggaatgaattgttgatgttggataacttgaaactggaatttgtgaaagaagaaagcaggcggagcgcattcgttgctgggagtttttctgtaagtcattcatcttgatcatatctaagctctgcttcatgcatcacatgccgttgttcactctctgtgttgaaccctgtcttgtaccagtatgggcataacttcagctcggttcaggccatgacttgggcaactcttgaacttcaggcggatacgatatcagccgttagtatcaacattttcatatcacacttgatactcgctttagtttaccgttagattactcattctccgtttgaacataatcacagatcagagattcaacaaacggcccatctctttctgcaattctgagcccctcagtaagcgttcaagtaaaacgtcagaagattgagaaggaccctttttcttctcttttggaggcgattcgagatgcagccttgccttcagttcgaattttccatcttcaagtcttgctgttcttcatcgaccgacacgagaaagagaccatgcaagaacaggatggtatcctcaagaccttgattcttgtgctcggagcagaagatacaggagttcaatcttgggcattcgtatgcctcgcttccgtagcttctgtcgcaaagagcgttggtttgcaagaggacgtcctctcttctacccctacaagtcgaatatacggagcaaaatctcctctacaagatagtcttactcaaagtcaaggaaatttggatctcgcgcaagcctgggagcaggtttggaaatatgcgacacgacggattaatatccctctcctctgtcgagcggcaggtcatgttgcatattccatagtccgtcaccggcagatacccaattctgcacttctagaaaacgtcgggaccttcttgaaagatatcgaacttcaaggcccgttctttccttatgacactgtctgtcaattcatctcaagttgtctggatctggcttgcgaagatctctacttgttcaggcttgagtacgaggagagagtgttgaattggctggtctccgtatggaacgtagttgacggtacgacaaaaggcttcaacataaacacaaagctcgaaaatcactctccaaacgacctgctcgacctgttgtcctctttgtgccgttttaaaaccagggttaaggtcttacaaaacggggtacttcccgattcggatatcgtcaaccacttggttgaggaaaatcgaaccaaaaccatccgcgaatacgtgatccatgctcggctacctcttccactatctgattcgatacagcaaggtagttctgataattctgacgcaaattcttccagcatagtctcagagagggatctcattggccgccctcggaaagtttctagctttttgctcaagtcaatcgactcttttcatctagagtggaaggacatcgatctcaagactggcgttactcccgagaaggttcgacgttcattggatctcattgttctatctctctgtttcgagaatctgctacagatgaacggaattacaagcaatcgacgagcagtgaaacgatcatgcctacttttaactttggtagcacccgccttatcaactcctcagtcatgcttccgcgactcactaatcatgattcagggattagaaccgttactcatggactccatcgaccttgatgaaccgaaggtaatgcttttgaagccaggtccaatgacaggaataaggaaggatcttttagctattgaaagagaagaaggcgggccaagtgaagaggcaaagaagcgagctcaattgcattgcttgatctggcgcagctcaggtgtaagtatggttcgcttgggatgtgtgattaactgtcttatccgtcaatctcaaatatactggagttgattgcgcgcatgtctcgcttattgatagaattgctgcctttttttcctcctgtttcgccaatagcttcaagacacattcgctactcaagtactcggtgctctaaattcatgcctacacatttcacttagcctctccgttgacgctagtggagcggctgatatcgacacgataactgggatatcgactgctcttgatgaagatgggttcggaacaataaacacctcccaggatgggatcctaacttccgatatatcccaaacttcctccttctcacctacccgagtctgccgatctttaatcaagacaactttcacttgcatgacccgaatctcaatcctgcaatctggaagtttggagccgtctcgacaacgagatatatttgacctattagaaaactgcgatggtccccaattcatagccttcggtgatgtagtgtttgaggctgtcaaactaggccgtctacacctcggggctactttagcagaagacttgctcaactcctttgaatattttttgaggtcttatgcttacagtaaagacataccaatgcttctcttaaccatctcttttatagagtccactctgcctctttggattggtggttcgactgtagaaacatctctgggcgagaaggtcaggatgttacgtgacttcttcgtagcggaggtcgaggagggtcgtctacatgcaggccctgtccgagcacgactgatcgcctttctcgaagcctactgccaagcagaccctcaaggccgggcctggagtctccctctgcctaaccagaagcattcacttccccttttgaatgtcatgaagaagtttgcaaaggatgtagacattcacgttcgatctcaagctgcggtgtctctagccaatttattcagcttcaccgcgcctgttgtccaggattccttcaagttctatagtttattctaccaagagttttctgtcagcggtcatgagcaaagcatcactttgactctcttccttgccaacatcaccattgcttcgactaccgtccgacgagcatcctacttccaccttctcgagcttccatcaatgatcgcggatgccagtgttacccacgttgagacttcactcaaatcagtagccacagttttagggctcagttcactcttcaaactatgggaggtgtacgcaccagtggtattaacacatataatgaagctcgaggcagaggatggggaagttccttcgctaatgtcatctcttcttggctatgcttctgccaggcagaactctgagatgattctccggcgcttcggatcagtctacctcgctaaagctaggattgatgtgttttctactctatgtcgatcagcaggaagaaagccggatgatgctatatcaagctatttaccacaaatgattgcagggttagtcagcaacgccgtcggtcatggacagatcaatccctcggtcgagactatcaccgaatctgtcaagaatgttggtgttactatagaccttctttctcttgtctcaactcgaatggacaccatactggtttccgtcttccttcgactttttgatccatcgactatattagaggctcttccaagatcaaccgatggggatcagcggagtaaagcttatgcccgactgtctcaaccggtgccagagctctacaatgtcgatagtgttcttttcccaagatcctcggcagtggctgtcatttgcgctcacgactggtttgtctctcatcaaggctcaaacaccatgcctctcgaatctgtcgccttcaacgtccttcatgaactggtcagcgaagtggggaagacaccgctggtagtagaacagattcgctgtatctattctatcgccctatttgtttcgatctatcaccattccttccgtaggtctgctctcctggtcgcactgctacgtctatccgtcaccctcatgagccaagccgaattagtgcctttggtacaaggctttgtctcctggggattggatcaatctttccatcttcaggctggctcgtctgatttagcagagacgttcgtccgggttgctcatctctccaataaccttacttctgggtcttccgacggaactatagcagccatcggggagacgcttttaactaaacttggagccgtccttttcaggctatccgaaacagatggtttccagtctacagtgcagaaagttttgtgcctctggcctcggccgttgaccggtgacttagctacaatccatacagagatggatgcttcagatgtgcttgtgagtgttgctttccttcgttctcgtctttgtttcagaattagttaactaactaggaccattatgtacatcacgatactctggtcttgcttcagattgacagacatcttttaactgcaaagtttacccttgccaaagaatttcaccaccaacttcctttgatgtcacccgcagaccgagcttccttcactgcttcaactttctggcacatcctgtcctcaatgaatgctccttctatcagccaagaatcgcgaacaagtttcgtcgaaatcttacatcttctggatggtcagcttaaacctccatcgatatccgccattgcttcacttccctccaccaatccacttcacaacttgaccgtggatcttcgacgttctcaaggagtttatgactcaaccaaatgcgctcttgtcgttggtctagttgcactcctaaaggaggacgatctcgcggtcatcgatttagcctatcgagccttgagaataaccatcggactgtcttcgcagctcttctctacgatcaagtggggatctgatatatccctcgtgaccaaggatctgattgaccttatcggaacttccagcagcaaccgtgttcgacctaaaactcgttccctccaagatatccttaaggatgatagtgtcgatggcgccaaagattatgatgaatggatcaagaatctcacttcttctctagccgggtttcttgctagtcaagatatgttctttatcgaactggaaactgtgctatcgatcagctccagattctccaagcgcgttctccctctccttgttcaggccatcttggccttcagaacagagaaggactcgacgtgtgcctataaagacgtcctctcttgctacttcgagacaattctgcaaagctactcaatctcgtaccgagtcaagcaggctgtcatcgatgtcgttctccatcttcgtcacatcagacctccaggagccgaatcacctttggcatacaaccattggctcgacctcgattgccttcttctgagtaaggctgctgttcagtgccgagcctttaccacagctcttttattcatagagctacgaaacgatctggatcctggagatcattcgaatgagacaaacgatgtactctacaaaatctattccaacatcgaagatcccgatgggttctatggaattcaatcttctgatatccgctcgtcactcgtccagaggtttcaccacgagagtcaatggaccaaagctttccaattccatggtgctgatcttcaagcctcgtcaatgaacgaaaatgctcgtggacttgaggggacgcttcaggctttgaatttctttgggtttgacaaaatggctatgtgtctgcttcgaggcagccaagccgagaaagggaaccttcccgatgtaccggatgatcttgagtacgaattagcttggaggaatggaaattgggatatacctgtgaatgtttcatcagctcgcaatgtgcctggatcgtcagtatatgccgcattgaaggctgttcatcaagttcgagatcccgtagcagtctctcggatcgttgatagcgctctttgtaaagagatcgcgcagatgtgcaatctcagcattgaaagcatgactgatcttcgatcggccaaaatatctctactttgtctacgagaaattcgaacatggctggccgaagaacgagctaggctatcttctgaggatagtactcatagggcctctccgctatttgcctctgttgagaaaggatttgagtgtgttttcttctactcgagttgctcgttcgtgcttgttctcgtcaacacatgacttaatttatttctctcctctatcttctacacagattctccgacatagagaagattactgctgttcggtcttccctcttggactctatcccagccgaacaaccactgggcgtcatcctcgaaagtgatttgatcaatacacttcgagtgaacactcagctacaacttagcgataaagctcggtcatctggtcaactgcaaatttcagtcaatgctattactactgctcagagactgagccatggacttccagtggcggccgaagtatctagggagtttgctcatgtcttgtggcttcaaggagaacatgctctcgccatcgggttacttcgaaagcttatatccttgaacgattcaactccgagctctgaagtagatagtcttgtttcggataattcttctagggcagagctcttgtccttactggtgagtgcataaatttggtcatgaaggtgagcgactcgctgatatactcgttctcttacatctcattctcgtacagggagaatggctctcaactgctaggcttgacactcctgaggcaatccaatctcgcttctttcaacctgctatcgagctactacagggtctgaacacaagctctgatcaggctcgaatcttccatcgatacgctgtatttgcagaagatcaataccgaactcttcaacactcgcccgaaatcgagcgacttcttctttaccgggatcgtcaagaccgagagattgaggatctgagaactcaacactctcgttctgctcgttctcaagatgatgctcggtactataacaaggtagtcaagaagcgagagtctgacgtcaagaagattgaagagcacaataaattgcagaagacttttctccgaaacgctcttgtcatgttcgccaaagccctggctggcactgatgaatttgacgactctctgattcgcctggtctccctttggatgggatattttgctgacgatgatctcaacaaggctatttcaagtcctttagtggcaattccctcctataaattccttccgcttatcaaccagctctcagctcggctcgatcgtgttgtcgaagaagatccttcttcgtttcaaaagagtcttcattctatcctcatcaaactttgttatgaccatcctttccactgcctttatcagttgatcactcatcgagattcatcatccgtgccggaggagagaaagtcttccaaaaggaaaggtagaagctccttgacctcctccaaatcgaccgccactcctccccgaactggtcgagccctcgccgccgattatatcctccacaaatatgcgaaaaaggatgagctcagctccgatcgccttcgagatgtcagccggttttgttcagtggccattgaatggtcctgcttcaacacggaccatcagaaacctattcctccctctacttctacatttcccgtcgatcagtcttgcgcaatctctaaaatcagggacctccatatccctgtgccgacaattgatctccctttggacttcacttgcaaatactcgacctttattcatatatcttcatttggatcaacatggaaaaatctagggggaattcaccggcccaagtgcacgacttgtattggtagcgatggtgccagataccgtgtgttggtgagtctggtgttctgccagggtatcttcgaatatctttgatacctccatattctgactcatattagcgtgataaacagttcaaacacgatgacgacctccgtcaagacgctatcatggaacaggctcgtttgctctctatatgcctctcttgaatttttcctttccgggtcaaacactgaatcgacaaacgtttctttcatctagcttttcgatttgattaatacacttctgcgtcgagatcgagaaactcgttcaagatctctctccatgcggacgtacaaggttgtgatacttgctcagacctctgggttcatcgagttcgtcgaagatactagtactctaggcagttggctaatagctagtcataagaggtatgttcttgtttcgttttgaaatgcatgattgattgatataacgacacaaatctgattatctgcatcgtgctctctatataccacatgaagatataatccgaccgagcccggaaacaaggaaatgcgagtacgagttgatgaacttcagaaaacctatctcgatcggtctatacttgccaaggagtatctcaagacaatggacaactttcatccggttcttcgacatttcttcaccgaaaagcaaaaagaaccactcgcttggttcgccatgagattggattatacacgaagcgtcgctgtaggatcgatgattggacatattgtgggattaggagacagacatttatcaaacatcatgttggttgagaagactggagagttggttcacattgatttaggaatagctttcgaccaggtgagcgtctgttgagctccgacatgggatatgttcttttctgattgcttcctcttgataccatgtcaaaccaagggtcgagaactaccgatcccagaactagtccctttcaggttaacgaacgacgttatcgatggttttggaatgtctggtatagagggtgtattcagacgatgctcggaagaaactcttcgtgtcttgcgtgaacaagccgtaacgcttatgacggtccttgaagtctttagatttgaccctcttcaatcttggttcgtctgttactccctatcatctcttttcactttggctccttgagacctctaaaccttatctggtttgtattgctatcgtggctgggtcaaaagggtggccgatgctaggaagatcgctagagttcaaggcgaaaaagaaaatcggccgttggcgaacccggcgaatgagattcgctcatcaactgatgaagatgctgatagagcattacagggcgttagaggaaaactcgatcggtcactttctgtggaatatacggtgaatcaattgattcagacagcaagggatcctgccaaccttgcttctatcttcactgggtatgttttcaaatcctctctcttcccctgtttatcgttaaatcttgtcaaccataacgggctgatgacttccgttacttggtggaaaattgagcgaagatggtcatcttggatgtaactcaagtattccagagtcgagccatgtacttcgggtatcaatagtttatagtcaggtcattcaatcagccggatggtctaatacttttataaatccctgttagatgtgatgcgcgttcctaattgatatctcgaaatggaacggaagaggtaatctagagagggctgcatcagacagttcgatctgtcacaatagagcgacaaaaaagaaaagaggggatgtacaaggcttgttgagttggaaatgacataaagcagtcattatagaaaacagaagttacaagcaagcgcgacagtgtcagcactttatacgccggcctcctgggctgtctcttcctgttgagaaccacaaagcgcttgaccttctaatttgtttcgtttataatttgccttttgaactttcctctaagcaatcctgtcggctttaagtaattcaagttctcacatcgaccaaagccatgtatacaggtgtgtctttcaataatgaagcacataaattcattcgggtgaaacacgaagcgagaaagcgcagcgatgacgcgtgacttctgttttgggggagtttgagccgagtagacgtgctgggtggggataaaggaaaaaaaagtccgctcactctttcccttcatcgaccatccacacatacacacaagatcaatcagccatacagaaacgctcggtgttaagatcaacaaaccagagacttgatctgtccctcatacattccaagaagtctgcgtcgtaaagccatatgacgacgcccggatccgcgaatcccacggctcttggtgttcttgccagagctttcatttccaatcgcatcggagccagcacaggaggaattaattcaccttgcatttcatcaggccatgtatttcattcttccaagcgtgtcacctcaaagattccgtcgagcttgaatgaaccgggtcctcatagagcggtagtcagcaaggtcggctgtctttcttcttccggtcggacgctccggacaagaccggcgcgttcggtgaagaacaagagtcaaggaggtcacctattctgtatgactgccgccacggttgacagaagagcagtaatggaaggggggataaagatggaacgaaaacaatcagcaatcagacggtcgacgtttgcaccgttttcttctcggtcagcctcactcgggactgttcgtctccgacaaactggtttgtcgcctccgaacctttgtactttctccaaacgagccaattcctcttctagccaatcccagcctcagccgacatcagtcattaaagaactcatgcggtcgcccgacatctattcgcccaattttaagccgccgaagtacaaggttgtattgtgtcatgggttgtatggttatggagtcaagggcaagccaggctcgcagattcattattgggcgaacgtgcaggacgtgttaatggaatgcggagtagatttattggtagtagaggttccttcgtacgtgcttatcttactgtctgaacaaaggcgatatagcaaatgcggaagtttatcgcgctgactgacactccactcgatgattgtatgttgttcacccactctttcggccaataacacaggacgggctctatcaaggaacgagctaagatactacacgagacattagaaaagagttgtccgggagaagaggtcagtcatgttaattttgtctactgtttcgaggtttgttgtgcttgtcctgacattctgtatttgctagatcaacttcttggcccattcgatggtacgcctatcgacgaacgttcattctggaaaaaaacgtgcacaactcaatatacttggttggatccgtcgattgaccaagatactctttctatcattcttactcatggctctttttaaacaaaccgactcttgaagggtggactagactgtcgatatatcattactcatatcaagaacaggtcgtacaaaatcaaaagtctgacatgtatagctacccctcatagaggtttgtcagatcctgggttttgtgattgttctttcctctcatagctgaagatgtcttctactatgcggtctttgtatatggtatacaggtagtcccttcatggactggtgtaatgtaagcttaacaatttgaagctctgtcatagttcctcggtaggctgatataaccgtctgaacaggccacaatcggtcttggtgttccggccgctagcgagcctatcactatcaagaacccatctcccaaactcgttcctgcatggtcgcttaaatacccgctattatctcctcttcctaccatacaggctgagcctaaagaacctccgtcttcaaacgctccatgtcctgaatcaaccgttcagacgacctccagctacttttccttcatcccttcatccctgatgtcggttaatccggcgcagatcctatcgtttattagggacaggctactctacctgtgtgactccccggcatattacaacctgacgacctcattctgtaacgattattttaacccgaccaccccagacgacccggacgtcaggtacttctcgattgcagccagggctatatcaatcaacccgcttcatccgttgtggtggacaaagcttgtgttggatcataccgctttggccggagaggcagaaagagatgggttcgcaggtgaaaaatatgaggggaacgatggaatggtctcggtttccagtgcaaaatggggggagtgtgagtactgggtgttccactctttttcccttctgctatgtttccaatcatcttgcctgattgtcctcgcaccctttctcaatagttcttggcatagtagacgattgtaaccattgggaactacgggcaagaaacaattttttcgagcgtatgatctttagatttccagtccttcttactccaaatttctcttcggctctctcatcggtctacgattcgtcttcaacgcccatacctgcgtcctcgtccccctcctcttccacttccattccgactataccatcttcgcacgcctccacttctatctcgtcaacccccacctcgtctgccgctacgttcacgacttcacagggaggacaaggcaaacttaccttctcaccttcgacatcggaacttcactcgatgccaccgacggatggaggatggacattaccagatataaatgcttcggtctcttcatacattgagagttcaaagtcgttgtttggtgctaacgcgactccttccaccgaccctacttcttcgcccaaaacgacttcttcttcgctccgctcttcttcatccgacaataagatcaaacaggtcgaaaagcagacaaactcgttctatgaatcacaggtatcgtcagccctaggaaaagtagcaaaatatcttccattcccatttggtgggcttgggaaaacaccagacggtgaacagggaacaccggttgatacccaggctagagagaagaaggaaggagtcgaagagaagttcgagttagggagattttatagagcggttgtttcgcagtgaggttttcttcaataagcttcttttcctcgttagaataggttactcataaagattaaacactctgggttctatctgtcttttactcagcttacatcaacggggcctctgaaaggatgaggaaaacagctttgttttgcattacccggcatatttttataatcacaatgaacaaattatggaaatcttcacatatttatctagtttccgaggatgaggtcctcatatattctgctcactcgtcagactctttcttctccttctctctcttggatttgtctgccttctctttctcccttatccgagcccacatcttttcaacctcagcttctacaccttctacatcaacgactttgtacgtcctcaactttgcctctccacttttacccggaggggtgtcgggtgaggtctcgaactcaataggaaagacacctgattttagggaaagtacgaagtcggtgagagcgtgccaagacttgagtcgagtttccatctgagtttgatgatgggatgagttagacaggacaaccttggagggttcatatttgtctcgaagagcattgaaaaaaacaaacgtaaagaatgggagaagatgaggacttaccgagtcgcgcactagaccggacgtgctagacacctatcagaagatgatcaagggaaagaaaggaagagagaacggaaaggtcgaaccataaggttcagtgttcagcttccaaacgatatgcagagggataccgaacgaaccacccagaaaaacgtctctttcttctcttttggaatcccatcgacttcgattgccggatgaacaactttccattctctgggtcctagttcccaaccttcctgctttttctgcgctcctctttttccctttgtctctttggtcttaccggctttgtgggaccgccgattttgggccagatgtcctagattgagcataaactcaaactcgcgccagatttcctttccaacgaaacagacaacgctaggacgaaatctctgaatcttatgtaataacgcgggagctccagctcgcatgtctttctggacgcttaattcggatgcctagaataagacgtaaagtataaattgaacagaagagagaaagactagtaagaggtcgatttgataccaggacgaatgtatgataggaaaagatggcacatacagatgctgtcgctcgacttgttaagtttgtctttttttccaacgaaaacgattttcaggctacctgtatactcttcaagggtgggaaatatgctatataaggtaaaataggcttacaattcctatgttatagtcacccggtaatcggtgatcgtctgcgtaagtgacagtgtctttagtcaaccctgattgagagaggcattgccaaaaccgctttgtcattgcaggttattacattcaaatgagacaacacatattgagcaattggctttccgtatcctcttagagcatatctgaggacgatcaatgaacatacgtttgtggatcctcgataatgatgtccttcccgtgcagatgatagaccaggattgattccgcagaacaagactggtaaaaccgaaacaagtaccagagagtcagaacgagttggtgtcgtatcagatatactagaaggaacagatgacaagaggcagaggaagaaattatctagacacaccatcattaccttcagatatatagtcgctgatcggctttagatgctcatacactgaaggatcggcgtattttctagtgatattcttctttttcttaggcttgataatctctagaggcacaactggttcctcgtctttcttgatagctgacccgggaagggatgtactcgagcttggcttgcgttttagagatatccttcggtttttcgtcttcaaatcaggagaggccgctcttgatgattctcgagagaccgattcagagggcgcgggagtcaatctaacaaacaggttcgatgtgatttagggccagtatgtgtgtgagtttgtcgtgcatagagattcactcacgaagacgatcgactgcctatatcctgatcctcccgctttatattcatagcattacttctatcagccgggtctgaggattcatataatgtctggtcttcctcttcctcttccttaattttgactttttgcatcttgatcgactggatccggagagaagtcgggatcgcctgagattttggaacagctaaacgtgctggtgagtagctcaggtgagcaaacaggctagatatcttctgtggtttggtgagcgtcatcggtatctctagatcggagagctgcctctttcggcgggatatgataccctggacgtttcatagcaggtgcaatgtataaatcaagtattgggatgaaagtgatgacgtttgcattgccagtcacgtgtctcatataaggcagtgtcaaccctaacatatgttgctcgcttcatcttctccgttcatcttccttccctgggctctttctactcaaaacatcggacacacaaacagcttacgatggataccgacgagtgagctttagattgttcttctgtttagctaggccgcgtcatagaacaaagcgttcttatatagactgattcctttacggctgatcagatccttcatccctcgaatcatcggcctgttctatgcagagatggttcccgcccaaagcggaggatctagagtcatatgtctgtctctactctcttcaatatagacatgatcatttcgcactacgcacgctcaaacgctctatattgatggttcttactgctggggatgattgggaaaccagatcaagtgcccaacaatcttatctcaacctcgacatctgctcatactgcccgagttggaggaccaggcgacatgtctggctccttatcttctcttccttctgtgacatctgaatctgctcctttcacacctcaacctaatagatccacctctcgtgttcgctctcaacggacacgctcgcctggaacatctcctatggcagctcctagcatcactagcacttccaatccgactcataaatctgctcgaagaccgttgctcaagttcgatccgatagcagagtacattgttcctcatagtgcgctctgtaacaagctagtcactgtgacatccgggccgtacaaagtgatggggtttccagtttgtcaactggacactcctgaccgaaagaagggatacgatagaggacagttcaagtggaatgtgtgctgggtatttgatcgatggaagtatcagggaggcgagtttgacgcggtcgttaggaaaacagcaagagtgctgagtgagatggaggtatgtgtgtttcgcgtgtattcttcatgtcttctcgttcgcgtcctggatttggattcggttcatgatgaagggagtaaaggctcaatgagcactgattcatactcctaacggcgcgtaaaaggccgaatcgtcgttcttgtcttcttcggaaacaacatacaaaatttactctatactggagcagctgtttgaggatcttaactcctatggagaaaccagtattcctatagatcagagcaattcgattgaaatcaagatctttcctcaattaccaaagtaaggtttataattatcttacgcaggatcgcactttggatcaactttgctataaggcattactgatcatcctatcaacaatctacatattcaactactcgcgtccagtcctgtggccgttgaggattggcacgttccactaccgttgatcgatttggaaaagatgaaagaaccaaattgggatctcgctttattgaaggtatgtactcctcgagcaaaaacgtttcccatagtctatccactaggcgtttttaacctttctctatccccacttttgctcctagattgttcctcatataggttagttttgcccttctcgagatcatatgaaaatatgttctcatcttctgtaattctccatgctgatgcctcttaatcgatcttctccagacgggatagcgcatgtaaagtaagtatgttctgctgtgtcgttcttcttaccagttcttcctgataaacctctctcttgactgccccagaaaaattgctgccgctgcagatgtttcaacgtattatgcaaagatcggtattgaacatctcatgtactacgaagcatgtatgctcgtagacatattccaattcgcgaacatgtacacaatcaagcccgcgatcgctcagttggccgaggtcgatcatgtcattttagaatgcgcgccgtactgtatgaaggatccagatggagtcatgcctccttggcccacacttctcaagctatatgcggctcttcgaccagggctcaccctgtctgactggtcagagctgcacaatgtgagctcccttggcatcgatattcgccgattcgtttccttcggtgtaatcaaagggattctccgtagggttcaccgatggccggtctttatccaacctggattcactccgtcgaacaccgatccattctttgacgagtcggaaacacccatgggtccaggaagtcctcgtgagattcattcgaatttacccaaactagacaatggtttctacggatacgcacaacaacaacaacaccatcatcatcaacagcagcagcagcagcagcagccgccacaccaaacactctcccatgactatgatcactatgcacataacgactttcatcccagccctgtcagctattcttctccacacaatgttcctccaggaactatacccggcggtatagtcggtacaggtacaataacatccacaggaacgtccggtcttcccaaacaaccttcaacagacgggttcaactcttcaggcatatccggtcgttcactttccttgcctgcttctcaagggcgttctgtcggcagtctacgcggatcccaaggaaggtctcggatgaagttgatggacgagtttgaagatccgtggggttcttttgggtatccagcaggtttgacgatcgatcatcttgatggggatcataacagtgatcagttatgcgtggaattagggatcccatggggtggagaaagaggactggagaaggcgttggaggcttttggaaaggtcaatggaggaacgattgcgctgatctacaggtgattcatgttttccttcgccgtttctctaagcgttattcctttcgcttcaatacgaagacgtacatgaatcatgaactcgaacgaaacgagaaaaatggcaacaaaagacaacgttcaaagtgtcgaaagagtaaaacacaaccgaagggagacaacaacaaacacaacaaagaagagaagaaaagccaaagagttcaggaatctaaatccatcttccttgcctctatactatccacgccaacgcttaaccggagtgctcaacgatagtcgtgatcagctttccgtccttgacgaccgtcttgagctgctctggcacagctcgttcaacgaacaatccttcctcatcagtctcggggtcagggatcgagacgttgattgcgctacatttggaagtgatgatttcggtagctccgtcgatgcattctttcgagaggtagacctgaccggaatcagtggtatcgatcgtgacggtgggagttcgaccgaggacttgaatggtgaacgacggagaagacgtcacgctgacagaggaaacgaccgagtcgagcaggacagaggtcttggagcaggcggctgagaaagagaaattcgttgtgatcggtcaaggggggtcagtcgggatagagaagaattgagagcgaaaaagataagtaaaccgtactaagagagatagcgttgacttttcccttgacctggatgaccgagtttttgcatccatagatcgagacgatctgcttgatctcgacgtcctccaggatgatgttgttattattctcttgatactccttttgacacgatcaccagtgaacaaggcaggacgaacatgctcaacatcagtacaatgctgccgcgactaagcaagaggagtacgaagaatacggcgtagacgtacgatggcccatttgtttccctcgagctcaaacttggcaggcttcttgcccgccaacgacggaggcttagtcggccgggtcggtcgcttgggagcggctgtgttttcagcgagccggacacaagaatgctctcggtcagcgtttggtcttgttctctcgcgccatcgatgacacggtaggaagatacacgcttaccatcggtagcagggacaacgctactagcccttaactctgggttcttgtgcgtcatctcactcttatcaaccttcttaagtcctttggtgacatccccagagagctcggcaaaaagccctttggaaggaccgctcgcagggctcggggtcgaagttgtgccgacaggagcaggagaagaggaagcagcagatgaaatcggggtgggtgcagagggggagaaagagagaggatctttgccctgtaatcaaattcgaaacggcgattgataaggccaccatattctccttgaatagcaacatgtcgaacgccacataccttagggttccatgcaagtccggtggtgtggtactgcatgatgtactttcgaagttcctctaaagcgttgatgaaacttctgacccactcgacctgggtcttgtcactaaatagttaaatgaacacgtgtgccaacagttgagaacgaccaagtgagcaactgcaatcggcttgtccaaaatagtcaagatgtcacaagaagggagcgaacgattctttgtattctttgatcacacggtttccatagaaattggcggcatcctttaggtccccaacatacggtcccggcttgttatcctgtttgaacaaatgctcgtgcttagcaacttgctttatgatttatgggtagaataataccccataggtttgatgtacagcaagaacaactgaccagagtgatccagccagcagaggggattccctcagcgacggtgctaagatgattgaattgtggacttcctctattggcgtctttgatatcaccaacagaggtgagatgggtgaccatgggtcctaacagactgggcagcttgtcctgactgggcttcgtgcattgggaggcaagctcgatgaagtctcgctgagccttgaagagcaaagctacggtcttggactgtagaaatgaggtttcacaggatgtcaattcagttgtcgcaacgaagacgatatggcttgaatgactgtatgaatgaacaagatggagagaagaaatacgaacctgctcgaatgcgacatctccgatggtctcactcagcttcaagtagggctgtagatgatcatcaaaccatacatcaaacgcctttacgacaggggaatcttcagaggtgatcgtgggacccaaagaaggagcaggtgtaggcgcagaaggtgcgatcgaaggctcttgagccacgcgagccccgacgctgtctgccgcgtcaggcgagggctgtcggaggttggctgaggaggccctatagagataattcgggaatgtccaaggtttcaatcagagaaagagactaagctgttaggattcgaaggatcgaatggatatgattgagcaagcaaagaaaggaaagacggacgaggcgatggcgaggtcttccagtcgagaagtcgctgcttcgagtcgcttgatgatggtggtgagtgcgctgtctgaatcaaacaaacacaaacgaggtcagggccttgatagctaatatgtttccctccagaggcaaatgaagatgacatactctgtacgccggccatgatgaacgatacaagctaggtcgaatggacgagatgggtgagatgtggaaagtagtgagatggtggctggagggattgagaaacaagagctgcccaaaaaaaacccttcaaaaatcggattatctttttctcgctcgggcagatgcaaacgacaacattcaggcttcaaataacattcctctgaaaccgttgtgttctaattctttgtctgtaaatacaatatcatctatcgttcataaggaagtttatattgttcacttttctctcaacctttttcttcctcctgcgtcacctttcctaccccaccagctagcgcccgtatccggttcgacccagcctatcttcagcttgtctctctgatagcctcttccttcttgatccagctcaagatcccaattgatgttgtatccgtatgcgtaacctctgcatttcccacccaagtcttccgaaggacaaaagaacattggctgcggccgttcctgttgtgggtttgatggtctgattgacgcttccgacttgacacctgccggaagcctcttccgctgtttgcgccgtttcttgagaggagcttcagagttgagtgaattgagaggtacagcttggtattgggcgcagggtaggtgaccgcctgggcctcgctcgggcaagtcgggaggtggaaaatgacgggtgcgcgggttcgtccccggacgaggtgttgttgtgagaagcagagttggtgtagaagatgaggatgaggatgtcgatggtggtggaggtgccgttcctgttgaaggggagttgggaatgtagtatgttggaataggacgggatggaacgaatggggcaagggtagcttgggagaggacccattcggatgagaccgcagcagaggacgctcgactcttgagtagagctaagtcttgttctgtgagtggtttatcatgaggattgctgataaaataaaataaaaccaagcagagtatgcgtataggcttctgtgttagcaccatggtgtgtatgatgtaatgaggcacggacagaacctacgggactttgaagtgtatctcaggagggcgaagcgcgatgggctttacttccgaggctgtaagccggaaatctaagagagaatgaacagatccgaaagagattagcatgtctgtctatgtgttgactgaactcggacaaacgggacgaaccatagacctcgttcgaattgtcgtctttgctttctgctctttttcgcttgccctttgtcttttcagacaccggattctgatcggcatgggatgatccaaaggaagtcaagatgtggtcgagcatagctttcagcatgctctccccttcctggtctcgcacgaaaggttcctcgtcctcatcctcgtcctcgtcaccgtcactgtcaccgtccttgctctcttcatgctgtggctttgatgctacggtctcgtccgacggaggctgagccagagcatggtgcggattatgatacagaggataaatagatctacgtttccacaacccaaacccggtcagccctcaagtcctactgcaaccgaccacactgtactcacctccacactgagctcatcatgatgaacgacgaacgcggctgatgctcatcaacgacatgctggatgattctctctatagggaagaaaggcagaaggacggtaaccatggcaccggctgatatttgaatatccttaactaaacccacacttagacaacattgggcatgtaaaattctctccccttttccgcccaaagagattttttttcctctcactcttttcaccccccaaaagtccaacagctttcatctacacacacagctacccgtagcgatcaaccaaagctaccatgtccaaccaggtccgctcagtgaacctcttcgatttgctcggaggtgtgttcttggttctttttctttgaattttttttcgtcgtcttcggatggcctcttttttttttctttccttctgccctaggggtttggtgttggagggtgatcacgaatgttagaagcaaaagaagagcatgatggacatcgtgtactcgaacagggaggaattcacaacagcattcaacacagataccttgctcaggtagtggcaatggatgagatggagaacaatgtactgatcgcacgactatccttttttttactcttccaccctcatgatcatgcatctttttttttctctgccaactcttcgactcatcttttaaatctggtctcgacaacaaaaactctttgttcggaacaccacgattcctttctggttcccatctctttcctgctctcctctgtcttgtctacataccaacggaatagaggatgatgatggacaaggagtccttcccacccccaagcccaaggc

SEQ ID NO: 1953 - DNA, 1303 bp, Xanthophyllomyces dendrorhous
tgaggagcctggatcttccaccggcgagaaggtcgacagtacgtttttttctctcttatccgtctacgcccaaaaccgacggaaagatctacacatgtgcattcagctgacggctacgttatttcctcttcatcagaccgacctggccgaggacctccccgaggtgaccgaaacggtcgaggtggcaagcgaaccggaaacggtgccgccgcccacggaggattcgacaggaagtccggaggacacgtcgactcccacaagaaggtcgagcagggttggggacacgaggacggttcgtagagaccttctcaagtgtcgacatctttttgtctctgtggctcattcgatatctcggtaatgattcttttaggtgccgccgagctcgctgatgagacccagggtgccactgacgccaaggctgatgctaaggctgccgtgaaggaggatgccactccccttgttgagggtgaggagcccaagaaggagcaggctcccaagaaggtccaggaggaagaggaggacgacaacactcaggtgggtcatggtcctctcatatcttctctccagaatatgtgaagatcacaagaaggagattttgtcggctgaaacaacccatctgtctattttctgcttcctcttcaactctcagacctacgctgagtacctcgccgccaaggcctctgccgctatcggtggtgttaccgagctcgctaagcgagtcgtcggtgactgggagggaggaggagaggtcgtcaagaaggatgccgacgaggctttcttcgccgccaaggtatgtttccttgtccatttttcgaaaagacgacaccaactgtgctgaccttcatcgcttcatcgaacttttcttccacaggagaaggagcgaaaggccgccaaggcccgaaaggagaagaacaccgtaggttccgtcgttgttctacaatactgaatgtatgtgttgattctgacaccacatctcccctgatcctgtccgacccattcgtagatcgccatcgatggacagttcgcctctaccgagcgacccgcccgaggtggtcgaggaggagcccgaggtggtgactcccgaggccgaggtggcttcgagcgacgagagggaggtgccccccgacgaggtggtgaccgagctccccgaggtggtgcccgaggaggacgagctcctgctcaggcccgacctgccgctcctgccgtcaacttggacgacaagaccgctttccctgctcttgcttaaatgcatcaattttcttcttaaacaacattttccttctcgccttctcccccccccccc

SEQ ID NO: 1954 - DNA, 21667 bp, Xanthophyllomyces dendrorhous
ccccccccccccacaaaactctcgtccttccttctttccttgcccttttctcttttcgttcttttatgctgtatctgatcttcgattgctcagtctctcccgttgacgactattccttcctacccaattgcaattcgatttgatatattcatctctttgaaccaccccaatttctgtttgaaaccacctaaatctccattctctcccagccttccttcccttcccctccccacacaagcaaacctcggcacgtattctcattctcgagttcggctttggtcttgttatatgaagaacacaaaggaccgtttttctttcctgttcatcagttcattctgaatttgaacctgaaccccgggacacgcacacttatgaatgtagagcaaacatgaccgcaagacctgatctgtaatgaaacaaggcgcatatacccaacaaaaacacgcatataccttatcgataggatgcatatacccatggctgagagtgtgtgtgtgagcgagcgagagagacagtgaggaaagaagaacaccgagtgtgacgagtgaagcgtctctgtaaccttccccggtctgttcagactcattcgccttttttcccttcaagtcccacacagatcgagcgaactttcgccatctctttctttctcaccctccttcctctcctctctctcgtcgtattctctctctctatctctttctacatactctttccggtcgtgcatggggctcccagtttcctatgtcaacctctagaacgacggactcatctattcccgctcgtacaactcgctctcaaacaaggaggtcttctttgtccaacaccaacaacgctagtaacataaacagttctcatctcgagtccgcaccctccactcctgcttccaattctaccttcaccactatcaataccgaacctacctcaagctcctcagtcaggtcgacagctagtcagaaacgttccagaaaacaggtcgaacaagaagatcaagctatcgcgaccaccgatctttcgtcgtccagcgctctctctatcggcaaatcgtccgtagaaaagggcaagaagaaggtatcgaccgtttcgtctgaaggctttcctgaatcaaaaaggttcgttctgttccctccttagagatgtctcggtctcttgaggatgaaaagtatgatgagatagacctctttgggtcgtctgtcgtgttcattcgactgaccctctcttttgctatgtggtctcaacacctggtccctcgacgttatgcatctctttctttctctctctgtcgacccggacatagacctcgacgctctacagcttctctccagaaccgtgccactacctcgacctccgcttctgattctactcccgacctcaaaggtaaaagtcgatcttcaacctcttcgtcttctcagaaagctataccctcacctcgaacattcagtctcactcgtaaacgatcccttcaatccgcttcagcccgtacttcttcttcttcatcatcatccaaacagactaaatccaaaggaaagaaaatggctcgaaagcctaggtacgtctcacggttttgtctccttccttctaagcagacaatgagttccacacaaccgagccgttcatacgaggcgcctgcatcccgagtctagttcttggtcgtgtgcttatcagattgatcctcccttcctctcctcgtcaggtcgtcggcaggcaaagtcggtcaaaagtcatccaaagggttcggcagcgccagtggtgagcggatctagaaactaattctgtccatcgcgcatacactcatccactgatgccaatctttctttgggtcttcctctacctcggatcaaggctctcgaaaaggtcatcacaatgatatcgaaatggacgacgatcacgacgagtccgagcaagtaatttccgagaatgatgaagacgaggatgaagacgaagatgaagatgaggatagggaagaagatgatgacgaggaggaggatgaagaggaggaagagtccacggacgcaggcactactgctatcaacaccaaagctggttctcgagccaccggcccttcattatctaaccagcctgctggctctaactctcaggcagagtcttcaaggtctgctgctcaatcgatggcagacgccatggcagccgccatgtacggtggagggttcggaggtcttggtggcggtggcctgtttggcggtggcggaggtggatatgcatccgggttgaccactcgactcaaatcaatccttggatccatcaggtcaaaaagtatgatcgtcaagctagccgctcttcaagaggcttccgaggtgttgagtgtgagtacagaggacaccctggcaggatactttcaaacagatgccttcgtcaaggaatttgtcgccatcatggcaggtaaagaatctccggcgagttcgccgaaatcgaaatcaaagttgtcgcaggattcaaagtcttctggtgcccgagctggggaacagaaggaaggatctaccacccatagagatgacgacgaagaccaagacgatgtcgaggaagaggaagaggaagaggaagaagatgaggatggagatgacgatatagatgaagtcgatcatgacgaggaggacggagaagatgaagatgatgacggagctggatatggtatcgagatggatgaagactccgaagacgcccaacttgcccggattcttgccttgagtgctcaagaggcttttggtgaggcaggagcgagcaatggtgccaacaactcgggcgccgactccggtgctggtgccgtttcaaatgggggagctttctcggctgctgaaatgggccaaggcgaaccgacggcggatcagttggaggctcagctgctcgcttgtagatgtctggctaacctgatggaggctttgcctggatcggctcacacggtggtctaccacggagcggtccctgtgttgtgctcgaaactattagatattcagtcgatcgatcttgcggagcaaaccatgagtgtgagtactttcgtatctgtttcttcttattttggccatgctttcctatgggttgtatcttatcctaattctttttttcctgctctttaccaaaaacgaacaaacaaacaaacaaacaaacaaacagacgatggaaaagatttcgcaagagtacccctcggctatcgttcgtgaaggaggtcttggtgctcttcttagtttcctcgactttttctccacgcacgtccaacgggtagccgtcacagctgccgccaactgttgtcgaaacatctcgcaagatcatttcaatatggtccgggacatcttccccatgctccgtagcgtccttggttacccggaccaacgtcttgttgaacaggccgccctcgccgttgttcgaagtgtcgagagcttccgtcacaaggccgagagcctggagaccctgctcgacttggaaactatccgtgcactcaacaggctcctcggtcccactgggggatcttccctcttgtctccagggacatacactcatctcttgagagcactctcgacagcggccagaacgtcacccaaggtgaccgtcgctttcctcgaagctggcatggccgagacgctctatcaaatcttcactggtatccttccgggctcgcatgacgaagaggagcaagggaacggaccgagtgggcagggcgtcggtggaggtttagcagacatggttgtcctgcaggctttggctcatcggccgaaggatcaggttgaggaagccttggggttggtttgtgagctcctaccaccgcttcctaaaggtaagtcatcattttccaaacacaacctatcaagcacatcttaatcaaacgttctctgatgatctcttcgttcaccgtatcttcacagatggggtcttcgatcacaagccgtacactgagagagcacttgctcgacttcttcggagtcaagcaaaggaggctagagcagctcgagcggctgctagacaatcacaagccacttcgtcggagaatctgctcgagtctcctgcgacatcaagtccctccaagaccatgccttttgcggctgatgacgctgccgatgctctcaccggtgacgctgatgccactgagacagccacccctatcgagacgccttctgggggaacggacgaccttgctttaccagccattcgggcaaagactaaagaactcgctcaggcgaacgaagctcgagtaaagttgctaaaatcccggtcggatctaacaacccggttcgtaaatgttattgtgccagtgctagttgatgtgtatgctgcgtcggtcgctcttcgtgtgaggagtaaggtcttggtggcgctgctcaagactgtgagccatatgacacctgaggagttaacagctttattaaaggtttgttcagtgatttcttatagacatatctctttgcttgggatcgccactctctatcacataaatacatctgactgtctggtaattttctggggcaatattctcagtttgtccctctggctagtttcctcggatctatcatgtcctctcgagacaatcctactcttattcagggtgcgcttcaactcatcgagatcctgctcacaaagcttcctcaagtctaccgatcttctttccggcgagagggtgtgctctatgaggtcgagacattagccggtgaagaattaacgaccgcgaaggctgcagctacagccatcaaattagagcaggatgattcactctccgtacctaaaacaaccccctcgacaccctcagccaccccggttgctacggctgcttctcgtagcgcttcttctctcttcacgcccaccatccctagtggttctatcatctcatcttctatcaagcctcccacaccagttgatcttcaggatcttaacatccttcgtgctcgggtattgaaagccaagacgaccaccgccggccctagcgagaaagcaggcgaggatgaagcggatcgagagctagagaagatgaagtcgctggtagagacaattgtggacgaggacgcaggggtgacggtcttgaaggagacgatctctgagctagctcggttgtttggatctgacaacagctctgtctcaagcttcgagctgctcaagagtggactagtagacggtctgttagagtgcgcaatcattgacggaaaaggtatgttctaagtctcttttgtcgagctcggatgaatatcggatacgcttggctaacccattgataatgtctacctgttttagcctcggcaaaagttcgccgaagcctactcttcgaaatattcgctaaagaggacccaaaaacttctgtttcacctttgactattttggtcaaacgtttgcaggaaagtctgagcaagatggagtcattcgaagttactaccgctgtccagggatcggcagcagatggtgagttatcttcgtactttcacatctgaagaacgcatacttaatcaattggttcgttgtcgtgtgattctccagattccaggcgaggatcgactgcgcttctcgcgcgacagattcgattgaaacttgtcgcagaggacaccaccgacgttcccaagcctcactctgtcatggttgtttccattcaggccattgcaactttccaggctctcaatgattatcttcgtccaagactatcagcgccggccaatagaggtggcccaggtgggcttggaagtgggctttctgctatgtacgcagcctacgcagccgctgccggtctgtcaggtgaccaaacatcaggtcgaggacttgctgcttcaaattccgacaacccgtttgcggccggtgcgcttcgatccactttggcttcttcaacagccccgaccagttctgaaagcttctccgctcccactgccggctcggcgtcatcttcgaccaagcctgataaagattctgaagagactgacaagcccagacggcgaagtgcccgattgagtggacgagctccggacgaggaaacttcggtttctactcctacccctaacccagcttcaacatctacccccgcaaatggatcgaactcagccagggctaggtttgatcggttactcagagaatcggctcgagagctgatcgcctctggagatcttccatcggcgcttgaagccgccttgcaaagcccagatatggactacggagatgatttcgatgatgagggtatgtattcagacgaggattttgatgacgaagatgtaagtcatgaaattttatcattctgttctttgccacagctcacttgcgcgcggtggtagcttacttcggggttccctgtcttcttctgttcttgttaaaactagatgtttgatggtgatttggaggatgctcttcctcaagtggctgacaaggctgttgatctgaatgttgtcgctagtaagtggtagatgatcctcattgtctatggggtttctatcttgaccaaaatcccgtttcttcatttgtcacagacggctccaaaattgaggccaagactcccgatggcacccgtgttgcaacgcccactaatcatgattctggttccagtacgtcgactggcgcaacttcttccgtcacccgtccccctgcctccggtgggccaggaagctcgtacgcctctgcattaaaggcaaagcctaccgattggcatctcgagttttcgatggatggcaaccccatcaatctcgatgccaccatctacggtgctgtcctcaaaaacgaaacaaagaacggcgtccagaatggtcttcagaaaggaatctggtctggagtgtatatggtcaacttcaaacgggtgccaggtgccgcacccgtcgaaggtgagttctatcttgtaggttatctcttcatcccttcttgaacttccattctgactgtgttttttctctcaacgttcagatcgagattcctcacctgagccctcgaccaaggagccttcttctgctacagccgttcccaactctgttccttcagattcaccccaagccaagattcttcgacttttgcgagttttgcacgccttgagtacggaagctaaggaactatcagcatctatctcgacatccaaaactttatctgaaacggcgtttgtcaataacaaactgaccgcgaagcttgggcgacaacttgaggagcctatgatcttagctaggttagcgcatatttagactggtttctgtgttattagcttcacgactcaaagcttacttcgagcgactttggaattggattagttcttgccttcctgattgggcgttggatttgcctcgcttcttccccttcctctttccgttcgaaactcgattcaccttcctacactcaacctcctttggttacgctcgtctcattcagaagtggcagagtcagcaatctcgtcagaacgatagccgagccgatgactcttacggcttcctagctcgcttgccgagacagaaagttcgaatctcgagaagccatcttctggagtctgccatcaaagtgtttgagctttacggcaagccaagttcaattctagaggttgagtactttgaggaagttggaacgggtttgggtcctacattggaattctacgccttggcgtcgaaagagtttggacgacgggatctcaagatgtggagagatgcagacgcagaccttccaggagatttcgttcatcgaccgcagggtcttttccctaggccttacgctgccgatgaggcgagtaagactgatgtttacaagaaatcgtacgtttctcttagttttccttctgtggctgataggaatctgaccctattcgggatttgtttataggcggtcacaaactcaacttttccgggtgttgggacaatttgttgccaaagctttgcttgactcccgaataattgatatgtcgttcaacacgatcttcctcaagtatgttctcggtcaagaagttgtgccttcaatcgaaatcctcaaggctgtcgatcgacgtttagggatgtctctgaacaaagttcaagagtttgccaacgccaaggccatgctagtcgacgaagacctatcagaaatcaagttagccgatggatcacggttgagtgacttctgtttggacttcactctcccgggatatgatatcgagctcaaggagggtggggggaacatagcggttgatatggataatgtcgaagagtacatagaaaaagttctagatctcacccttgtctctggaatcaaaactcaagtcaacgctttccgagagggattctctgctatcttccctgttcgcgatttacaagcgttttcggcagatgaagtatgttatgtcttatatcttttagtgagcgctgctgccgattgtctcggattgaccttcctttcctttcctttcctagcttggcatacttttcggaagcgcggaggaagattggagtgtcgaaagtaagggtttctcttctcgttcatccgttgatggtgaaagcctttatagagatcctgaaaactcatctttgcttttattgatagctcttacggaggttatgaaagccgatcacgggttcaacattgaatctcgaacgatatctaacttaaccgaggttatgtctcaatacgatgctcctactagacgagaatttttgcagttcgtgaccggtgctcccaagttgcctattggtggtacgtatgtatctctcgacttgttcccttagcgaccaaactgacatctggctttgaacatcttcatgtatctccataggcttccgtgggttgaaccctcctctgacggtcgttcgtaaaggccatgaacctcctcttaaggcggatgactaccttccatcggtgatgacctgcgttaacgtgaggactagcaatctggttttgatttcatctgtcgtctcccggatttagactaaatcttgctttgtgtctgccttaccgtgatgattcagtatctgaaactgcctgattattctaccaaggagatccttcaagagaagctattcacggccatgagagaaggagggggcagtttccatctttcttaaacaatctgattctctcattcttatatctctctgccatcctctactatcgtcttgaaactatatatctgctctgcagccccatctgtatcgaatcgcttcttttttctctcctcttctcttctctattttccttctatcattccgtactcctccccgccattgaatacagctgtatggtgtctctgtcatgactgttatgcgtttgatgtatcccagagcctcgaaagaatccaagaattgcgcctaggataagatagccgaaagatgaacgtcgtccgtaaacggatgtgtcacgactggccgtgtctttccattccatctttgattgcccctcctactcgatctcaccccatccgacttcaacgacatcgcatacacccatccagattacttgtcctcaatcacttcatactccccaaagctatcagccctgcatcatcttggtttgagcacgacgatccaatctcgccaagggtcaatccgtccttatgtacacctatcatcgtacgcatgattactccttttataccgtcgccaccagagatctcgaccggtctcggtctatactacatgatatggcccttgatagctgatttggtattctgcatggttgttgtgggaaatattgtctctttgttaagaatcatatggtcagatcaccatactcgtagaacttcctccgggaactaggtcaagagatgttcaggtcgatctgacatcgaacaccatccgggcaggagtccaaggttttcctgctctgatcaaagtgcgtatgaagaaacagttgctcttggctttgttcatttctcaaaacctttcaaagatctttctcatattaactctttgttccttgggtcatctgatcaaacaagggacgactggtggcaccgattcgaacagaaatgtcagagtggtttctagaaggccgatcaggcagccgaaagcagcgaaggaggatgacttctggccctccatcgaacaatagtagtagctcagaggactccgttcaggcaaaggtatccaaagtatcaagagggcctgtgacggaatttttggataaggaagatctgaagaggacattgtcccctctatcggtaagtctatgtcttgggtcagagcatgatgttttagtatttctcagaggactgatgcttttgatcatatcgatcgaaatctttctttgtgtatctgcttgcagtctcattccgcttcatcgttcgatctcttctcagcggcatcccagccttcatctcaacagcaaaggtccggcccggttcatcttgatagaccgggagcgagccgatcgtcttcacaaggatcttcagatgaaatttggacaacccatgagcgacaaccctcagcttcaaacatagcgagtgatgagggcgaattgattgatcacccgctcgcctcttccgtcggctctatctcgggcttctccgatccttcctcggacgactttgtcagaacagacccagcgttattaaatccccatggctctcaatcgatagcgccttcgtccgctaacgtcacaccgtcgagattcaatgactttcctgcgctatcctcttttaccagatcctccggtcaacaaccctcctccacccttcctctatctgcgcgttcgactgaatcgtcagagtcctctgcgtccccctcgtcagcctcttcaacaggaagcggtccaggcgtcttgtcgaatgatggagatcttactccggatgcgaatgagcctcagtcaaggctattgacgatccatttgatcaaagccgagggagctatatgggcagggttagtcattgtagggcctgtgggagatgggaaggatgagggtgggacatgggccatggactggacaagtctggtggcgcttgctgtggagtggagtggaaccgatgataagagggatgaagcgttcgaaatgctattgttcgttcctttctgttcaatcccagtcaaacctttcaatgacaagtccaatttatggcctattatgatgcaaaactctgaccatccggtttatgtatatggctggatgtgcctcaaccagatacgcgcatcgagcaagccaccttcctctggcgacgttccatcttttgcagattttctttcctctcccccagctgtctcagacgacgtcgtctatttctactctacggcctcagccgataaatcctattcacctacttcgtctaggcggtacccagacgctcgctaaattgtacgtcattcaagcagaacgttatctgtccaaaacgaaccctcccgatccgttgccccatcagcggtatccactcgatcgtcccaaacgagactttacatcttcccttatgggcgaagcgagcagcgcggagagtaaggctggacttgccaagagattcatccgtgtagcgagggatcttgaccctgaggtcgagctgacatccgaactggaaggcttcggcgaggaagctctcagggaccatcgaggtggggaagcagaagaatggagcagcggtgcaagcggaagcgaagagggtaggaacagaaggaggcgaagacggggagccgcaggaagaggccatgctgaagggagaggaggcaccaagtcagacaatggggtcggcgtcggcgtgtacgtttttggaggtgcgaccctcgtgttggtcgttgctgtcggaatcagctggtggaagaaacccaaagctgattaagctagccagctgtcgactttgacagcaggagtttgacatttctcttattcactctacttctttccccctcgatacaccttcttgcgattcctgtcattttcaagatcgtccggacaatcttggggggttttactttgtataagctagcccttgtactgtttaccaactttgcctacgacctcgtcttttctctcattcgatctgtctatcactgttgttttccttaaatttcacttctctctgttatatcaactcgttcattctctcttctttctctcatcttttgttcgtcggtggtttcatctcgtttacatatccttatcaaccgatctgtaactcatcctcgggggtttatcatctctttcacttgtttttcttccaatactattttgtgcctacattcgatttgacctcatgaccaatcatgcctaatgcgagaaagaagtcgagaaaaaagcgcacacgagaacccaatcttctcggaaagttcacaaattggcgacatgatccatggtataagacgaacgcacgaaggacgagagtatatcaaaccgacgggctcagtacctcggtcgcttctcatctctacctccgtacccgccgggtcctccgctatcgtactctcttttgtatcctccatccgaaggaggggcacctccaccaccgaatccagggttggaatatccaaggcctccaccacttcctcctcggctgttttacgtgttggtttggtttccgagcgatgagcgatgagcagaacgaacggacaagggaaaagtgatttaataatgagaagaaaaagggaaagggaataggggataacaagtgagttttccttttctcttcttcggatgctcagtgcttacgatgggtttgagcaaaacagagaagaaatcgaagtatcgaagcaaaacaggggggagtgaaggaacagaaagggagaataggatatgaggggaagaaatacttcgcctagtattttgttttgttctctcgataagggcgtgataccggtcaggtagaaggaaataaagaagatgattgagagggcacatagccggaggacaaggccgaaaggaacagcgtgaggccttccggcttcgcatctcccaacaacaagagccccaactttgattgatctccccgactcgtgaaagagatgatagggagaacaggaggggcctcgcgcccagatattggggtttttcttgcggatttgcttcggttctctcgtgtcatagacaggtttcgattcgtagtatcttggcgaggaccttcccctacgcgtgtggatggtaggggtgatttggttttacctttttcccgggaataggaaaagcctcttacctctccataggcttcaaaaagaggatagcgatattgtggatagaaagagagggaaaataggaagaaaagcgaaaagagcggaaagagaaatacttaccttcctccaccatagccacctcggccggctcgatcgccatagccactatctccacctcgaggttggaagccacctcctccgtagccacctcgatcgccgcctcctccagagaaaccacctcggaagccacctcctgcaaatgtcaagaatacactaaagtcagttcgtgatacttatttgagggaaagaaagaacgttcttgcaggtgcaaagaagatgaccaaccagatcctcctcctcggaaacccccacctgagccacccatgccgcctctgaagccgccaccagcaccaccaccgcccattccgccgcggaatccacctcggaagccgccccttggcgcaccgaagcctccgcctggtggacctccactgaatccgccgccaacagagtgatcgacaggcttgggcttcccgccgagaccaccacctattcgagctggcttccaacccttcacggtccgtcctcgctcgacgtccactcgaatgttctttccttggatagggatgttctcggcgtccttataggcagctatgaaaaggaggtggcattcagatcaagaaggtaagttagagagaagctccttagcaaaggacaaggtaatatgagagggaaaagagcaaagcaagaaccgacctttcatgtctcgttctcgctcgtacacaacgaacgcgtatcctctgctagtgccctttttggatcgaacgattcgaacacgctcaatagctccgtacatttcgaattctcttcggacgtcaacctcggtggcttttttggactacagaggccaattgggtatcgcgaacacgaacatgtcagtgaagtaaagatacgtatggaaattagatgtcaagatctcaccagacgtgagatgaacaaggttttgtaaggatcgccgacagcttcagaatcatcttgaggatggtctgtatttaaataaatacgcacgatgaattagtatgccgactgacgaaaacggacgagaacaactcttgaaaatacaaaggaagagaaaagaagaacagccttacaagaactctctgcgttcttcttccactcttctttttgcttaagcttctcttccctcttgagctttcgcttctcctcctcgcaaagggtaaaggcttccttctttttcttgacaggcttctgtcctccgttcaacgcgtcctccacgtcctgttcttcgtcttcatcctcatcctttccggtctcgagccgctgctgctctttcttcgcttcctcggcctttagctcggaaaagatggcaccgacaccggtgagggtgtgagatctgacgacattaggatccggaccgacacctttgatgtaagggattggtggacggggggcaaatagcttgagaagatttgggggaagaagggccgtcatggatgtatgtatgtggactagagtgatggatgcaagcagcagagcaagcgaagaggaatagcagtggtgagtgaatggtgggtgtgtggcgggctgaagagggtgagaaaaagctgtgtaatacaaaatgtatctaatgatttccgaaagtgaatagaagatatttgtagtatcttatagattacaaacccttgtattcgacgtactacaaagttgtctaatggtttcgtgtggagctcttcctagtgggcccattacaagagtttgtagtcatcgtccgagaaatctgtaataccaacaatcgagaacatccattaggaatctttgtagtccgcctattagagaaaccttctagatccggccagacacccaacccggccagacagctcgcgctcacatcagcgaacaccacagaattgacacctcacagctgacacaccaacaaaggtctctgtccttacacatcctttagcgtcgattgatcacatctctactcatcctatcattctcttttgctccttcatacgcatcattgtcgacagctcttcgtctctggcagctaatctcaggccatgtccacgccaatctcgatcatcggcctcaatccactcacacttcatgcggtatccactttgtacttttcccagccttcagtcggcccctctatcatcaggccggtccttcaagtgctctttctatctgatccatctttccacccagctgttccctcatcgaatgagccatctcatcttccagtcattaagttagtttcttctctctccctttcttctcgttcactcggcctgccgcggcatttgtgggctactagatagaagcggctatatgcgcacgtctgtcttgctttactgaatctcctcttccttcttcctcagttttctactctctgatagctttcaatatatgaagaccactctagatcgagcatccgttccgttatcatcatcattatcctgtgccctgacagctctcgaggaaaacacgatcgtcaaactgaacggctatcgtgttgagacccaagcggacggtcaaaagtcagtcacccccttattcgccggttctgttcctcgtttcccatgcagacactttactcgcagtgactgagttctctcttgttctctttcagatgtatcatcttatcttctctcgaagttctctctacaagctctcctaagattggtcatccactcccggtcgatgccgtctcccacccgacagccgtcacaaatactttatcgtcttcgcagcgcactgctgacatcagccattatcattctcgatacgcattcgggaatctttccttcccttccatagcatcctcgtcatcctctatgatgcatccttctgttcctccatcgcttgcatccgataggtttgtggattctcgactgtacactcatcaacccgacgttctacccttgtctgtcaaatatcgtcccgaggctgcttcatcttcggtccaaccttcccaacatacggccctgctcattcctcgattaccgcttgaacttcaaatgatgatcatctcggaatgtgttgagtcttaccgactggacgacaagctgacaaaagcaaccgtcgcgcgaagctgccctgaacgagagcgaaatgaaccatcattagcggaaaaatcgaatgtactcagaccgagcggaaaccagtggtattctgttggcacgagcagcacttcaaaattgagttcaaaaccattggcgccaggctctaaaccaagatggttactgcccatgttgctcaaaacaagatctgaggctagagagtttggcgagttcgatgaaagccctgagcccatcgagttctggaactcatgggagccgaatagattcaaaagggtggcagagccgagtccggaagaagtactcgcccgacgacaggaagaattaagaagtagaacccggtgggccctatccctggtttgcaagacggtcagtaccctacgcgccagatcaagtgtcgtaacttcattgttgttgctcaacaaagcatatgatttgtctttcttaagtggcacgagatcgccactccgttgttgtatcggcacattcatgtgacctctctacaggcctatgcacttcttggccctgttctgtcttctccgacccgtggtcccgccctggtttcctggatcaagcgggccgtgcttcgagaagtaccggctgactggaggaacccggagtccgtggtcggtctcgttctcgacaatctgaaggatctggaggtgctcaaaatccggttcgttagctcggagagtgcgatgtcaactgaagaaatcattgggggtagaggcatgctcatgctgggcaaggccgtctgggaagcatatccaaaactgaatccgaaagtgtgagtctcctgagatagctgtgactccttccatactctgccgaattctgttccttgtctgatcatttggtgtatgctcttgattgatggatgaatcagctatcaccaacatcatttgccgacatttattttgcctacagtttccaaagcatggcctcgtttacggtcgacatcgtccgagttcatgttttgcttgactcatcctagtcgggcgatgagcaagtttcctaatcttcctctaaagtcacatcgttcgtgcctttctttgtttattcgattgcatgtatccaaaggttcttttcaacatctaacgttgctcttctttttctctggaaaacctactggacattagacctcaccgtcatcgtcgcgggcgacccttcgagattgtaccgtcttcctcgacttttgctccgtatgacggcgaatccgcacctaaagtcatttgcaatcaccgtccggtgcgcgtctcatgggatggccgacctagtagaacttttactgggaagggaaccgacgttgaggtcgaaatcctcaatggacgtttgctggcacgaaaacaaccagtgggtcagtcggaagatcgagtcgagccccctagttctgagcggccggcaggataggcgcagggatagggacagcgcaaacggaatggtcgacgaaccggaagatgaggtcgatcacgaggacgaagaggagggagaggaggaagagcagggcgaagagagttcgttggatgtgagtgatcttacgatgaaccagggcgaaacggagcaaggtcagttggaagtcaaagaggaggaagtatagagtgtgtccatacacaccgatctagccgtctttcatcttctgttcttgttttctttttcttcttctcttctcttttcttttcttctcttgcttttcttcttgatctttgtgcgatctgggttacgcgtctacatatttaatctcgagaaacatttccttccttttcttttcccctcaagtcgatctccaatgtagccatctactcatatatatatatattcgtcttcctgttgtgtatctaacattatgcgctttgtcttcgtccttttcaaacacatcgttttctccgctatctgctacctttctgtctggtcgtctgtctattgttctgcagagtccttcatctttcttgaacgctatgagctatatatccctcctgatacctaattttcgagtaatacatatatggccacattcacaactatagctcacaagccatcaagttctatttgaagagccattttgggatttccacacgccgctgatgacgtgctcgacttcaatcaattcaagcctctcatgataatcatcgttatcaccaccgttgtcgtttgtggtgggaagagtgggaatcagtgcggtggtaaggacgacgcctgaaggggtctgttgaggcggtacgatgggcaactggatttcacggaacatcatctcggacagaggcggaaagatgcgggataccgatccgtggacactcaatatcttgatggccagttcggatcgagactgatttgaagaagaaagatcaaatgggggagggaggtcgaaagagagatcagagaatggaagagaggcaccaagcccgatgagtttcgagagggattctttgtacatccatagtcggactaggtagattctttcctcctcttctctttttccgggctgttctgaagatttattagcaaggagcgagatggtagttctttcggaaggagaaagctttttgagggagtagaagagagtgaatagagatgagtcgacaagcaagaattagagagaagtctaggtggacatatggataaacagaatcaagcgaacctgatcgtagagagcttctctcagatcaaaagtactctctatcccgtctggtagatccaacgacatgacgtccactcctacttttcctccaaaggtaaaggcaccgatgacccatggtccgtcgtgagagatgttatagtcaaatggggaatcggtcgacggggttgccttgtgtttcagacaggatatgcatgcgcgcaaatcaccggaacgtcggagataacaaagaatgggaagaagaaagaatatcagacttgattatcttgtactttcaccatatcaagacatcaaggaatgactatgataagagagaactcgctatgtacggacgaccatgagatcccaacttgaactcgactggtgtcttgacaggaatcgtatgctgcaagacgtatataggaagtaacctgccgacaagtgatcctggatgaaggaaccgagccgagccacaggtcagtcattgcgaaaacaggcctcccgttttcaaggagcgagcgatgaatagtggattcactcagcgcgtctgatctgtggcggaaacgcttgatcctaacagccgaaggttcatccacgaagtccaacagttgattgaatgtctgtgtttgtattgttttaattgttgtcgtatatgtgttggggtatttcgttatcatttcgggttcaatcatcagatcgattcgttatcagacagtataaaaccccagagcaatgcattgaaatcaataaacgaaatacatttataggcaacactcaaaaaatattgcgttagtcatgagaaaacgaatcgtcacctcttgagaaggatcccatctagagacatcgacagcgattagtctaagcggccgagtgagcatcgcttgtcagagaacaggttagtggacagtctgctcaacgagtatgacctcggacggatggtgagtgagggtctgtaggacgaacaagcaggatattgactacgagtgaatttcaatgaatttcgaacaatctatataaatttacatgaatttcaaagcccagtccaaacacaccctgcccaaacaccttctccctctcgccttcgtcccttttgacgtgagcgagtcgacacttgtgctgttttgttcttccttccttccatcagctcgatcctttctttattggttccacagacagacagatatacagatcacttcggtagccacctcgccttgctgaactgtctttgagagcttgctcttctgttgcttccgtcccatcaccttcagctcgctcgctctgccctcctttggttttttcacttcgagcaatcatcttgaaggtcccctagatattctctatctttttaccttccctatagtcgagtctcatcatgagtgcggttcctgatgatccaaaccaaggtggaacaccctacgctccatcgttcacctccaatagaccacccaacggaccagtcagatcactctcttctgctgcaccttccataggtagaagacagagtgagggccttgctggcccaggggcatcccgtcaagtgagcgatccaaacaagagtcgtactcctctgtcgttcaacactggtgccaccaacggtcaaactctagggcaaggttctcatcagatcgtctattcttcctccggatcctctacgcccatcaccacttcttctccctccgcgttcattccatctcgtgctccgccgccgccgccgccgtcgcagatacaaacccaaaacacggcgtatagctcctactcttcccgaccgaccatccaacagcagtactctcaatcatccggccctcctaccaaccatggagctcttcaaaccggcccgtatgctggacatccggaggaattttctacctccccgagctcgtactcggcacctcctccgtcatccacttcgtatcaggacgaaaagccctttggtccctcctcgccctacaccaccgaaccggcgaccctgcccatatcgacaccaaactcaatgccgccggtatcggaaaagaaacagtctagggaacggagtgcgacgttgggcaaaggctcaggatcaaaggaaaagaaaggagggtttctcggagcctttcaaggtacgttcttgtctcttgccgtcctcgcttcattttgtactttgttctatcgtcgagaacaattgaaaaaagcgattcaatgagaaagtcgtttcatccgtcccgtataggctgacgtctgtttttcgaccttcttgcttcaatacatccgtcatccctgtcttcattcttacaatcggtgtcaatcgacggtacattcatcttttactccataaagacctcctcggaagccacaagcccattactatttcgacgccttacgatcctgtacatcttacgcatgtcggcttcaacaacgacacgggagagtgtgagttcaacccatgtttctatcagatccttctttcaactcgagctcatctgtccttccttccttcgcttttatctgtcgcccattgttcagtcaccggtctgcctagggagtggcagcagttacttcaagaatccggaatctctaggaccgagcaggagcagaatccacagctcgtacgttctcgtttcattttaaaagaaagaaagaaagaagacaatgttcattctcacatgggcaaatgccgaactgatcttttcctatcaattctgttggttcctctctagatgcaagacattgtcgaggtctatcagcgagtcggcttgggagatcccacacggcaggattcagacgtttgggacaagatgaagggagccgcaggagacagtcagacgtgggaaccggaatggcaaggcgagggtcaaagtcagcgagagcctggcaaccatgtacgttgcttgaacccctgtttttctcgtctgacctctcgtgctaatgtgtttcccatcaaattctggggtatcaacccaagcgatcggctccctctcctcccggag

SEQ ID NO: 1955 - DNA, 23591 bp, Xanthophyllomyces dendrorhous
  misc_feature (17239)..(17248): n is a, c, g, or t
ccttcacagcgatccgacccaccccgaccagctccacccgcgccgacaaccaagcagtcgctccctcctcgtatctccccctcttcaggtcctgcacccgcgattctcgaccgatctatgtcccatcgagctgctccgacgcaaaactacgcgatggctccttctatgctggatcgatccaagagcacgcgatctccacctgtcgcttacaaccaccctggtttacaaaagtcaatgtcgtcggctggcagggtaccccagagtacatcgagcgctcgaaatggaagagaaacatcaaatcagccgccctccgctggctcggcagcggcagctctgtcaaggcaggccagtaaggccaaggaacatcagttacagcatcagcagcaacaacagcaacagcaacaggcgtcttccggaacggcgacacctcgacgaagagacaagaaagacaactcggatgtcatcgctcggctgaacgcaatctgtactgatgctgacccgacaaagctctacaggaacctcgtcaaggtcggacaagggtacgtgcaagacatctcatagctttgtctacttggtcaagatatcttgtctatgaacttcaactgatatcctactctctcatcttgactgtctatacttgacagtgcctctggaggagtctacaccgcttaccaagtcggaacgaactattctgttgctatcaagcagatgaaccttgagaaacagcccaaacaggatctaatcatcaatgagatcctcgtcatgaaatcctcccatcatccaaatattgtaaacttcattgattcgttccttcacaagggcgatctctgggtcgtgatggaatacatggagggtggaagtctgacggacgtggtgacatgcaacttgatgaccgaaggccaaatctcggccgtcagcaaagagacttgtgcggggttgagacatctgcatagtcacggagttatccatcgggatatcaagagtgataacatcttgctcagtatgacgggggacatcaagctcagtgggtcttttcttgtggttttgtcgacgtttctctgttttttgttttacttccctctcgctcacacgctcctctcgccacgttgtcctctctttcagccgatttcgggttctgcgctcaaatatcggatcccgcacatgccaagcgaacgacaatggttggaactccttattggatggctcccgaagtggtgacgcggaaggagtatggaccaaaggttgatatctggagtttaggaatcatggcaatcggttcgtcaactttctcacatccttcggttctctttgttttactatcgagtagtgaaccgcagggtttctgatttccggggggtcttatatctttgtagagatgatcgaaggagaacctccatacttgcaccagaacccgctcagggcgctctatctcattgctactaacggaacgcccaaaatagagaagccggaagatctgagtagcacatttagagattaccttgctcagtgtttagaggtcgatgcggggatcaggccggacgcagttggcttgcttcaggttcgttgacaaaagtttcatccttacgttcatcttctcgtagataaagactgaatttatcttgcttcctttcgtggcgtttacgcttcgtgtctgtagcacccattctttgcaaaagcagagccactccgcacgcttgcccctctcatcaaagccgcgcgagaggcgtctaagaagtaaaaggcttagatattttctggtgattatcttttggagcttcaaggaaagctacgacgtgcttgagagacttcttctctttgttcttcgggtcgctccctgccttctttcttttctctccggccgctgaatggttcggaaacgccttgctttcttgtccctttgcttccttacttcgcatgcattttctcgcttggctttgcttccctgtggtttgttgcaggcccttctgagcttctctgtttcgtcgctgctacttttccttttcttcttctcttttctcgaactttttcctttctctcttctacatacccatacccatacccttaggttggtcggtccattggtgaaacgcttattattcgaaccaacctcttctttcctcgttcttttctgactttcctatatccagtgtcggttactttcttctctccgttgtgtcattttgttttgtttcatactgaactatcccttctttatatgaactcggtgacctcttctactctgaactctgttctctttggagatttcttctgtctttttctttctctttccttcctgcgttcgtctttgtcttctctttcatattctgtttgagtctcccgccttatcatctctttgggttccctacgttcgttcttccatgatatttccgttgcttcctttcgttcgatcgatcaggggttgatcagtggcctcctctctttttgattgcctggtttttgtaccttttttgtgtttcttccaatataacagtagccgtcaggtccgattgcctacttgggtctttattgcgttctcaattatcacttgcgccagacagaaacatcgaaggacatctggttagatgtctctgaagatggaagagacagagaacaagtttgagacgcgtcgatctcgtccgaagagattcactgtcttattgaataccagatggatctaaagacatgtccccttgaatgatgaaggagcatatcgtggtcggggtttgagcagagaacagatcatgagatgctcaatcctcggtcgattgtgtagtcgacgagacgccatcaaattaggcccagccctgactgaattggagaacacacatgagcatatcttatctgtcttcttccttctctgttctgttgattcttcaattcccttctaatttcagttaggagaacacaagggcgttcaaccacgctttgcacgtaaagcagccttctttccatgacctggttgataggaattgagtttaaattcgattgtgaaaaggaaggaggtgattagctttggttttttcactcaattcgttgatagatccggcagagaaaactcttgaatttggtcgtttggttggttgtaaagaccgctcgaacgaccatgaaggaaggaagcataggcgtaggtgtagaatgggaaggatggaaaaaaaggcaacctcaaacgtacccttcctggtcgccaactttcctctggcagctctagcagccttgatctgttcccagagctgatgtcgttcgttatgccatgttttcggcagatcgagaatccctctcgtcatcttgtccgtcattcgaatagggtaccaagagctggtttccggtcctcgaagcggctgggtcaggtagtgaagacctgtccgaagattgagcgggttatacggggtctgaaggacggttgacttcagacgggccaggtcggccagacgagtgagtgtaggtggtctcacagacatgctggcgaggatgaggatgggtgttcaaggtgtgagtgggatgatgaatggatggatagatagaatgtagaacaagtcggctgccaagataggaattacagaaaagattacaaacctgaggaatgtctcctaatgaaatgaccgagaattctctaatcaaattcttggctgttttccctcacctgccatctttccgtcccttcccattttgacttctgcttgcgcctttcgtcttctctccatcctctcttgatctgcttaatcaagaccagaatctgaataaactacgtacaacggacaccatggataacgatactggcctttcaaggtctctagaagatcaacagcagcagcagcagcagcaacagcaacaacagaacaagcagtatcatcatcaggatttagaccgaagtatgtctgctctgttgctcttccctctctgctctttctttcttctctctagtttcttgcctccgtccctcgtcactctcatctctatcagagatcgatccttctgctgtaagagcactcttgccggctcttggtccgaaggacgagctttccaaacgatgggtaagctttggatcagattccatctgatcatcccgcctgcatggctcggatggaaggaatcagtgatggtagtgcttgcatgtacggtcttcatctgtcatcaaagtctaccgcctcaagctcgggctagacatcacttagcacttatgatgaaggtgtagactatcagagcatacggctcttggcccgatagctttaaagatagctttgttcctcaaggagtgctgggttgatcatctcccctctcccttgcttcgttgggatacatcgtgtgtacttggaaacgcttggtgtaacagcttgactgatcgtgtcctctcatctttgtgactcaactagttatggatcagcaacaacaaaaacctaaccgatcatactctcacacgtctcagtcgtctgtaacatcacctagtgggcaatctaacacgagccattcccattctcagtcaacttcgtccaaccgaggaaacggctcattctctcagtcagattcatataactctgagtcaccatcttatcaacaacaacaacaacatacgtccaactctttgtcagaatctccttcaatttcagatactctcttgtctcctccaacagcttcttcttcagtcgcgcaaatggatccctcgactcatcaaccataccgaccgagtatatcgtccaccttcaattcaaatttcacttctagtacttattctgaaaatgctagacctagcttagaaaccagagggtcttcaagctcagtggtcagtctcaaaacgagcatcaacgtggtcggagttggtcatccatcggcgtggcccgagatgggggatgggttggggcttggtgttaattcaggagtgggtggaagcggacaggggcaaggtgtgccggtgcaatttgatgagggtgttttgaggcaactctgcgatctagatgtaagtctcaataggtcttgtcactgaagagaggaatgttggaaggaaggaaggagaatgttcatctgtgatactcttttcgggtaacgtcagtgcgcacttccgttattaaccgaacgaataaagcagtcgcttgcttcgtgtaaagtgagtccttcttgttatttttttttcctttctcatttgatcttgtacaattatgaatcgtcctcattttgccccgctttgtctttctttcttcttcctcatcatcttcaagcaaacatcgacgttcctcaagtcgcgcgcgcgcatagaagaaacctacgctcgatctctgggcgaactcggacgagatctgatggatcaatattcccgaagtgaaggcaaggctgggtaagaattactattcgctttcctcgttctagtgcatcacgtcggaaggaatcgtcaagactgataggttcttggatgtgctggatctcttgtcatttgatcatcgacacttcggcggaacttttgtacagatcatttctcaaagcatacaacgatacattgcgcgtgaatgacttgatcgctcaacagcgattaaagtatgcggccaagttgaatgagatgggagaagagttggtgtcgttgggtaaagagattgaaaaggcccggaaacaggtttgttacctctttacccctaacaaagaacggcatgatgctgacaagattgatttccatcgtttgctcctctttccttcttgtttgatgtctttgcttttgtagcataaagagactggttcgagatatgaacgacagcttcaagacgcagatctcgctatggagaaggttcgtcatcttctgtgtcaatctaggcgtctgttacgtcgcgcatgaacctggctaacccatcctcgctaaatttttgtatacacgctcttcaggccaaaacccggtttgatgttaacgtagaagaactcgagcggatactgattctaaaagagggtggtaccatgaaggatgcaggaatgcataacgcttcaaactcgaacggccattcgagtgaaggcagaaagaaactcgggaaggcaatgatcggcaagggggcgggcttgttcaaaggaaagaaccctgctcaggttagttcatctgctcgagtcaagtcaggctaaatatacatggtttgaagtcctttactaacctctctcttctgtatagatgcaacgacaagaggatgaaactcgacaacgcatgtcacaaacgtccgatgccttccgtaaagccgtgttggacgctcagagtatcagacaagagtacttcaattcccagctccctaaaatcctccgagttcgtcttgttcacatatctatgcttactcttccgagctacacttactctctcgttctttttgtgggcaccttggcctgtttgttttcttggtcatgtctcggtagcttttgaagcagtgcgcggacgaactagacctggccacacaatatcatctatctagatatgccttcctcgcggagagcgtaacattacaggaagggatgacattatcaccaatagacagcactgacggtaagcttctcatccggtcgctaaagaacgggagggaatgacagacgaggtgctgacaaatatgtcgtatcgaatgatcgtctcggccttgaattcagcaggacctcctgggttaaaagcaattgcagagacgattgataacagaacagacttcaagacattcatgaccaactttgtggttgctagaggaggcgtacctagaggtccaagacgggaaggattatacgaagaaggctacgtatgttgttcttgctttcctctttcggtgtttgatatattgctcatccggttctaaattcactatccacatttttatctgattgggggagacagcaacctgcactgcctcctcatgtacagcattcgcagacccaagtcgtacaagacgaaggcgcaaagagtggcaagcagatatttggattcgaccttacagaggcaatgttaagggatggggacgaagtcccgaaaatattggtgatgtgtactgaggcaatcgagagcaaaggtaggtccgactgttgctaaagaaccagatcgactcagtttagtggacatcgatattgatgtttattaatcgttcttttctcataggtctgacgtctgtcgggatctatcgattatcaggaatgacctcgtccgttcaaaaactcaagtctgcgttcgatagaggtcagttgattatcgtctctgtaccttactcgaaccatccaatgcttatctttgacatgtcttgtcccttcccattcagatgtggatctggtcgatttggaaaacgatgatgcgtacgcggacatcaatgtagtatcaagtgcgctaaagttatggttccgagagctaccagacccactgttcacctactcgctctactcgaactttatggaggctgcaagtaggtgttttccttcttgtttctgagcctatcttcttccttcatggtcgtcaagaagtgtatgttaatacttgagtcatcttcgtcgccttcacttaatctgtcttctcaagaaatcgaaaacgatcgactaaggcatatccgattgcacgaacaagtgaatgagctaccggatgcaagttatgctgctctcaagtttttcatggctcatcttcacaagttagtctctcacatctcttccggatatttcttcctccagtactcgccaacctaattttctttctggattgcttgaatgaacaaaaagggtgcgctcccatgaaaaagtaaaccagatgtcggcatccaatctggcgatcgtgttcggtcccacattgttccgccaaccaccagaaggcggtgggggtgatggaatgtcgatgcaggacttgatgagcttccagtgtcgagcggtcgagacgatccgtgagtctttgttacagttctattttatctcgatcctttcttgataaacatcaatataatcttacatttccttcgtttccctgggtggtttttggactgcgtatgtgtatatagtcctcaagtacgaagaaatcttcgtgtgatctgtcttggttcaattctaggttatccgctctccgcttctctattttcgactaccttatttgtttccagtctgtttcttctcgttcttctttttcctctcttggtctctcgtggtcatcgttgtttctatgttgttctgtctttacaacccagcaaacctccattgtatactcctttcggtttttttttccttatgtttcttctggacccggctacgtcgaagtatccatacgaacttttcataaccttccttgtctcgttcatgagacgactctcgtgttcctctcatattccactttttttttcagcccaagtacaaaccttccacctattctatctacacctggatatccactttcgattcttttttgttcttcagactgccttgttcgcaaaacggaaacagcgagacttggctatcaggagacggtccgactagtcgtccaacctacccatcgagatatcggttagcgcgcgcgctctttgttcgagctaggtcgagcagataatatggttgtcacatcgaaatcgcttggagcaggcgatatggatcctgatgggagacttaggtagaggtaggaaacacatggtcatgtcatagacgagtctcattgccgttttcatggcagcgactcctttgtaaattgctcggcattctcgcgttcggtttggattataaagtgtattttgtaggaaaggatctaggaaaaaatagaagacagtctcataggcagagttgactatgcatgaagtcggatttaaggactgaaggctatggttgaagtgaaccttcgatcgaggtcaatttagagctgaaatcatgatatcgttggaaacatttttacgtcctctagttctttttaatattaaactgacggatgcaatagaaaggtgtgtttatttctggagaggtgatggtgttgggtagaagaaaaggggagagaaaagaagtaagggaggcaatggatctttaccacatcgccttcctgacgcctgggaggtttcctttaagggcttccattcgcatcgaaaactgttgatgtgacgtttggtcagataatgaaattttaagatactctcttagcttggccttttctcgatctgatttttttgagcagagtacagaagacgcacccttgtaagcttgaaatcccggtatacagctgattcaatcgaagagggaagtaaacaccccaagcaggaaagaatttcatgtcagttctttgaaagcgatgacgaagggattctttgtacttgttcatctatcctccgacagacttattcagattcaagatctagatccataacaagactaacccttttgctttccggtcatgatgcaagtcgacctgattcgagcaggcgagctgttccccggaagtaacgacaatcgctgctgagctcgaattcgaatcgtgtctggcagggttgtgttccgggcgatgaacaagaaggctcgtcgcatggcttctgtccgctcaaacgtctgtcgggtcttcatgtctcggaccactcgggccttcaacccggtttggactttttttttcagatagagtaggaagagagggagaaagcggagagaatacggagcggtgagcgttctggtggcaatccggcgagtcacaagaccagaaaaataaccccatgctcactcaaaccgtacagacgactagctgtaggaaacattgtggtggatgagaactgtccgaatggttggtcgtctagatggaaggagtaggtaatgggcaggtgtgggcataagcgcagccggtggttacgcggtcgtccgtaaccaccacctccagcggactggcccttccagcctagccttgctggaaggccaccgcccagatcggtcgagcacatatcctccatcatcatcatcatcatcaacaccatctctctaggttctctctcgtttgtatcatggtgcgttctctctcgtctctcctttgtcttgatagacgtggattgagggtgcagaatagtacgtcgtcagaaacatctggtgttgcgatggcttcgactcttgggggatttggttccttgtccatcggctcaatctctttcattttaccatctctcattcttttgcttcttactttcgcctctttgttctggtgtatctaaatcatcttacttttgtgtcttctcctttctttcctggttggcccctcgttgtgaaactcagtttcgaaattcatacgactccgacgctaccacgttttctcctcaaggaaggtcagtcttagttctcggttcggatgtttgacctgatgagcgtgaatgatacgtaggccacgtaggtgcacaagagtttaacaatcacttggttcaatattggtgacaactttgataatccaggctccatcaagtcagcaatgtttactgttatatgtttgctagtggacacgcgctgatatgatccttacgcttcacaggttgaatacgcccaagaagctgtcaagcagggatctgccgctgtaggtctcagatcaaagaaacatgctgttcttctcactcttaaagttagtctcggacctattcttcggctgcgttcattcagatcggtttgattggcgtcggcttcgaatgcttgctaacgtcatggcgcagagatcgacaggagaattggcatcataccaacagaagatgttccgaatcgacgatcacgttggaatcgccatcgccggattaacgagtgacgcccgagtgctgtcgtatgtctctattttatctttcaaggtgttcgggtggtgtagctcgaagagtgtcgcagaccaaacaggcgtcaaaactgacttggctgtgttaaattggtttctgacaactcagcaactttatgaggcaacaagccatgtcttcaaaaatgatgctggatcggcctatcccggtaaatagattggttggagctatcgctgacagtatgtcgtccattctatcaacatacacacgcccatcttttgacgcgtctcctgtcgaatatttctctctgtagaggctcaggtgaacactcaggtttatggaaagcgaccttatggagtcggcttcttagtaattgggcaagacgtatgtcaaatcaatatattccttatccagatgtatctcaattgactcgcgcttattttgacatctcatcaaacacgagtaggagttaggacctcatcttttcgagttctcaccatcgggtaattctttcgaatactatgccatgtcgatcggtgctcgttcccagagcgcaaagacgtaccttgagaagtcgtatgattcgttcccggaaggtctgttcgcactgtgtgcctgatgcttgtcatattgcctgtagagggatccaatcctaaccttacacctttcttctccttagccgaccttaacacattgattgaacacggtctccgcgccttaagagagactttacagcaagacaaggagcttactccgctcaacacttcgattgccatcgttggtcctgtatgcaccgacgagcctgtgcctgctcagcaggcaaagggcaacttccgaattatcgaaggagacgatgtcaaggtattcctcgatcgactcgagcctctggtagcaccaggacaagcggccgcacctgtctcggctccttcagccgctgaagcatcactaacggataacgcggaggcagcggcagcaggttcagctcctgcctcggcaggtggagacggagatgtcgccatgcaggattagatagaaaaaggtttctcagatgaagtgtgtttcagtgttgtttttgggaagtaaaaggtacacttttctttctaccgatcccctattgttatagttctcttgtcttgatgattcgttccccagactctcgagcaaagaccaaacatcacataggcgcatttttgagcacgtggctaaacatactggaagagaaacgagacctttgtaatagtagaaagcgatcatatacacatcgaaagagacgttctttgatggtgatcgaccgatgaaaaagtttggtagggaaaagagaacaaaatcaaagggtatacgatccatcggtcgactgaagacaggatgtgtagatgagcgaatgagcgatcgaataaggtatattctaagtgacagaaggatatacaagaggaggcatgggtggaggaagtagagaggtatcgataggactgtgtagatattgaagttgaaaggggaaagtatgtggatatgagtggggatgcaagtagaaaggtaagagcatgcagaaagtagatgtaccaagagtgatgtgatttgagagagaagatcccaagaagagagaaagcgaggccaagaacaagaaaaaagaaaagaaaaagagtcaaacaaagcaagaaaaggaaaacagaaaaatggagcgatagaaaaagagaatgaaatcgagatagtgtgaacatcaaggtgttgaacaagccgctctgactttcgatccatcgccttcttccgtatcggcatcggaatctacccccaacgtgatagtcacctggcttccgttcttttccggattgaagaactcgagctcgaatgagccatcttggtcgtcagactcaaggtcgtccccgtcagaagaaccaatagagagcgcaggcagagagagtctgtcgattaacgaggtaggaaggtcgaaaggcagactcggacgatttatcaacggtggcggtgaaggagagaaagaagtgtgatggttggtagcataggaaacacgttcagtcaagagagtgtcggactttgtttcagtttcatcgtcaggcagatctgtttcatgaggacgcttgagtcttcggagttcactcatcagccctttgagctccgaaacgacgtcatccatcccactcgtttcatcttctccgtcaataccttgcttcgagttctccctctccttcttggccaacagaatacgttcttctctgctcaactttgatggaggtcgatactgagagactggcgcggtatcgcctatgaagacttcctcccttcctggcgggggtagtcggagttgagattcaagatgtagagcgacatcgtctgctaactcggtatctccttgttcagcctcgtcgagtcgcaacagttcacgtcccggctcgtcagcacctgtcatacctgaaggcgccaaaacgtctgggggcgatgatgattggttctctacgatcgagtcaaccaagccattaggaatctcgatccccatcgaaattctccctcgttcccagatcctaatcaaccctccaagttcatctctcatgtctaaccaccatgagtcccactctccatcagtgccggacgagtcaaatcctccagggataaattcatcctgggctttggcagctaagttggtctccagcagatctacttctctccgaagttgttcgatccaatctcgacgttcttgcaactttgtttttgatcgaggagcaaatccctcgttgtccacgtccttgtgttcagcccaatattgttgctgacggtagattcgaagctccttcccaatttcttctcgagcgatcacaaatccacgaaaaagtacttcgacctgggtttggatgtcctcccacgacgtgtcaactagatccttcttgagcgcaagcaaagaaactagggtgtaccttctattggcgtgcaggccaaagaagtgagtcaacaaatgagcgtgagagagtgggacaagcattcggtctttctcctgcctttcctcttctgctgtctcctcttcttcctctgcatattctgaatgagacaaccgaggtcgatagtacgcaagggatgaaggggaggaaagtgtatgccgatggcccgaacagaacgatagcggcgtcggtcttggtctcggttgactcaagtcggcagagtttttgtggacttcctcacgtctaccaagcttttcctcttgaacctgatccattggtcctcgcctgggagtgtatgttcctcctcccagtcttttaggactcattcgagcttcgtactctttcgagcgagacaccgtcattgacggagaagaggtcgacaattctgagcggttcaatggatctacaagccccgaatcgtgtaagtcggcattgtcggtaatggtggaggagatgaaagaattgtcatgtgaaggagagtacgttttgtatggcaaggtttgtaacgaacgacgtttgaggtagtaaggtgtcgagcttgtagcgctgccttcgcgagaagacgctgacgcagacgagcatgatcgcgtcaattcattcagcgcccgagatcccgcagagttcggagaacagagcggaacagaacaagtagtcaagtcagcggagacatccatcgcgggaggtcgagcgagccgcgtcaagaacggagattgcgcatcgacagggatgatggttgctgctagtggtgagggagacaacgtcggtagaataggagaggccgatgcggatcttgctcctcctttgtctttagaaggcgtcatatcaagaacgatagtaccggacgtctgggttctcaaccggattcttggtgaattttgaagatgtgcgctcatccttggatggacacctcctgaaaaagaccatgtctgtctcttctgagctcttgacgttcttttgggcattgctgtgaagtgagaggtatcttctaatctcctttcagtttcatcttcctctccagagaaggacaacatcgaatgtcttttccttgaggaaccagccctggggggtgaactccagcgatcaacgatgtgtcgctcgataggttcaatagaatcggcagcggaagtggcgcaagaagggaatctcgacgaacgagttggtgtgttgagacgggtaatctcgaatggacgtaacgacgaaagacgaggtgacgtcctaggatcatccagatcggaaggtcttgtctccgcatccgttcgagatgtcggtggaagaagagggggaggaacgtcgaggccgtacatggttgagagcgtgcctaactctttagaagagacgaaaggcatcaggtttgtgaatgcttcggaagagaggtgggtgagggtggaaagggtagagagcaaagtttgccttaaggtgaggtttggaagagaagacgttgatacatccttagacattggtctaggaagatcagagtttgaaaagaataacaatacagcgtcagttgtattcaatattactcgtaaaaaggaaaatgcactcacaaatctcgatctagctcgtagacactacctaaagcggcattcatgcttcgatcataagcttctgcttcagaaacaagcctttccagagacatcagcgcatccttttgtgcttgagagatagatgacgacagtcgaggagccgggactgccgcctttgcatttcctgagctcgagaagacaaacgtaggtgaacgtttgatgattgatcgaccaagaatatagagacacgaaagaaggcctatggccaccattgacaatctacacaccagcgacccaggcccaagagccagccaaaaagctgcggctaagatgaaagcaagggaaagcatagttctctgggaccgattcaaattcagattcagtgatgccgccgacgacgacgagtatgctgaagaagacagagacgagaatgaagtggaactggggtcgttgggaagctccacactttcttctcgatctgcttcagtctcttcaataggatgttcgaccgcccgaggtaaggatgaacccatcaatgaactcgagcataagatgtattttgacatttctgctagatctttacggtttgccatcatctttggtggctctatcgatgatctctcaagctgacccaaggaataaccaaaataacaaccaccgctgtgagtaatcatggcagagactgtatcccggatatctagaataagggcaatgaaatgactgagtcgaatgcaatacttacaatattccgcggtgaaccatccaaagacattcccaacaagacactccaaccgactattaactcgttccctatcgagccaatcaatccagacccaacgtttcttatctcctcggtttgttgagttttttcttggccatattcttcttcatgattggcatctgtttcagacgcaagatccatcactcgttcgacgtcctcttcgatctcggatgctgtcagattaggacccatccccgcacacgtgttgatttcggaagatagccgtcaagagggaaaaaaaagatgagccttggagaagagcaaagactatgagtacacaaagatagatgcaaacctctgagatattgatccaatggagacccttcataaatcacagacattgatgaatggctgtaaaaaggatcatccgtatgcagcctgacattcgacggagcacacaccgaaaacaacacgagggaggcaatggtgacattgttataattcaagtttatagggtaacgacaaggttacggaagttgtaaccataccagactcttaggatcataaggacaaaagcaaaagacaaggatcaagattaacaaaagatccagacttggtagactatgctatgggtggcaaaggggacccgtcttatatatcatccttagactccaacgattatgcataatagaacaggtcatagaaggtgctagaagcacctgcgctgggaggtcatatacctgcatgttgatgtaatgagagagcataaggaataccgaggcaggagaaacaacagaaccaaaagaaggttaccggggtgtaacatttaggttgtaaggctcggtgtttgagttagtaacccagtggttacccatggttcacgtagtgtcacttaggctcatactgagacagaccagactatccgcacgatatttgagataagaggtttctgcaagaatctcagcttgaagaaaactcttatccaagaaggcgcgagagtgtcctcgttttatatcaggacccctcgcgcgtttggtttgtaactaaagatatacatatgacgagcctagagaggctcgagatcacgagaactaaagagaatgaggcatgaaccatgcaaactagagcatgatggaaaatggacgaagaggcataggggcttgagggaaggaacagcctgtaggggtaacccacgaatcagatcacgtgatacttaacccgtatgtcatgtcagggatgtgacctgagtgttacaccccggtaatcttcttttactgctgtttcttctcctgcctcattattcctcatgctttcttattgtatcggcatgcaggtatatagtcatgtagcgcaggtgcttctagcacnnnnnnnnnnatcttatgatctcttcttgagcgcaacccttccgtgtggtttatctagtgggcgtgccgtctttattcagtacctctagggttttagaaatgtatacaagacgggcatcattccccgtccatagcctagcctcttaagcctagatcctctattgattctcgttacccttgtccttatctgttatccacttttgtgtctcactatcgtgatctataaatcttattgcctccagcttctgttctcgatcatcctagtcaaagagcctgaacttcatactaccaatcctggaaaccatcgcggatcacatagttcgtgaccttcctttttacgtgcatagctcacacccccaacagttctctagatcgaccaaactcttgaagagaacatcatcaaccgagcgctatgtcaaacttcaagcccgctccatccgtctctgtaaatagcacatatctcaatctctgatagcaactctcgatcagtacctccgtttgggaaggaaaaaggaagtgttgtgttctttttttccttcgtctgaaactgtactcttaaactctgaaatgtgaacggaattagaggagatgattcattcgttatcggtacatgcaaaagatgggtaaagaagcacaaggtaaagcaaaggtagcaagcaaaaaaaacaagaacggagctgagcgaagcgaaaacaatgtgagcagacgagaagagcatagtgcgggaagatacatgtgggtggaacaaacagaaatgtatgatgtgacgaggaacaatggaggttgaaagttaacaaaatgtgaaatgaatatagttcatgaaggagggaagggatgacgaaaatcagggaagggactgcctgacattcatcaagattgcccttgtttttaataaagtgaaagaatagagaaaaagaaaggagatctacttgtgaagatatggtcttacgaaatctatacattcaactctcgaatttgaatcgatgagatcctatccacgagagtagtcttgttctgaggatcggatcggaccatatcactactgacagactcaaaattgtcctcgtcaaagatagcgacgacaggtgcagacatagagaacgaagggtacgggtattcctcgacctcgtcctccccatccgatgaagatgcgtataatgagctcgttggtgacagcggaggagcacaggtcgagtcgtacactgacatgatcgacacagggctgaaggagagctcgaacgcggcgactgattctcgcaaaggcgatggacccctagccttcttcttagcgagaaggatcgaagatggaggcaggctcttctcggcttcggcctttttgtgctctctgtcgaacttgcggatgagcttctgaagcttgttggcctcgttctgggtgaactcgagattggatagatgtcgggtgtacgtaggcccaagatggggaggcaggacgtgggccgaggggtacgcagattcgttacctgctgagatcgatgacgggcatgccggaaccgagaccgctcgagtgtggataggaagagtcttcgcacgcaccggcatgatcggagcggacgagtgagaaaattgtgaaggtcgaggaagaagaccggcaatcgacaggatgactctgatctcgctttccgtcttggctagtagtgctcgttgggctttgaggattgaatgggcggtgaaaaggaggtacgtcggaggaagactggaagcaaagaaataacgatgataagtacgcatacagcaaagattgaaatggagagaaagatacacacagctcctttagaccagtaagaacccatcttcggtagcaatcgacaagtttggacctggcgagtcgcctgtgatgcttggccgtcaccgtttgagcccacacaggctctgctagctttcgcacgacaggcgcaactggcataatgacctcctttgagaccgatctggccatgaggggggcaaggagggacatgaaggatgatgagccgttgtctctctttaggcgggacaagctttcttgttgagcgagtcgagcactctcaagaacgtggtctctgacagcatccaacattcgaccggccttgctctggtgaaggggcatggtgacagcggaaccatcgatgagaagcacctggatctctccggcaacggtaggatctgccgagggcaggaaggtaacttcctcaacgatggaagagatccaagaggacgagtcgccggataagatagtcgagcaaggcaagtcattctgggcacaagtgttggcgagcgagatcagggccggaggggcgggaagggagtggtaggcatacgggtcggccggtcgatcgttgtgctctgcttttggaggaggcagggtgaagaggattgtgggagggtttggtgccgaggcagaggcaagggggatgaatctaaggagcattgcttgtaagattgagaagattggggaaaggaaatggctttcgagcggatagggggactgtcggaatagacaaaggatgtttcttcagagagtctggatgatccacaaccacaaccagatgtgcagttttgaacaggaagtagagagataagcaggtgtccggaccaaaacgttatgggatagatgaatagtctgatcgtctgatacggatcgagaagtctaggaggatggtgaagcaaacaaccaagattaaaacacaaaacgagacaaagaacgcaaagaaagaaagaatgaatgaaagtggtccgaagaggaaaagaagaaaagatatagtgtcgagataagtatattcagggtttttgatgtcgatccgatttaagcatccaattctcttccaccccggctacaaagcccgggaaggccaggtctcacaaagttaaccccgaggaaaacaaaatctgagttcggaccggccgggtcaaagagatttcctacgtcagggctgagggacagcgggacgcgagacggatgtgtcctcacaggcgaacaccgcggaacacaccagcgccgatcagttacccgattttgcggcgattcattcattcgggtatgccatatgatggtcaatgtctcacccatcggatgaaattcaagaagaggcactacgcgccaggtctcggcaagcgatgcggcaaataacaacaacatatcacatcgatacaaaaagaccgtaatctctggaatccgtccccgagtgcctgcaccggagagcacatgggtagagacttctaaatccgaccgtgtccacacgtcatcaccagtcccttaatccacatataactgaagatcttatactctacggttcaataatcatattcctaatatcatcccgtatcccgcaactctataagatgatgggaggtaaacgtatcaaaaaaagaaagaaaaaaggtaagaaagaatagagaaaaatggaatggaaaagaataggaaagagaatctatgtgtatcaaatcgtgtgttgatcatgctaccctgtctcaaaaaccctcgtctgctttgacgccttctttggtccgctcttccaacgaagagacagacgtgcaagatgatcctgcagagttgttcatcgtcagtcttcctccagacgggatgtatgatgaaccggttgagctcgaccccgtgcttgacgtgctcgtatctaaactcgaatcaacaagctgaatcctctgcggcagggcaggcttcgtagaagaaggtggctggctcaactgacgaaggcttgccaagtaagctgggagttgtgctcgaggaggaagcggggcaacagcttcgaacgagcctccatccgtcaatagttcatctagttctcgcttcgaccgaacgctctgttttacccgaagaaagagagaagcaaacacggttccgccgtcgtattacatcagaatttaaatacccgaagccgcctcgaataagaaaaagagcgaagagagatgaaacaagcgaggaaatagacacacgtagaaccaccaccagtattttttatcgctccatggaaagagataaacactcgtccctagttcgcgtaggattctggcgcggtcgtcccgagatttgcattgagctttcagagctagcgatgttaacgggacatcggtgataatcgacgtgatcccccctagtttgttgttgttaacgttaaaacccattcccagtttaagaaaataagccagtcgcctttcctctgttctctctctgcccaggtgacctacattcagcagccatgatcatctctcgaggattgttgacagtcctactcgttacaaaggaataaagtagaccaaaacccaagtaaatacgattactttgtaagatcccgaacaaggcttgggatataacaacagtaaaagttccagataacataccaaactcccaattctttacccgctttcagcgcgtcctctctaaaccttcgaccggacgcgtcaactagacaatcaaacatcatactgaacccatcgacatagtcccaaaaccattctcgggctattccgacagaagcaccgatatgcattcgtttgagctcagcaggcaagtattgccaggatggaagaataaaagacggatgccaaattccaaggatcaatcgtggatagattgttgggtgttgcgagataatcttggagattgcaggaaataccttgaccggatctgagtggactttgatgtcgatctgaatccgaaccaaccagccttttccgatagatcaagcttctgtctctttcaccccatcaagagtgaaacccactgaaacgtacgttgaattttacatgctggttctccggctaaacccaagatgagctatttctgttagctccaatatcttttcgaatccagacccaattaggatacactgttctcaccttcatcaagagctcgatgatctcatcaaacaaaggaataggctggatcggttccttcttcgtccgggcatgcttcattccatcaacaccttgccagttctgttctccgattaaccctttccccgtggttgttctgtccaactttgcatcatgaaacatgagcacatatccgtcctttgacagatgaacatctatattgagacacggttctcacacactgtcaatcatcgagcagatatagaggaagatcaagaaagaaaaaagaacaaaccactctcgatagcatcagctccttctctgatagcagcctcgaatgaagcgagcgtattttccgctttattgtgtgaagacatagattcaccatattagcggataacctcgttcttggcctcttcaaagagtatcgaaatggaaagaaaagccactcagggctatcttcctgaatgaccgagggtgacgtacgaaattcggcagacgctctacacaacattcattccaaccagatcaaacgtaaaccaaccttcaacatccgaacaatagaaacatctcccaaggagagaaagaaactaaaggcaaaaagaagccgctatgcagatctcgactcaccctcggtggccccatgtctctgggtagtagctctcactcatcatcctgggtaatggtccaacggtggtgtatagcctggacagaactacgtcggaacggttgctagccagccgacgacaaacaatcaaactgagcgggatcaacgtgattaggatgaggtatatggtatgaatgaaataacagccaatgtgtctcgggtggagaagacagagcaaggagagatgcctgcaggatagtttgcaaggtactgaaggtgacggctgagaacagaagcgaatgtgtctatcttcggttatgagcgataacatgatgactaagcaaggcgatatgacattaaaaacatcatgtataacaagacgaaggagaagagaagaaagatagaaagggaaaagaaaggatagatacaagatagtaatgccgacagagtgaagatgatataagaggaaagaatgagaacgacagaaaagatgaagaacatatcggctatgttttcttcttcttgttgatcttcttttccgacacgggtgtgctcgaacgagagaccgatgctttgacttcatcgataggtcgcttctacatttggaaaagaacacgacaagaccagttcagaagcctcaatcagacaaacgaagacaaggaagaactggctgagcagaagagaacaaaccttggtcactttcttaggagctgtcttcgagtttttctcctcctcgtccttctccttcgaaatcaacgtcaggagggtctgacaacgtctttggatctcgatcggggttcgagatttaaggaaccaatcgaatctgaaagaaatataccaagtgtctagtaagcatatgtaaacataggattggggcgaataagatgaggagaaactataccggaagagcggccagtccccg

SEQ ID NO: 1956 - DNA, 10531 bp, Xanthophyllomyces dendrorhous
gcggccagtccccgatgtctcgcttgatgagttcatacacgtcctctcgttgaatgccccaatgttgaagcctgacaaccaagaaccgatcctcctcctcggtgtactgcttccctttattctggccatatgacagatgaagctcctgcatcgggaaattgtaagatttgaccttgttcgtcaaccgacgaccttgctcctctcgctcggcaatcttgttttccccttcttcgatcttgtggagaagcttttcccaatctgtgcgcatcaagcaaagtcggtaaataaagccagcgatcacctcaggaaggaagaaaagatgaatgatactatgtacggaccagagatttctttgtatcgctcccagaacactctggcataatccctgacctcttcgacctctttgttctcaatctctgtcacgattcgatcgatgtctgctcgaccgtacttggcggaaccattaatgaattgctggaagtgtcgtttcgtccagctagagaatccttgagcggcaagctcgtctttctcagcttcttcctcttcggtcaatggttcggctaaaatcattttgaaggaaaaaatcaaaacgaacgcaatgtaagcggctctgaagacaagaggaatgtcaaagataaaccataaaagacctaccagtgtcgatgaggttctgggcttcgactcgtcgagcctctcggctatcgtgggtttcattcgaattaagcccatccggaagtggaacttgcacttcttgcgatcgctgcgtggtttcggtcggacgatagaagagcaagaaaagaggaatacatctttggtgagctatgcatacatccacgagaacgaaaaggacatgatcagacttctcaccttgaacgcgttggtctcttgctcttggagctcctgtagacgaggagggtagaattgatgatcaagactaaacagagaagattatttcgagaacatagtcagcaaaaaatctgaaatgtatattcaatcaagaggaacttacatgttcagttgtttgggggctcgaggaacttttggcttgtcagccttagctggtccgacacgcatagcctccttgtaatatccatcaacggagtagtttgtctttcgttctcgcttagctggctcaatccaaagcattccaattccctttcgctggagtggtttgatggaacaacgacaacggtcaagcagaaaagcgacaccgaatgtatccaggaagagaaaggcgtgatcagagccccgatgaaacagaaattcgaaaacagagaacacgaaccttgttctggaaatcttctccctcccagttggttaccatactctcagatttaaagttgttcaggtcatccaagtttaatccgtcatacttgcttgcaagctcggccgtcctggactctcctcgttggatgatctcgtcgatgtcatcatcgatgaccatactaccaagttgatatgaacaatcagatggtcagtgtttacactaagaggtttagaattgaaagagctgtagtgcacgcacctcttgtcggatttgataatcttttccgcaccgtgctgaatcatatcgagcaactcttccttgttttgagcgactgttccagcccagataaacaagaaatcatcaaaccaagcgatggacccaagagctcagtaaggatcacattcacacctacaatcccaagcctgatttaacaagaggattgataaacaaacctttggcagcttgctgggcacgaccttgttgaataacaagctggtcaagcctcaatttctgagtcgccctctccaagattcgctcttcgaccgcgtcctaaaagaagtcggatgaagaatataagacaaataccccaacaaaccggaacaagattcgtggttgaatagaggaaggaatgacctacttcggttacgaaacggaatacgtagacctgcttggtctgtccaattcgatgcgctcggtccattgcctgaagatcagcttgagggttcctattttatctcaacgccatattgaggagagacggaaactttacgatcagcttctaaagttcggttgttccaaagaggagggagaaaggacgacaaaccaatcactatcgaacaagacgacgacatcagcagtaaccaagttgatacccaatcctccggctctggtagttaacaagaacgcaaacttttcggacccgggagcgttgtattcatcaatcgcagtgattcgatcttcgtgggctgttcctccatcgattcgagagtactctgtaggacaaaatatgggttagggttgacgattcaatctagtttagttgatgctaactacaaacggaaaatgaagcaagaatgaggaggaatacccacgatgacctcggaacatcatgtaatcctccaagatatccaatactcgactcatttgagagaagatcagtactctcgatcctttggctttcatcgaagtgagcaatttatcaagaatgaccatctttcctgcattattgatgatatgctcgtcggtcgtgtacggcggtccgggctcggctccatcgaacactacgtgcagaacaagacgagagcgcttgagttttctctcatttcggaaacaatatgcgaaaataaaggggcaaacgaacaatatgggtggttgcaacacttccgcaactgcatcacgatgtttagtaacctagtcttcccttcttttttacccgtagcacctgagatatggaaagacgataccaatcatcagcgtcggttcatcgagacgcgtgaacagtggaaagaacaaggaaagaaaccccaccattgacggcgtcgatatccttctctaagatcattcggtaccactttcgttgcatgtctgtcatgcccacgtagatgtttatttccttctttggcagaagggaatgctcgacatctgctttgactcgacggaggaggaaaggtcgaagtactttatggagttgcttaacgacttgatcggcgtcgtcttcgcctcgttgttggaaccacgcgtcgaaatcctcgctgttaaaggagaagaaacacgaattggtgggtcaattaataaacagatggaagaaataagagtgggaaagacatacctcgaagaaaagacatctgttacccgtgagatgcatattcaaaagcttgattgtcagtcttatgagatcatgacagaaagagctcttgggccagcaatatcatcacgaaaccttttcacctaccaggtaagatgaaatttaacagtgcccaaagttcctgcaagttgttctgtagtggtgttccggtgattaatagtctacctctcgaatcaaagactctgacgatctgactgagtaatgaatcaacgttcttgattcgatgagcttcatcgatgatgatgtactcccatgaaaactttttgaacgtcgacttctcccggagacacatctcgtaagaagtgatgcagatatcaaagtcgctgttcaagatttgatcctgaatcaactcgacctatggacaaatgatatcggaacaaatgtgagcttagaacttagatgacgcacgcccaagaatttatttatttttataacaaatcgggacatactcgctcatccttgtttccttggaggagaacggtcttgaatccagggacccacttgtggacctctcggtcccaattctgcaatgttgattttgggacaacgatcaagtgaggtcctttgataccctggtggaatttgaggaatccaaggaaggaaattgtctggagagtctttccaagtccctgttttcatcgagtataaatacgaagaagaggatcttcgttgaatacacaaatgacatgcagatgcgaaagcgggagtaaatgaaaagacttaaaacgaaccatctcatcagcgagaattccgttgattccgttatgatgcaaagagaccatccagtttagaccctgaacctgatagtctctcatctttccacccttgacgactgtagccgatccatttatcagataattcgttagctcaggatgtacagcagatgaaggagagggaaggggatgaatatacatacaggccggtgattcttcaaagacaatcatgtcatcgtcttcattggcatcaccttctttgagaagctcttcatcctcctctttctcggtctttcgccgtctattatcgctgttcttgcccaaagaggtagatagattgagtgaatcatcccattgacaggagaaggaggatctccacgtacgcggcctttttctttccctttccagagttgtgcttggccatctgagcgtcaagcagttttgcaaattcaggatctcgctctttctgaactcagaggacaaattcagaatgacgacaaagaaaagagatgaaagaagtcagatgagacgaccgatcgaaatatcgtcaccggggatagagcgcaatgaagaatgacagaccttgatctctaggaaatgctcgaataattctgtttgtccaagcagatagttaaaccgtttcatcgaatcggcggtctacgggggtaaggaacggatggtgcggcaagcaggcgcgtagtatagcgacagggaagcacgagaacgagaaggcgcatactgagcactcttgtttcgaagaacgatatccacaaagacctctcttgtatccaactattcacaagtgggaaaccaggccgaatgcttaccttgattctgctcatttcctgctttctgccttccaattttgttttctgctccgacttttcctgtcgtttcttctgattctcagccttagcggcctgtgctctagattttgaaggagagagcgtcgactatacaggcccgtccgtaaggaagagaacggttgcaaacaggcagtggtcggataagaaaggggtttcaagtaagagttgatcggaaagaatataaaacacagtcagacatcatataatcagtcacagtactccggagtgaaattcaagagaggataggccaaatacgaatcacagatcacaaagcaccagactatgacataaacaagagggaatgctcttacggaaccagcctcgagatcatcagcggcatcctcttcgtcctcatccgacggatcctcatcctcgggttcgtccaagatgtcatattttggtgtgttctcctgcgtgatgtgttgtacgatccagagagatacgagtgacatcaaacgtgatcagcaagggacatattctgaagtgcagagagaaccaagagagatgagtgtcataccggtccggttgagggtacacgggagggcactgcgtccgaaaacatgtcgtcgtccttaacaggtgcggagtcgattggcgtctattcgtggattggtcgcaagatgttgcacaaatcgcaaatcacacaccacgcacgcatatatcagtcacgttgtactaaaattccagagagaacacgtaaaagtgttgtgaacagggatgagagaatcgtaaggttctccaccgttggctgacacgcgcctagagatcatcccagttggatcataaagagaagaggaaagctggctaatgaaggaagaaaggaaggaaaacacgcacggccatggttatcctttaaggctatctctgcctttattaagaaagggatggttgttctaaatgagaagctctagtaaaggacagagcggtgaagaacaggaagagagaagcgtaagaaaaagatgaaagtgaggagaggaaggaagagaaagaagaagaactagaaaatggtagtccaagtcgcgcctgtcgcgtcgaaatgcaaactcttgttagggttacttccttggttacagtcgatggtatatctacgaccttgggaggcgaggactcacccggccagatatacggcgagggagcatgggtcttttggatagggccatcggaatatcagagatcgattgagtgttagacatcacggaacatgtacatctgggtctaccggctcgcaccgatgttcgtcacgacgcgttttctcgtgtcgccagcgccgccaaaagatctatctaccacaaaagctaacgagatgatttttggagacagcgcatggttaagagacagtcctgaggacgtctttcaagccgcttgtgtatagtctgtcaagacgacaactaccgttttttgaatccagacttcatcgatacatctatctacaggcttgactgcccaaggtggaatcaactcgagcgcccgcgacctaggacgcgtcaaggaaagtctcaagtggacgattctcaaggaaagctcagcataacatccacggatgacaatcagaacagataagacagaacgatcctctggagctggcatgtcgaatatattcatatagaccggcagtcgagggaataggttttgggacacagggtgctcgaggttagattcttgcttacctaatcggtactcttacgtcatctcatactcgtctgaagtccctgccaaacacattctgcaatctcaaacgatgacccagaagaagaacaagaagagtgggaaacaaccaggggcatcacctagcacctccaaggttggaacaagtatagatcaaacagattcttcagtcctcgtcccggtcccggttggagcgcaaagtatacgagagatccatgcccctgttgagcatccatccagaagtcttccaggttctatatcttctggcaggccaacttctccccctccaccacctcccaagcagctacacccatcatctaagactaaaaagcccttgaagaagaactccaagcaactgtggatcacatctgtcatcggctggatcattaacaccatcattggactgatcaagagccaggtgttcttgccactctttcttggtcttgcctgcactatcccggtgatattcatatcgattgctggatatcatcaattatccaactgtatgtatcgttctagtttttcttcttgtattttcaaaatagataaatactgatctttgataattctgtctctttgcatacatgtggtgccctttgaagtcgtccactatttctcgggctcattggactcatttgccaatcttccacagatcccagtagcgctatactcgaccgccacagcaacctattgcagattcattggtcttggatgtggaacatcccacctctttccttccaggcaagctactgtaggaaaagtcgctcagcagcttcgtcaacaggctggcacagcgagtgatatcttccaaagcgtgattgacctgagcgatgttaatagcttgggacttcatcagacagagatttgggagttggcgatgacggtcaggaggggaacccatttggaggatcgagagatgctcgcggcagaactggaggatttaggagatctcacaagggatctgaaggatggactgatgtttgtggtttctcttatcctcttgcttgtgaattcttctcctgcacgtatgatacagaaaggctgacgatcttgctgtatctacatttcctatcgatttagtgggatcaattcccaagggataaacgcgttcagttggattgcgcatgaattcgctcgcatcgaagcccatttacaatcacttgctccaccaccaccatcgaccccttcagaatcctactcgatcgaccctgttccgatatccgccaaatctcaaatgatccttcaaacccgtctgacggcgttactgaacaatctgattcgatcactctcatcactccaagcttctatcgagtcgacccttcctcaagcggatagggcgtcccgactgggaggaaaacttcaagatcgattcctcacagaagagctcgccctttccgcagagaaagccagcgaaccggtctgggcaggagcggtagcaacagcacgagccttggctctgggtaaatccaatgaaggagatggatctttcaagcagtttagaagggacgtgatcaagaatgatcttaaattgacgaaggaaagcatagggaaattacaacaactgagaggtggaatggaagatcttcgttcagaactgattagatacagaggtctgttgcattctcttgtctttgttattaggtatccctctatctatacggtatctcattcatactaaagtcatacatccacattttgtacgatcatcgagcagacaacgtgggctggttccgagcaggtgttatcggttggttcgccggcgcaccaacatcagatcttgaagatggatccgcaaacggcgaagaagatgagcccattttggatatctttgttgaaatggtctgtattacgtcttcttctttctctcactctgatataatctatcgatcttgaccactaatcgatttcatattcctctgtcgttgacgatgatcggaatatagagcgggcttagtcagattatcaatcagttcagtcgttccgtcgctgatgcaaaggcgaggaatcgacgtcagacagtagggataattcattcagatggacagccaaggatgatttcagactgaccacaagagtacacaagcaatgcctgtagcgctccttgagattcgacggtgtttggacatgtctcaacatttccttcatcgtttgtgatactccttaattcctccctttgctatgtataatatgtcattgtattcatatcagatagttctgcatgctcttttataacaaaccgaggttgagaacggcgcccatgaggaaaaaatcggtcatgagtacaagagacaagaacaaaaaaaacaagatggagaaatcacaagaatgaacgagtatacagaaacaagcgttcatgaattcatgttgtttaaaccgtcagactacttcgatttctcttctcttagaaacattccggacttctcaacataggctgattatccgttggctcagcttcctttggcgtagcaggtgagatattcaccgtcaaaccagccaccgatttggacgctggagatgaagcggtatgaggaatccgaggcgaggacttctcaggtcgggagatagctgtcatcgatttgggcttcagcttgctcccctccttatcctttgcttttacctccaagacgtcttcctataattccaaacaaacatgaaaagcataggaggagaaagaatgtcagagttagtctttcctttgtgttcatagataaccaattgagtaacaagactaagaggagagaaagtgcaacggacctctccaaagtattcacgcggagtgctaggaatcgagaccgacttggctccattcttcaactcctggtcgatcactccagaaagcgcagcgaggtgaggcttgccgacctttggggttgttgcaggcgaacccttctttgagccttgcggcttcggtcgatgagtatccacagccgggataggaagagggtacctatcaacagaggtggcataccattcagtatctatcgcatgatctgctcgtgatacaatatgttaataaatattgaaaatcatacctttcttcatcacatccataagccttaggaaccagcttaataagcgtgtgtagtgggatcgggatgtaaggcagttcctcttgagagtagccctggaagtaagcatatctgtagccagaaatacaagcatagaaattgacgttaacattagctctatttcgatcagtttcaaatcagagatgcgacaagtatttccaactcacagagaacgaataatggcttggtggccgataatgagaatattttcttgtcgctctaactccatgatgaccggctcgagccgagtcaacacatctcgataggactctccacctagaggaacctctcaaaaagggcatgagtgcaagaatcaagaaggagactataaaaaaaggatgtacctcgatatcggtagttgaatttgtcatcatctcggttggcgtaatcatccgggtacttttcctgttagaccaaagcaatccatgagaaatcagaccgtgccaacaaagaacgtgaagcagcagattcatttagtttagaactgacctcaatctcttcgtacgtcattccatcgcaaactccggcatccaattcatccaaagatttccaagtcttcttgggataaggcaggtgctgggctgtctgaatagttcttctcaatgtagatgtccaaacctgtccgcaggactgatgttagcagtccaacgccgcggggtattcaccgagaaacgagatcaacgaacagtgagaggcgcgtctccgacattttccaagattaacgacggcagtgccttggcatacttctgacctcgttcagagaggtcggcatctcctccaatttggccgttgacgttgtacatagattctccatgctgtggcaaaaaaatggcaaagcaaagtcagtgcacatgcatatatcaatgtaaatataataacgcttactctagacaagaagatagccctgggtttcagatgaagattcatcaagtagaaagccactcgactctcgagatagcctccgattcgattgatgtgtaccgttcggccaacattgacaaccttgcaatacgacaaatgaggttcatctaccggttcatagactttctcatagttggcgattctctgaattgatatatatatacagc

SEQ ID NO: 1957 - DNA, 25285 bp, Xanthophyllomyces dendrorhous
tatatatacagcacatatgagtgatagtttctttgtgttaaggatatgaagaagcaaggtatacctgcttaaagtccgcttcagcagcctcccgagtcatatccttgtagtccggatctcccgaagagaccttcaaagcgatattggcggcgattacttcggcgtcttcacagacagattctaggaagagtagatgaatcccatgttctcgagccactcgtttttcgatagccgctctatgaatcgaattattgattcagtaaagcccttcaaaccaagtgatatcacgttggaccacataccttctttccttagtagtattggttgcatctaggcacgagaacagaagcatggtctttcaacttttgtgaaacaaatggaacggagacaatctgcactaaccatggattccgacgtttccctccctcttcagccaatcaatcaggctgtcaagacattcttcggccagcttctctctgacggcttttgcgtcagggtcagcatggttgaaatagctttctgaatgagcggctcctctttgacaacaaaaagggttgaggcatgatgagttaacgcaatctcttcagcatatcagtagtatcttataagacatactcggggtgctcgtctctggcctttcgtcgtcgcatctgaccaacgttgaataccttgactttgtactcgagccactgaaggtacctcttgagcttattcgacaggaaagatttgcctcgagccgggagaccgacctggttcaatggaagcagtgaatatcgttagatatgaaagagctatgagaacgactccagaagaactagagatgtaccatggcgacgacaatcttggcgcccgaatagtccggcttgctgactatcgacagaatccgtttattgaaggagcaaacatgaaatgggtcgaatcatagcagtgagctgttgtttccatctctgagtaacaagttaaacagatgctcgtaccaagatttccgattccagtaacagaaggggctcgcgtaggcgccctagagttctttcgactcaagagagtgcttcggtcgagatcatgtagcctttacaggggtatgagcaaacagtacacaaggacagcaccaacagagacaagaggaggaaccaaaggttcagaaacgttcagtaagatatcatacagaaacaaagagatagcagtcatctgcatttcgaaaagctcaagctgaatcgataaactcacagcccactggtcgctccgtagaatggttgttccttgatctctgcatccgtctcccttctccctctcgtcggccttttgccctgggtagaagaggtttctgccgagtctgtcagagagattgttgacgaattgccagtcgatgaaatggtggattctggaatagtgtcctcataattgtcttggttgtctgaagagatttggagagactcgagctgggcgaccgcattcctcaaagaagattgggtggatggagtaacacttctgcgaagaggagcaggcatttcggatccaggtgtagtcggcataaaaagttgggtgtctagctttgagatacgatcgacaaagaatgaagggagtagagagagagatgaagatggattcacgggcagatacggcagacgtcatgttatctctttttatatatatattagtctcttcttgaatttttcgatagtcctctaatggcgtttctagtagttttctgatatcctccctcttaggatcttgaaccgatgctcggatggtgctcaattttcttgaattcattttgcacagcgaacagaagaaagaaggagcaatatacatatgatatttacagaaggaaaccgggaagagaaagaagactaaaatgatataccaagaaaccgcctaaaatggaaccagcccacttcccccttatgtctagagaacaatgagatctcccgagcagcatctacaccacaaaattccatccttgtccgagaattgatgcacgaccggctctttgtaacctgattcgacaaatgacgctccgctagtcagaacaggggtcttctctccttcatgcgatccagctagattattttccactctgaatccttccgacccttcctccgtaaacggcggcagggatgagctcgagaatctaggacttcggccttcccccacattgatcccaggcgaaagcaatcctccgttccttcctgacagcgaggtattattcggattagatgtttccatcctggctttgagcatagcaagcgaagttgctctagcgtgtctggaagcaggaggcaaatcagcatcgaccggtcgacgctgagaaagctgctcgaatgggttgattgttggaataggtccaacataagtgggtgttaaagaggggggaacattggaactagaagatcgccttgaaagagattgtgaggtcaaagaaccctggatgctcacgagttcggtctccagcttctttgccttccgttcccatgtagactgggcatactctgcgtcatacacagcggtctctaaccggcgaatctgcgttcgagcctcagacagatcgagtgcatgctgatcttgaatcgagttcatccactcggttgattggtccagtttggccaatttctctctgagttcggcgatctcctcggttgtttgccgaagttcagcctcggcagtctctcgaagcgctcgctcagaggagaagtccttctgaagtttcgtctcaagggcttggacattggcccgctcgacctcgattatagacttctgatctgccagttcaatctgtagctgagcgaacggcgagagcttggcctcgaggttctcaaccttgactcgttctgcgtccagaagatcctggatggattggcgttcatctgaaagcacttgtttctcagaagacagatcatcatgtgcctgagaagaagcagctagttgagcctctaggtcctggatgcgctgtcgctcagcgtcgagttgatcctggacggattggcgttcagctgaaagcactgttttctccgaggacaaatcgtcatgagcttgagaagaagaagccaattgagcctccagatcctgaacatgttgcctctctgtgttgagttgattctggattttttgtcggtcggatgtgagcaatctgtgttcggatgaaagagcatcgtgcttttcggatgacatggacagtttggtttcgagatccaaagttttccttcgctcagtctcaagaagattctgggcttcgttatgctccttcttcaagtgggctcgaacctgctcgtgcttcaacacaagatcttcttgggatttggatgaggcttctatttgggtttgaaagcccttggtttcctctagagaagcgtctaagcgagattggatcttgattcgatctgaagtaagttcctcgtgggcttgggtaatggaagtcaactttgactcgagatcttccttcttctccttctcagcatccaacaaaacctgaatctcttgtctctcaacctcgtgctgcttctgaatcctctcctgctcagcagcacgctcctgttcggactttgatgaagatgaaagctgagtctgaagatctttagtcttcctcacagcagtatcaaggagactctgaaccttcttctggtcggataatgtcgatttttgaagatcggtggcagaagcgagttttgtttgaagatctccaatcttctttcgttcagtttccaagagatcctgagcctcctttcgctccttctcttggctagccaacaatttttcgttagtcttcgtcgacgatgagagctgtgaactgaggtccctcgtcttgagagtttctgaatccaaaagatctcgtgtctcggcatgcttcgagatgtgttcctcttctcgatccgcgttggcagagatctgagcttgaagatgctcggccttcttttgagaagcatcaagaaggctctgagccttttgtagatcagaggaggtcgcttcatgaagttcagttgccgaagaaagctgagcctgaagatccttcactctggcttgctcagtcttgagcgagtctaaggcgtccttttgatccttcttgtggtcagctaatgcttttctatgggtatctgttaatgccgaatgctgtgaaccaagattttttgttttggtgatttccgcgtctaaaagagcttgtatccgcttttgttcggaagagagtttctcttctcgttgagaagctgatatcagtagagcctgaagatctttggttctcgaaatctcggcttcgagcgatttttgggttttgttctgttcatcagacagatccttctcccgcttggtcgaagccgatagccgaagctccatctccttggttttgttcaatgcggcgtccagcaagccttgtatcgcttctctttccttcagaatattgtcccgttggttggccgactcttcaccgagactcgaaacagatgccaattgcgcctcgagggttttgaccttgacatgttctccgtccagaagattctgaatcgatgcattatctttaccaaacttctcccgttctgatgcgaggtcctgctgcaaccgaactaaggccgcttccgagtcttctcgctgtttttgttgggattctagagcgagttggacctcttgttgtccagcaaccagctcgttcttctctgtttccaaattctgtcggactttcttgagcgatacaaccttggcctcaaattcatcagcacgggatcgttccttctcaataagtttttcggacgtttgttgttgtgactcgatggcagttttatgagcgctccgttcagattcgagagaaacacgaagcgagtcgagttctgaagaagtctgttcagactgtttttggacattggacagctcggtctcaatctcttgaaccttggcctgatatgtatctctctcagacaccgtggattggagactaataaaccattcaaatgtagatatacgtcagtgtattgtatatatagacttcacgaccagagtcagcatagacttacttcgattttatggtttcaaactcttttcgtacctcctcatcctcggttttcgcgttcagctctctcttttccccctcttctatctttctcaacgcatttccgatcttttcttccaactctgccttctcctcttgtaagctcattacttttcctcctagctctttcttctgggttaacaatccttcgttttctccttgaagagactctgacctgtccttcgcgcttgtcaattttccgatcgtctgtttgtgttctgattggagtttacgcaaagtatcttccgtggatgcatgcgtcgcacgaaggtcagtaagctcagaagtgactgttgatagagtcgtctgaagggtgccaagttgagcttccagtgtggcgtgagcgtcttgaagaactgagtgggacgatctgagatcagaatgggcgctttgaatggcttgatgagacgcagataaagtgttgtgttcactctcaatggaggaaagagaggtttgagtagcgttgaatgctgtggtcaggttgttgttggcagcttgaagttcttgattagactaccaagttatttggaaagcatcgaacgaaaatcagcaacctgtaccaagagaaataagaatgggctacacatcaagctagcataggcagacgaaccgatcttagctttcccaactccctttctagaacaccttctctttctctaactctctccaagttctcttccaactctctcacttttccaccttcaatctcgtcaatctctcttagttttccctccaactccctaacttttatctccaagttgttcttttccttctcgactgcttgaaacttttctcttacaccttctagctcttggagatcctttgctttatttcctagcctctcgacatcctctactagctccttgcgctctccgtccaaagcagtgattcggacctccaggcgctggacggtcgaacgagactcagaaagttcatctcgcgtagatgacagattggaagatgcttcagtaagaacatcaatttgagagttcaactgagccttttcagagctcaactgggccttctcggagactaggagagaaatcgtttgttgttgattggagagttgagcattgagcgttgacaactcgatagaagctgtgctaggcgaggttgctggtttttccgaaacgagtttgatgggttcaggcagagaaagtggagttgattgcgaatcaatgggttcgctcaaagtgacaggagcctctacaggctcgtctacaaggatagttgtgtgtgccgaggaattcttgaatccgttctcgacaggaatctctgtggcagctgccgcgatgctggcggtgagatcttcgacttcagccaactcacgactgcaagaacaaagacaagggtgttttatgttagcagttacccccagtttcttggtttgtagcaaggtcgcattgctcacctgtccttggacaaatccaagctagctctcgtactagaatcatcatctaggataggagtggccgaaacagatgcgcttgccgagtccttgtccgtagccgctttcttagctttcgcctgttttttcttgagctggtattcaaacaatttatttaaaccattgagcaggcaaaagaagaaaaggaagagttaggcttggctatcgatttgcatactcagagtcgaaggttggacgcgtgatcggagatgaatgaggaagaaacagaacggagaggctggaaaaaggaaaaaaaaaactgtaagcaatacacagacttaccaacgcctttgccctggcaactttttcaagtcttgccttttctagatcagcttcgtccatactttttttcttttagaagggaggagagagagcccgacgggtgttattagaggagatcagagacggaaagacggttgccagctgggaacgaacatctcgtctggggctgtgctggcttatgtacaccatggtcacgtggttattttgtttcatgctcatgttatccagtcatataatacataaatggaaagagggagatacgttatagagattgtatgatactagatatacagtcattactgtaatgtctggacaacaatttccatctgttgacgacgaggaggaaaaaaaatagggtttcgtcagaataagaggcgcacacatctgcattcaaggatcaagaacttacgtccagcactccattttcaatttcacttaatgcaagagtcgtttgcttcagctcgccttctctgatgcgctgtcctatgctattcgatgtgaacctttcaagtgcgggcgtgagatcatcatcggacggatgaggccctggagcaggatcttccaataaaagcgtgaatggtgcatgagtagattcatctatcaatcgatagagcatccgaaatgtgaagaattgattagcgacgagagattcagtggggtggcagtgaacggaaaagcgaacaaacctgagaggttgagaggagatagagctccgcctgtagctatcatttggagcaaaagtctgcggaagacaggctccagagtagactttgttggcgcgttgggttttcgtatcctttgaacgcagaaggtaagaatgtcaagagatacactgataattatctctgatatattgatggagtaagaccacaacgtacgggtcggtctttcgcctctcgtctgagctctttgatatctgatccacgtcatcaaactgaaacaaccatcgctcagaaggaaatccctctgcagacatgaaaatcaaaacgactgtccgagcgttcccctagaagaaataacaaatgcttaatccatatcctacgatgcacatcattagcgcaaggtggatttgggcgaaggagcgacgtacctcaatgagttgtttcccgatcacctctagagatttccctacccaggctctaactccttcatgcctagccatctggaccacgactccccatctttgtcgtcgtaagaatagttcagacgggtatacctgtctgacatacaacaaggtatgtatcgcggtttcgactgggatacaggagtttgcacaggctacaggtttagctatgcagattcgaggttaaaaagaatggaggttggcaatgtagatagacatacgaaaatcaatgtactgtgtgacgagttgctcgaaggacaatggcagggtattaggatctgttgctctgttcgatcgagaagagcttctcggcatgatagaccaagctcggcggcgaatgcgatgagcaaaattgtatcaacaaacgctgaaaggacatttatgatcagttcaaccatgagctttcgaagtaaactgagtatagaggcgcagaatgtacgatcttgatctggaccgttggctactcggcgtaagagatctcattgtaggtgtgtcgttcaaccgaaaacagaatacatcatcggagaactcagaaggatttttgaaaacatatctgaatacataatacttggcctaaaccgcaatgctcgttttagtctgatcgctggcgactacttccacttttgaccatcaaccatgtcgtcctcagcggactatgccaatgtcgctggtgggtcgttgaagttcaagggcggcgccagctccaagaagtaaggccaaatccgtttttgtcgtgtggatagtactgcttgcttcacatagatgatctctgaggaggcgagatctctatgacaagtgataagcacggtcgctaacattcgttcgtacatctattcttctgcgacactgtgtacactaggaagaagaagtccaagtcgtcttcggtatctaagccaaaggaggagattgttggatcaggagagggaccttctcgggaagggggctctcgaagaaagacggatgccgagaagcgattcgaagagattcagcgagaacgagtacgtcttttcactgttctttgtttgtaggtgaatcaattcccgacactatctgaatctttatatgtatttcctatttgcgaagctcgcggaaaagattgcaaaaacagcttccaagacgcacaaggatcgcgttcacgacttcaatgcgaaattggagagtctttccgagtacgtctctgaaaccctttccatattgcctaattgtacgagataattcaaacctaactcattgccatgaacccaattctctccaggcaccatgatatccctcgtgtgggaccaggataatacaaccttctttatctggtcttttattgttattgtatacattctctttcctactttccaagctggtctttctctggagaaagatatacaccctgtggaagatggatggctgaccgatcgctgctaagctaacactatcatctttcagatgtatcttacaattcacagtctactcattgagttgtttgaatcctacaacttccaaaccgactctagctgtgttctcgtaccttccttatatgcagaaaaattactcaacgcaagatatattctcgagaaagaaagctaaatgaaagacttgggttgtaaccagccatgagttcatcaagggtagtgccctgaggctaactgatcattaagctcaggccttgtttattattgtgttcctctggcccatcagtcccttttcttgcccttgagccgttcttcttgattgtttttaggttttcctcgtttgtcctccttgatcctcttcaaaatcaacaccctcctcctgatttctctcaacagcactcccttacatccctacatccgctccgtgagaatctcgaagaatgaacggaccagatgcaggtggaccaacagccgctctttcactaacgcgaccgacttcgccctctgatttaagctccttgatctcccaagatttcacttgctcttctgcttctgaaacgagctttgccacctcatcctcaatagcaacttctatctcatccggatcttcctgtcttgacctcaagtcagtgcagaaaccggtatcaactaccgatgatatcactactgccatggtggttgcgtccttgcctgtgtctgccaaagcgactgttgcaagcctcactcatctgggcagatccaggcaccgttcaaagtcaagcgtaggatctagacgggacaaccgaagaggaagatcacaactgggttcaggatcggtgtccggatcggctggccaaagaagtttcgacacggacgaaataaagaagatgagtagagacgagctcgtcaagtgtctagagtgtgaacgtgacgataggaacaaggtaacttcaaagtgacattgaggtctcaccttctctcgaatttcttcactatactgaatactcgtcttatatttcctcaccttatctgtgtgcgacttgaacccacaagttaaaatctcaagtcgaggaattgacaacgagtcaggacgtattacatgcatcgaatgagcgtctgcaaatggtcatcaatgcgcacgtccagagtgaggaagagcacgaacaagaacgagtaagctgttttcttggtgggggggattttagtttaatgctatctgtggactcatcgctgtaagctcggatccgataggttcgagtggaactacagatggctagcaagatagcgcatatccagaaatcaaattatcagatagctagattaagaagagagaagagggaattagagaaaaagtacacggaggaggttagtccaatctagatttttatatgaaggttacctttactcagtcatctatgctgtcgtaaatataggtgaaaaactttgagtctgagcgacaagcactgtatgacaacgagcaggttcgtgtaagcgtctgttatgtttaagtcaattgcgctactctgatagatttaaatttgatgacattggttctggtatcagcttttgaaaactagatgtcagacgttggctagtcgacagcctgtctctgaacttccgtcagctcgtaccgtcaatccccccgattcaccttctgatagatatagcgttggcgaaaacgctcagcttgaagctattcaagaggctgatgtaccaaacggagacctaacgctggcacttgacgacaggctcaacatcgaaaccaagatgaagacattggaagccgcgtatcagaatattcgagaaactctgaagaaaaacgaagaagaggtagtaaatctcaagcaaataaatgccgaataccaggtttgtcttccctccccctattttcacctcaacaacataaactaagatgatctcctcttcagcaagagattgtagcgtatgaataccttctgatggagcgcaccatctctggcaaaatgcaagacacccagcttctctcacaatcttattctgaacaacctggtctctcatctcgaacaacagcatcttctcaacctgctgaggtcggatcatattcctcatcccgcagcctatatgctgtgcacgaagaagacaaactgagcactacaggagtagcactggatcctgattttgcggacagaagtttgagcttcagtgagggacaggaagcgatcgataagggtatgctagatccagaattcaaagtgaccgtagcggataaaccagataccaaagatgaaaccggacagggttatgcgaaaagagagaaaaagggcagagttcctatggaacagacattagattcggttctgattgaactgggagtgaaaatcgaaggcgcgactcaaggcgaggtactaggtaactttgctgttactggaaggtatgtgatctccgctctcccgttcggtaccgcaatgtaggttatgcgcatcaatctactcatttattcttctttcagcggaatggatctagcagccgagctgggccgagccgaagcgggtcaagaagaaggtaaactcagaaacctgggtaaaggagacgatggtgaaggttcgttcgatgtctcggaccatgcttttgtgggatgttgtcagcagggagatgtaacttgctgaatatcgttctcgtcttctccctacttttttgtcaaaaagctcttctatctgaattgagaaatcttgtgagttgctctcttgacatatctggtcgttcgtaatggccagattggttgactctatcatcctcttggctgttttaaagagggatgccaacaaggccctcactctatattgctcaaagatgtgagtacattgtggccatctctggtccgaatgtcttttcttcgatcgacatgactgattccaatctcattctgctcttttcaactcaagcttggaccgaatcttgtgtacgtttgcctccaacacgttcaagtcatacaaattgaattaactcgtttaacgatttgcatgggacggatgacctgatagctattgatggatttgaaggtgagtacatcgttcgttggtagagaaacattctgcaatctgacacgagaagtatttgccgtacatttcaacagacgtactaagcgcaggttagtacattctattgcatatacctcctcagattatcgtgataacgtgtttttgattttcttgtagacaatggaaagtcgctgcagggatccgttcgtcgactgattggaacagctcagcaaaagaaaacgaaatcgcgcccttctttacagaatacatcatttcgagcagctggtgagccagttgccaccacggtatcatcgctcttacccatcgacaccacattttctaaaccagcactcctatcttcgaagaagaagagtcgagccagtgtagattggaggagttttacttctttgtaagtcatttgataactgaatttgttggaaataggatgcttatcttgtctatccatgcgttcaacacaatagcttctctccttcttcgccttcgagcaccatgttctcttctccagttgatacaccttcagatgagaaatcgagtatatgtaatctctctattgctttaaaacctattgagacgtctgatcctccctctggtcgaaaactgtctaaagaggaggagagagaagaggaagaagatcgagttcaacgccaacatacatcgctcctccaaagacagcttcaagatgctgaggctaaatcgagcatatttgttgcgcctgatgttgaggaagagactatcggcctgtctagttcgagtgacgccactgtgccagcgggacaaccttctcagcagatcaccacaaacgtacaggaggcctgggatgattcagccaactcgtctgacctctctttcaagtcttgtggagaaccaggatgtttaggagtaggaaactgtgaatcaggccatgtttgcggaggagtagattcttcgtttgattctagtaggggcccttagatctgagcttcaaatatttccttccttttctgccgtactagtcttgaagtttcctctctcttgcttccgtttcttcttttccctttgccttggtgtttcctttgacgtcgcgctcacgatatcattctactactaagtacatacatccgatcgcgatacatctaacgacagttttcttcttatcttatgaccacattttcttccgattttcgtaggacaaacttggatatcacagtgtggaaaatttacaagcccatttctctgaacctccttgctttgccttggtctctccaatcgagtgatttgtctcctactcccttcgtctctacaagaatgggctttattcctatgccagactttccttctcctgccggccgaaccacttccacaggatcaacccttccgccttcctccgcgactcctaaaccttttccaggtatccagccatgcttcatcaacattgcatggccaatattcgtgtttcctaatggcgagtcgaccgtctgagcaggtacagctggtggaagagggttaatcgaagaggaagatcgattcgaggtttgaggcagagggaccgaaggtcgttgttgacgcctaatcgctgctctatcatgatagattctcgcagcatcttcggtcgaaagacacgtgatagatgacgatgacggggcgttcgccgatacagctgctgatgagtccacagattctatagaagtcggtttaaggcgcttggcaggacgagacaaaagggtctctcgaagttgacgcatatgatcttttggagtaggttgagatcccatggtcggatgagacacaggaggtggtgcgcgctcatcctcaacagaagcactctcaggacgaagggaagtaggaatgagagaggaggcatcggagagtgagcattctgaacagggtaaggttgggtgtaggtggatctgaaagagagaaaggtcaattggttcaaagcaatatacgatgttgacgttgagcttcgcttctacaaaattgattcatagccaagagaaaatgggaacaaacttcgaaagtagtcgaaccgatccggagaaagtcaccatgctggagttgttccggcaggctcgccttctttgcttcactcaatcttttccactttttctttaccagctttccttctcctccaggcttgcgccttcctatgaagcttccatgggtgcttcccgagtctacgatccaccaggcgcctttgttctcctctagcttcgccttgctcgagtttgctgttcctagcttatcttgaggctccgaggttgaactctcggcatccctgtccagataagttcctccccaaccctcctcttcgaccggcacgagcagttctctttcagtcgaaaccatttctggaggtacaaagtagaccacagcatggcttttgctaacctcaagctctttgagacgaactcggccttcttcaggcgagagttgcttgtctcgtccgatagcatacccatcgggttgtgacgaggaaagtatggcaagcttgtgcttggatgaaaggcagctggacgagacacgcaagaggcggaggtcgtaaggtttaagttgacgagcaggagtgactgtagatacagatgagaatccacaggcaggttcctcttttcctgggaaggcatatttggaggcatcgctgaaggataacgtgttcgatgatgatagagaagagtggtagtcctgttccgggtggtgatgatatcgattagaatgagtgaacgttgacgtagtcgaagaagacgtattcaaggtcggacctccatcgtccgatatctctccttcctctctttcttcattatcaagagccttatcgtcttggctctcctcctccgtactacttggaggcagatatttatattctcctgtggtttgatcgtactgagcccataggtttcggcctggatggtagaacagtccatattcgggttgccaggtccaagtggagtttgacggggttgattctggtggatgggaagctcctgccgcggtcatcatagaactaaagattggttatatagagagcccttgatgttgttagagagagggctatgaagacatctgatctggaggacagttcgagaaggaagagagtctcaggtaatggatggtgattgaacggtcaacaaaatgaacgcaagacaggtcttccctttttgagtctgaccatcatttcgtttccttctcttgcagcctccggctagatatctccttgccatacgatctcttcatccaagctattgccaagttactttgcgtttgatctcttcagtcagtcattctgttaagttgagttcattgaccgttgcaacgaaatcttacctagcgctactttcgaactctctactcctctgactttaggacttgaccgaaaaactaccatatactcgaaacatgtcttcctcagttccctcgccatcgtttcatccatcaagaggcatcatggctgatatatcactgtctagagcaaacagtccttctttcgtcgatgttgctcaagagttagaggaagaaattgatgagcttgaagaggactccgaggacgagactccctcgatagaggagacccaaagaaggagacggtcaatagaacgggcagattctcaatcaggtcaccgggccctcttgtttgcgaagggtttgtctggagaaaagttaaagatatcggaattatcagaagagataggtatgtccgggtttatagatctccatctacgtttctttgaaggatgggacggaatttacatcttcccgcctagcgccttgtgctcatgatgcgtcttgtctctttgtagaagcgaagacatctgttgagaacgcaaaacccaagctcgagacatccttgctcaaaggtaagctgaggttctcaatatgaaaagaactaattcgacccttatcctgatcaatcattcgttatcttgactatcttcgtagaaacatgggtgcaagtccaagcaatgatggacgacccattgtacgactcagatgaatacgaagaaccgatgaagaccagacaggaccaggtaagctcaagtcattgacatttgatcaagtctttcccttcctgactctttgacttgcgaccatagctttccatcaacctaggtaactaactgaaattggactcctacctgctcaatagacgtctgtatacatgccaaactctgaccatcctgctcttgttttgtctattctttgtgtaaccttcagatcgacagataccggtccttcgacaaaccatcgacttcttcggtccactgctcccaccttcgtcaatcacagtcaatttaactgctgattccgttcctgattcctcttcaatccagtcacctctcgctgctagcgcatcgaccgatgccccgattgctcctgccgcagccatcgaacccgcttctgcgccttctccgagtcttgcatcacctactttctcccctccggcgaagaaaccgagaacctcatacgggaggcgatcagatccggcgtcagagatgaagaaaactccatctgcatcagagaccacttcgaaaccaccgtcgagtataggtacagggtcgattccgaaactcaagctgacatttggaggagcggggaaacagaaggcatcgctttcagtcagtcaccttctgcctttccctcttgttcaaatgacttagaaagcaaattaattctgttcatcaacctgtttgctcgtttgcttcccaggctctattgaattgagacaaaaagtagcaataacgtgtatatctatgatccactggcagtccaacgtctgtgaacttgacagccatctcgaacatgaaattcaagattgcatgcatctaatttcatgctctgatatgacagaaagatcaaatagatagataagtaaataaggggagcaaagcacatgcccaggagatgagaaagccgaaacaagaaattaagtataaaccccccaaaaagaaaagaagaacggaaaagattgaagggaccaaccgaaacatgctcgtgatagataaaatgaaaaggaaaagaagagacatagacccagataaaaataaaatgaaaaaagagacaaagaaaagtatggaataactccccaaccgatctgctgatcaagctagcccttcaggttcatccaaacctgggttcgtcacatatggcggtcttgtgaatcctaacccaacaattcggcctttctggtctgcttcttccatctgagcacttaaacccattgtctttaacggtgagtccggtagaggtggtgccaaagtaaaaggctcaattccactgcccgtgctggtacccaatctagggctgaatgcagattcttccgaggcagatgacattcgatgcatttgttgagatagcgaagctatcgaaggtgaggcggatggcatgccaggtacgggcttcctgcggaccgtccgcggggatgaaggcgaactgattgagttcggagacgtgggtggactcgtgaaagagaatttgccaggatgctgttgctgttgtcgttgtaacgcttgcatcgatgaagaacctgacattctctgagagacttcgtgttccgatctagatcggtgatggaacgcagtcatacctggaggtccattggacgtctgattgtagatcgagattaattctggcgcggagatctccatcggaggtctatgcttgtggcttttggatccgaacaaatgtccaggggagaagggggctttaaatcgtttcctactgctgtgtcctgcgcttcctctgccgtccttgggtgaggtaggactagggagggctatgggttcaccgaacccggatgagctcatatctggtgttatgtccatacgttgaccgaactggttcaccaaaggcgatgagctttccccataccggtagtggtcgttaagatccgttgtcgcacccgaaagagggaaggtgttggagcccacaggcatatcgggtcgaaccattataagagcagatatctcagccggcaagggtggacttgcgtcttcgcttgatcgaacccatctgaaacctcggaaacctttcgagcttttggaagaactcatccttggtcgttggggagagggaagaggagacgaagaagtttccgaggaaccggcatgttcgttcagatcaaatactttttctgcaagtagatcgtgagatgaatgcatgggtgaacccttttcacggggaaacgcccagagtcggtcagaatgacgggacttgaccgagagggtgtctgtatcttccaaagagcggtgtgacgaggcccgaggcaactgggcagggaaggatgtatttcgtgtagatagcaaactcccattaaagagagaatcatggttgatggtggaaacagtagggctgattggcgttgaagacgaatctttttcattaccgttgatactctgaatcgagctcgagcctgaaggaaggtcatgcgagaccccattaccaggggggtgtatcataacagatgagtccaatttgaccgactgagccatacggtccataggatcagatgcgtcaattctagccggaaagagcagggcttgatccttttgtcccgctaatgaggtgaacagggcatggcttcggcttggtactgataaatctcgaggcgagagcgagcgaaggactgagcgaacaagcaatgatctgagtaaatgtaatcgctcgagtactctagatagaaggggaacggtaagaaaaggaagatacggactgttttctaaatcgttcaacttatcgtgcatcaacagcgcacttcctctgtttcctacctcatattcatcatctccagtcccgaaggggcttgtctgtacagaatccattgtttctgtagtcaacgagccttccgttccaaccgacttcgccactgctcttctttttagataagccagttctacagccgaagcgtcggacgtcggcgagagcgtctgttccgatccgtctcccaaagctttggggtgggagttgtcaagatttgagcgagtggatgagccgaggacggaagaagcgacatgaggggaagtcgtagggttcaacaaggtagtgaaggcactagtattagaatccagatcaagcgtcaagttggtgttcttcagtcgtctaggcgcagacacttcgcgagcatcggaactagaagaaaccggattgaagcccactgaaatcgggtggtttgggtgagctgccaacattgaattgacttctctagcattcagagtaaactcatccgtctcatcctcgtccgagtccgcccgatcaaaaggcgcagataaattgtcaaatgaggaagacaaagggaaagagaggtcttttgctgagagtgggagatcccctcttccctttccgaaggcagaagaaggatttctcgaatctctcagatgaatccattccaactcgtctgaaggaagcatcccttccaaaagatcgtcgatttcccctcctctctcttcttcatgcttactctcgtcttcgtcctccagttgagcatacccatcatctgcatcgaaactatctccgaaggacgaatgttctttgtcttggctatctactccggagaacttggaaagcgtagtttgaacacctttctcagatgaagctacaggctcttcgtcgtcttcactatcgactccttcctctcttacatctactgagatacctttctttttgatccatgcatcccaccattcgcctgctcgatcaccatcaattccaaattccaaagatccaacaattcgcaactctggcggtttgaggtttggagtccatccagaatcttctcctactggaggcgccaagaaatgagtagccgataagggttgagcggcttggaacgtttgatttagagatgtcgaggctaaaggatccgaagcaggtgttggggtgtgattggccggttgacgagagagagatataggtggcctttttcgtttagtcaaggacgctggagaaagtgaagaaggcgatcgatgaaggagagatctgcctggcgagccaagctgcggataagggttgtttgtttggctaggcgaaagacgagagaacgggggaatatgatcaattgtatgagagtagccgggtggaacgttagatgaagaggcgtgagaggccgagtacgttggcgaaagagtttctaatgagtggttgtgagagtggactgctgtaagaggcgtcaagtgagatgcgggtaaacttcgcgtaactgattcgggtgaggcagtagcgtttccatccgatccttgatggtggtacgccgatgagctatcaaaaacatctccccagagtgacacccatgtatcctggccgatcctcatctttgtcttttttggtttatgtttctttgcttgattcattccttcaatagacgcatactcctccaatggaagcgtgttgatgactagaaagagaactaaacctacggtagtgggtaatctatactctcgcgcgatgatttctaactgagccttgtatgtgggctgcaagagaagcaatgcttgaggataacgcgacttgaggtttgctggaggactgacacaaaccagatgttttggctttaaaactacccggcgaggagacgaggtaacatagacagctgatttagctggcgacaggagaggcgacggcgcgcgtgatattgaaccaacggaatgggttgttaacaaggatgagctggcagatacagatctctgctgagaatgtctaccagatgaagttgagggcaacgcgagcgagcttagaaaagaagaacgcgagtctagagaccgactttgcggaagagagaggttgactccaaacgcctgagcgattcgagcgatcttttggggatccaatcgagacgttggatctaaattttgtttccaacgcggtgtttctcgtggtgaaagttttgtcgaactatctttgtagtcgttgaaattctcgttgtcgtaaaatgaggacaaagacaagctggtagggccaacgctggttgatgcttcaggcacgccttgatcaccagattgaggcgaggtatagggggtttttcgaggagtcggccgtcgaggccaagctgtctctgccgacatgagaatgggagctttattcaacaatgacggttgtgcatagagattaagtgacgtaaacaccaaataaggcgaaagaatgagtaactagacccatttcgactgatctcaaaagaagaggcaggacacgactgcgtgtatcgaaaagcttaccttgagagttcatcttctgacaagacaaatccttgggcccacacaaacccagaggctaaaggatccagatcaacaagaaggaatacaatgaggcgaagagtgttgggaggtgtggtagtcgaatgagaacgaatggatggatgtatgcgcaaggaatcatgtctgttgtcagaagaactatcatcagtgagggatgagagttgaccgcggatgctgtgcttaacctcagcacgtgattttagcatgggcagcacgtgacctgcccgacgcgacgcgtctcctcacgctcggcgcgtgtctcgttcttttctcttcttgaaacctttctttggatctccaagctcattactgttcgctctctactttctcatcttggtctctgtgtaaagcacgacgtgcatagtacagatgagtctggatgtcccttcaccttcaccctcgccttcgccttctccatcgttgagtttgattcaacaacaatcaattgcaatcactactcaagaccgcgctcactcgtctgcatcaaggtcgcccgaacagagcagcactcctacggcctacctgtccatctcggggttggaggacggccaggtggctaagctgccggtttttgtgcccactccagaaacagaagccgatgggttgtttctcactcaagatatacctatcaacaaaggaggttcggcgtcccttcgatctattgtagctcaaatccccttttatgatgctcatggacgttgtctctttcactttctcttgcactcttttttgttctcttttcgttcccataggattctcatacatcccatgtgcaccttcaccagtgtcctcaccttctccacatcatccgttccttcgatacatcccacaatttgccgacgtttctattccacacctttcattttctgaccggtcggctcatcttcgagtctccccctcggcgttgacggcgtcgtccgctaccggctttcgttccggtagagcgaccacacccgttcggtccggctcgttctattgcgagtttactgttgaccgaggaggtggagattccccgacctcgcatacctcatctgcgacactcgacggagcccacgtccggctgggctgggggcgaaaagaagctagtttgaacagcccggttgggttggacggttactcgtacggtgtgagagacaaaacgggcgaaaaggtgacatgctcgcggacgaaaaagtactttgaaaatggattccgaacgggtgatgtcgttggactttggatctcgttaccggaggaaggtaaagggaaagggaaagaggtcgtttgggaggaaggaaacatcccgaagatggtagacgttcaccaagatcccacagccgatgagattgatcatgagcaagttcttgaaaagactaaccccccctcgggtactaccgatgttccagcacccccggtggatagaccaacatctccacaaatcgtccgtcagcggatccctattcgatataaatctcagttgtatttcgagacaatagatccacctccgaccaaagagatggacaccctgttactacctcctccgaaatctgtgtcggcacctgtagtatctaccggaacgacctcgacaagcaatgggaaacgtaagaagtccacccgaatcacgaacaagactttaccttccgttgactccatgcggcctgcgatcggcgctcaacctcttcgacctcttcccgtactcaaaggaagcaagattgcgttctttgtgaatggctcaagcccgggttatgcattcaccgatctgttcgactatcggcctctcccacctttcccgagctcagtcaaaaagacggtaaagtcaaagagcacgacacagaccgggactggaccggggctgggtattggctcaggcggcgcgacggatgatgggacgttaggatattatccctttctaagtgtctatggtggagggagagtcactttcaacccagggccagacttcaagtttcctcccccggacgatatagaatcttacttggacagtcaggagctcatgcgacagccggaatcgacgtcgacgtccgagcctgcatcggactcgatggtcacggtcaaatcagaatcagggtccaaagatgaaccgacatctactgccctcccggacgttcttcctaacctggctcttgccgccccgatgagctcccgaacgtggcttccactttcggcccggtacgaaggatacatggaggagcatcgagtgctcgacgagagggacgaacagacgttcctcaaaacatacgtcgctccggaggacgtcccttcgaccgtcaatctgatccgaccgaaagtggaaaaacgaaaatcaagcgtcttggttcccaccgtcggtcagatgccacctggaacaaccggacagacgccgacagacgaagctttgtcacatcaggagcatgacccgatactgggttcgacagaggcagtcgacaagccagctagctcctttctgggtccggcgaagaaagtctacaagaggagtcgtcttgggctggcgctctcgtcggatgatgagacgatgaattcccaccccgactctcgttcccgttcccactcacctccttcacctgatatcccccttctgtctgtatctcaaacaaatttgccagagacgacgacgacgacgactgtgtcgatgccgactaccatacatcccaccgacgttccacctcgcttgaccgagatggaaccgtcgttcatcgggtccacagcctcctctccatcgtccacatcaccgtcatcgtcgttcaatcgttccgtactcttctctcaatctcagtcgaacccagcccctgcatcgacagtatcccccccacctaacggcacctactctcatccgactgagccagagaacacgagcgcaaatattaacgcaggcacaagcatggtcgaccaaacacccacgatccaaacagacaagaacctgtccagctcaaggttaggtccagattcgacttcggatctgacatcagcaaccgaggaaacgcaggctgataacagcaacaattgacatggttatcaacaaagacgaatgtgatcacgtcgagcgtagcattgagtgagaaaaggcagaagggagagaacagagaccataggtggttggtaaactgtcgagaaagatgataactcgaattcgatcggaagaggtatgaacgattgatatagaatggatgtaggacatgtcggagggagaagactcaagatggaaaggtcgtccagaataattcggatggtcgaccccttgttcctcgaccactctctcttcttttgtaatgatggagggagaccgataatatgtatatcaaatggaaccggacggaacacacagagaaacgacaaaaagagaaacggctaggagtcatgtctgccgcgcttatatgtcaaggcgatttccagaaacgagcccgaatgaaactgagaaaagagttgggagaactttgattatctataaaatagtacatcacataaaacaaggaaaaacttgggaccttgaggggagggaagcgaatggaggagagaaaaatggaagtgggaaacggggagatgaagggaggaggggaaaggaagaataggatggggatgcgacgatgcgagaccagctctacagagaagcatatagagtggggttcaatgataccagatcaaggaggaaaccccgagatcggtaaggtgataaggagaaaaggctatcaggacaagacgagaggagaaggtggtagaaagaaaaaaggatgggttgtcgacgcagggattgacttctacgtaaagcggataagag

SEQ ID NO: 1958 - DNA, 2635 bp, Xanthophyllomyces dendrorhous
gtactatccgctctgaatacgtgttgcttgtgaatgtgtgggtggaaaggaaaggagaaagtgaacagagagaagtggaaggggtgacccatgtctgaatgtttggataaatggatggacatgataaatatggaaggaattgaaaagtgagaagggacgttgggagtatagaatgagcgcaaagaaaaccatgagtagagaggtaggtataagcaacaagcttaagagaaaagagtctcagaggaacatgatgacaagatttgtgatgtcagagatcggggcctcagatgcacaggctcttccttctttggatactatcgcttttcagatcctgcgcgtcggttggtctgtggtgtctgaattggccgtatcgggcaagccgaggttgcggtgcctgctctgactgttgaccttcggccgagtcgtcgtcgtcctcctcctggagtgcactcatccaatctaactcgaccccgagacttctcgcctttctgtctctgagcgatctatcgatccgtcttcggcctacttccatgacttgcctgacgagtctggaggactcttcccgctcgggtggaggggtgatagtgagcgtgggaacgatcagctggtcaaccctcatcgtggtgggcggggtggaaactagctcgggcaggtcgatcagggctcgaggtggtgtgacagttttttgatcttcctgttgttcccgctgacgtcgggcaagcaagaagggtggaagtctgctggaaaccgagatcggggtgtggtcaaagtacgacgtcgtttcttcctccggggtggtcaccgagatactgggcgcgaggaactgggtgacaattgcctctgggtcggatgagcgtcggaccgggagatgcttgttggccgaatgcttttgccgttgttggtgatgctgatgattactttgatggtacgctactctgcgctggatttgagcgagcgagggaagagagaaatgccgcttgtcgtcgaatggtctgaccgctggtccagaagaaggtagatttctagaggcgccgactccgaagattgatttcagagggccggccattggatgcggaagttgggcaggagcgttgttcttggtggaagagattcgccgtttgagaatggcaaaacaaggacgacgaccgagctcaacggtttggtctccttcgatctcgccgtcatcctctgcctggacaagcgtagactgagctccgaaagtggacgcgcctattggggtcatgcaactacctgaatcagatccgtcgtcctcatcggaaccagaatggatggtcatgccaggaacctcctcctcttcagaaatagaatgttgttgtctagaagaaaagtgaggggacatgtcgtgagacgcgacgacggagccagtgagaccaccagactgttttacgggcaggatttacaaacaagtgatgatagtattgatggccgatgcagtcagccaagtgtcatgccaagttcgagtcggaaaagggggaaataatcttagcaacttacacgcagatccctgttgttctcagaaggagagaatgagaaggcaagaggaacagggctcgacaaggtcgggttgacttgtgtcgatcgtgaaggaaccatgtgagaaggtgataggtggagagcttttgggctgctggacacccgacggggcctgagtcggacagcggactgaaaacggaactggaattgatctgcttgaccaaggcgcaagagaagagacaaagaaggtaagaagagagagaatgccaaagaaaagaaggaattggatcgcgtcagttgatgcacgcatatccatggcagaaagcaaagatggtgagataagctgaccgtcctcaggcgtggaatcactgtcggcttcctcctggacggaagagagtccccaactgggagtgttgcagatggtctcccgacgcctggctcgctcgcgttgagcactcttttgagcggctttctcggaaggactcggggtttggaagcaaggggtatagaagagttctggagacaagtcgggagaagagtaaagcactgcttcggcacacgtctcggcgaggaaggatgaagaggctgattgaacggtgtaagctagcatggcagacaagagaggcagaggatatgttctatctttggacgaggattatcttggcgctcagggctttggatgataagagttgtgatctgaacgagggacgatcaggcggtgtcccgaacgggcagaaggatagatacaaaggggaatcagagacactcacaaggctcctttctcgggaaaaagcagaggacaatgcaagaattggacgatgtcttgagacacgaaggatagagacgcgacagtcaaagagtgtcagctcaggggtactcgggaaggacaaagcgatcgacccaggggtaaaaagaggtagatggacggacgcgtccagaacggacgacagacgaccagaaccaacggatcactcacagacaaaacaagaaagaaaggtgcagactttgacgagaaacgtcgacagagtgtagaacgaccagcgttagaagattctttgttgtgtgaatgtgagtgttattttttggtgtttttctgtatttttattgtgtgtatattcttgttttttttttgttttttttt

SEQ ID NO: 1959 - DNA, 7261 bp, Xanthophyllomyces dendrorhous
ttttttttttgtttttttttttggatctaccaaaggaaagaaatggggacaaaggaatggaaggggtggagagaaaggagtctaaccgggtaggcgaaggagaaaaggaaaagaagaaggaaacgaaggaagagaaacaaacggaggttgttcctatgaagaagaagacaaaacagaaggaaaagagacggacaaaagaaatagacgaaatagagagagaaggtatgtgcgtctaatgtcccaagcgggagggggccgatttgttaacttgagcgtgcgcgtgcgcgcgtgcgtttcattcgtcaagacccgcctcgttcggatgcgtgtcgggcgtgctgacgacacgaaagagcggacgtgatcgacgggaagatggctgacttgatctcgtctgatctcgtttgcttttggtttgcttttggtttgctttgggtttgcgttcgtttgcgttcgtttgcttggtcgtccaccggcttgctcagccgagcttcccaaaaatacacgcgtccgatgtttgctccgggacgtttttcctttgttccgcaacgggcgagtgaaccaccggaacccaacccttcttctcatattctgggtggcgtgtgcgatctccatcgttcgcctccctcgggcttaacatttccacgttgtataacagttcagattattctaattctttattcgtttcttcagcccttgctctattcgataaagtcgttcgtggtagagtcatcttgcacagatgggttcttttggctgtttccctcgcctatctcctcctccttccgatcgtttactctggttccaaccagtcactctacatcttttgttcttacagtctcagtcggcagaatcctatgaaaatcatccattgttcttctaactatctatctttttttctattgttacggtcatcattgttctcgttcacatcattgttgtcactgttatcgttatcgccattattgttaaaatcactatcttttgttgtatcgccattgagtgtaatttatggcgagacatcctacgcaatggatgaatcaatcgagtaattaattgagtattggatccgggtcggtcacacttctcacttcacacttcacacacacacacacacacacacacacacacacacatattcgggtaaagcagagaatacgaaaacagatgaacatagatccgagtctatcagaatcgataattaagaaacctaattgaaacaatgaacagccgaagcaattggagatctaatgaaaagaagaaaagtacgaaaagagaaacgaaggacaaaaagacgaagagttggtagaggagagaaaacataaacgttggaatttgtagaacctacgggtacggctcagttcatatatgcacgtacgcgcacacactctactactttcctctcttcttcttcttttccccggccggagccttgggaaggtcgtcgtcgtacacaaaccggacgtacgtcaccttggtcctcttgatgatggacgtcaacggtggtaactttgttagatcaaggtttccgtgaacgtccagctgaaagaaagtgtgaaaagaaaggatcggaatcaatctctgaacacgtgtacggacggcgtatgtatcgcggaaggagaaaaagaagcagggaaagactccgtcatattctatgaagaaagaaaatgaggaccaccctcgatgctcttcggagaactttattgaaaaagatcaaatggaaagtagaataactcgaaaacaaacaacgatgaaaaaacaataatgacaatgaacttaccgaagcagtcggcttgatgcaactctttttcagctcagccgaaatttcctcagtcgactgatatgttcgatcagctccagatcgactgttggataccaccaaagatttcttccatttcaccatcctgtcgcttgaccgtcgtgcttccacggcgctcgtcgaccccgaccaaagttgttttctcccgcaggtagccgacgagcggtttttccggataggtgacacaaacacctcatcctccccaggtccgagcaaatgagttttcttctcttgatcgctaactgagcccccgccattgagtccaggccaagcaccatcttcttcttcttcttcttcctcactctcgctaccgaaagacactttccttcctctaccggttccagcgccggacgtgcttctactgctgctgctactcgccgccgccatcgccaggggacttttcttcttaggtccgggtgacgatggccgatgctcaccttcccgacgaacgaccgtccgagtcaacgcacagaaaagcacaccgttcacaatcgtgttgtgatccgtcagactagctagatctttgctcaacattggtggcggcgccggcacaactgggtttgccatcgccggcggtgctgctaacgccgacggaagcggaggaacgggaggaggaggagttagaactgttggcaaggaagcggatgaagaagacgcggtagaaccgttcaaagcagagtgaggaagtcttctgggtttcatggccagagaaggaattgtcgatgaggctatcgaatgaaccgcaccggccgaactagtcgtcaacacaccacctccacttccgccaccaaacccagttctagatcgatgcgagaccggtggcaaggcgatagtcggagctgcgcttcccacaggttcgcctgccgctcgagctgaccgacgagtaggtatcgatcgaagagaactagccggtccgctcggtctatcctgtccggttgtcttagtggacggcgaaaccaaggatggcgctgacgacaatgggaccgaagtgaaggcagaggcagaggcagaggtaggtatcaacgaggacgaaaccgaccggacactatttcccaatccaggccctgcgcctccttcgactttagccgaatgatcttttgttctgtgttgatcaaatgtctttctcgtcaaaccaacagtcaacgcctcggacggaacgtccttctgtaacccatggccgagagaccctgagctcgtcccgcctaatggtctcactcgaggtaacaccgtgggagcgatccctggagcaggagataccgacccggtcgatcttgagagcgggccgatcgagtgagatccaagaaatgtcgctgtcgtcgaggatgatgaccgggtcgtaggtgaatggaggactctgacgggcggacctaatatcgtggatttcgagggcgatgagtatcctcccctagacttgacagagacccctgggatatatccgcgagccttgttgctcagtgtcggccggaaagcggactataaatgatagaaaaacagttgtattcggtcaaatttcagttgaaagaaagagaagaaaggaaagaaaagacctgagtcaactccaaagacagacaggatgaaagagagaattatttgaacaaaccttggaaagtgctgatctctcgggtacattgatgtctcgtttggggacctttgattcggcgttggacccaaacgaccggctcggtccttgtagcctcgaagaagaaaacgctggagacgacgaagcggtacccgtcgcagaaggtagagatagtgatacagacagaggcttcaaaacagacactggtggtatactgataaacgtagaagctgacgtagaatcagagccggaaccagagctaaaggtggatgcaacagaattaggaaatgtttgtcttaacgggccgggcgatgtgatcggttcttgaggtcttgtcgactctgcctcattcagcgcaaactcggaaggcttcgacagtattctttgcgacgctgcggccgcggtcgttgacgaggacgatggttgtgaacgcgacgattttcgtttagagtgagagctcttaacaggagacttttggacgcgcttcggcgtcgaacgaacaggctcagaaaaaggttcgggaaggaccgcctttggattcaaagaagaaacaaccaacacattcgattgcgcgtttgtatatgctggttgaattcgttcgcaaattgccggttcatccaacccagcagaagtgttaggcgttatcgaatgagctgcgagctgatctggagacaatttcgggctcgaagttggagtctgatggcaaagagatacaggcgagactccgtccagcaaagcagctgatccctcttcactctgactgaaagtcagaacatcgaggcgcggttgatcgctcggctggaatttctccacattcgattcccccaaatcgtcccttgtctcatccggtggcagtctcagcacctcatcctcgccttgtccgctgatttcctggttttcatctgcgcaaggctcgatatggtctgcgctgaccacgctttcctcgtcagccacgcctcctgcatttccaacatcctcctcaacctcctcaacctccgtacggttcgtaaactctgaactgtccccattcaccacgaccttcccgctttcttcacctcgcacatccttctgaacgtctgtctctgatttatcaccgcttccatcagcgctttctaagtccatcgcgtattgggcgtcagaggtcgcgacttctgcgcgttcttcagtcgattccgttatggtttccttcgtatacacctcgacaggtagctcagtagattgctccatagactcctcaaccaaatttgcaggcgtctcattgaaagtcttcttggagatatcctcaaagtcttcttgtagaattttcattgtcgagtcttcggcaatctcctcgatggtttcttcggtgacgacagaggcgacctgtggggtgatgatcgggatggtctcctcgacagtgatttcggtaacgtcctgggcgtgttcttcggcggtctcctccgtgacgatatcgaaaggaatcatggcgatcggctcagtacctgcttcaacaggatctcccgagatacaatcctcggtgggttgagcgaccacgaattcttcttcgggctctctctctctttctccttctaattcttcctgtttggcactctccacactctgatcgagcgcacaaccggtctcatcgatgtcctcctctttgggaacgtcggcttcctcttcttcttcctcttcctcttcctcttcgtgttctccctcggtctcccattctccttcgtcctcctcgttcgcgtccaattctgcatggggtgctgcttctggttggtgaacagattcaggttcaggttgatactcaaactcgtcctcggagtcagccgacatagatccgtccgctgatgaaaacgattcgtctgctttcgccaggtcggatggcttccttcggttgtggtgaaaagttcgcgcacgggaggtgatgtatgtaggaaacggtgagccgcacacgggtacagctgaaggtgaaggtggaaacttgggagaacgcgtcggtggtgaaggagtcgttgtcgagtgaggaggagaagcaggaggagtggaaagagagctagcagggttatctatatatttattaggggattctaaacgcgtctgaggggatggtcgtcgtacgttccgcggtggtggagttgaacatggggatcgaactgttgtctcaagccattggcagaaaacgccaaagaatcacattgattctttggtatcagactagccaagaccgaattctggaaaagaagagttacagacataccactcgttacgactgataactcgcattgactgctcttggtgggtgataggattgaacgatctgccgctcggacactcggatcctcccagagtgtctttcgcctatgaaactctctcgagtccttgtgtctgaccttctggaggagcttccgttcgggagttcttgtcggaccatagaagatcctattcggattcgaatctgaatcggacccagaagaccactcggcgaacgaactacacgtcgacgcggtctctgctgtcgtggactctgtatccgaggcgtcgtggccgtgatcgtgattaattagttgggtaggagaacagacggaagtagaagtggtggatggtaaattatcagtgatacgtgtgggtgtgagaggaggatgatccatctagagcttagagaatgaagcaatcaaggtagcgcgtttgtaagagaggatgggatggacgatgccggttgatcacacacgctctctctatccaacacaaatgatcttgttgtttcttctgtggatgtacaaaatcaaacgcgtccgacgggaaccggccgcttacgtaattctgataaatttgtagccgcctgggctcaaatcctacaggaagagtacatcaattttgacgacgacatttttttccttctttttcaactggagttctcctttcttgctggtctcttctgaattgctggttgacgaacttctcttcgtcgtacaggaagaagctcactcgtctttattacacccttgccaggttagtttattatcaacgcagatggagcgcatagaatcgattgttgactttcatttgccttccgtctggtcgtctgcttcttactggtcgaccgactcgacttctcttcctttttttttcttttcttttttttaataccaaacagctcctaagcctttgaataggtcttaaccccagaagggataatatagctcttcgctattccagaaacaggtcgacacttttcacgttaaagaacttgcgtgttctttcgctttttcggaacatcatatcatggtctcagcactctttagggccgcagaggccggagacctcggtcgagtcaaggagactctggtagagcagggagttgatctggagatcaaaggtgagtcgtcggctttcgtttgacctgtgtcggaaaacctcgtcagtacgggtttccagaaaggcaaccagcgtattggtttccttctagaattgggtgctcacgccattggggtttcgcgctggccttttctctatcgacattcagatcacaccgggaccactcccttgatcgccgccgtcaaaggatctcacgtcgaggtcgtcaaggagcttctgactgctggtatgtctgctttttactatactttgaagtttctacttttttctatctgccgtaatgggcatcatctgctacgttcttctagcaatttcacaacatcttcaagaacactgatcgttccaatggcgtgtggggaaaaaaaactacaggagcagaccctttgaacccttcgtcttccggccctccctccatgcataccacactccccgagatcctttctcttctccctccccttccttcctcccaggtcaacccaatcactcaggcgcccccgccc

SEQ ID NO: 1960 - DNA, 7404 bp, Xanthophyllomyces dendrorhous
cccccgatgcattacccgtctgcccctttctacccaccgtccgacatgtactcccctcccaactctggagatatgctctatcctttgaacggagctaacaacggtgtgtattttggaaatggtgcaggaacaggtggcgctggtggcttcattccttatgggtctggaggcatgaacgggttcatccccggaatgggtctacctcctcatatgatgaacgcgccacacatgatgggttatgggatgggcggtttcattcccggacacggaatgcctatgatggatcctcaaatgcaacaggtgcctccacagcatcttcagcagcagcagcagcctggttcggacgagaaaggcgacaacagtggggttgacggtggagctggaacgatccctcctccggatatttcaaagaacataccttgcaagtgagtagagttcttggcttttcatttgaagaaaacatgaaacaatctctaaagttatctggtctcgacgttgtttcttgacaggttttatcccggctgcaaatacggtaaccagtgcgcattctcccaccctgctccccagcctaacgtgcctgttgccatgcagcagccgatgttcaaccggtccccctcgattatgtaccctccgtacgagtcttcctccccggtctacaatccctactctcaccacccccacggtcagccttcattctacccgatgaacccgtatggatacccccacccctctccaccgcctccgataccgatgaatgccgctcctcctcctcctccactcatgcataacatggccaaccctccgccgcctaccatgttctcgtccagagggggtcccccaccgatggattatgacggagataacgcgttcgtcgtcgttcctccggtgaaccaggtgcctcctgtgtttgcgcctgctcccgctcctgcctcggctcctcttcccccgtcggctccttcggccgccccaccagcgcctcttcagccatcggccgcattcgctccttcttttgttcctcagcagactgccgctaccgctactgctacttccacttctccttctacttctccctcgtccccagcctcgcgagaaacgaatgctcctggacccggcgctgcttcaccggcagagaaccagcagcagcagcagcagcagcacccgacgtcctcatcgtcttcgacgacgaaggcgcctttccccttccctcctcgagtgggaggtaagtttggaccattccatcacggacctaacggaccgaatggattcaataaaaagtggataggtggtggaggtcgacaccagggtccgtcgaccaagtgggtcggcggtaacgcgcctccgtgcagtttctttcaagccggagcgtgcagaaacaatgacatgtgtcgtttccctcatctcttggccgacggaaccgattgccgactacctggtgtcatcgatggttcgattccttctgcacctatatcggccgtcaacggtaagcacggacctgcccgaacgccttttgcgcctaatttccctgcttcgaccaagacccttcagaacaacgcggccatgaagatctcccagtcttcagccgaggttccggcagacaacctctctctatctcagctctccctcgagtcgtcggcaccgaatggatctgtgccagacaaggccagctcagctgtcgatgatgctgctgcaacctctgcctccctgactacgtcgttgtcgtcaggatctgcagctcctgcagctccttcctcggctcctacccatattgccgctcccagtcctaactccaacgcgcactcgtctgcccggcacacgacgatggtccaaggagctcgatctcagccgaccactcgggtgggctctcctgccgcttctggtggagccggtaaccactatcccaatcactttctgccccagcgaaaccctcgatctgcctcggccaatgcctttggcggaagaactccgatcgctgctgccaactctgccaacggtagcaacgtagccgcttcgatgactactcctacctccggtgctccgactcatgttcagtcgagtggatctcaacaccagaaggtcccctcctctgctgactttcctgctcttggaagctcaactgggagtctgaaagacctctctggttcagcagtaatcgtcaacggaaacggcaagaccgcagctcagatcttgagcgcgcccgctccggagaaagctaagactggggccgtatcggcaaacggaaagaagcagcctaccgcgcctaaaactgttgcccctactgcccctgttatacctgctcctcagggagatgacaaggagaccaccggggcgagtgacgatagcttttcatttaccgatgtgagtcttgctctttttttttgtcatcattgagaagggtaaattagattactgtttctcattcgccgtctcaaataccttctttgtcacctagaaatcatcagagtccggagaagacggcgtgatcgtcaagtcagccaagtctgttccctcagcgcctaatggaggaccatcacccggtccagctaagagaaacctcgttagctttgctcacatggttggaggcgtcaagggttaggcggttctctcttgcctcttttctattatctgcattataccttccatttgcattccctcttttcgtgtgattacgttcgttcgcgagaaatttggtttggagtcgccaaagatattccccttacgattgctcccccccagttttttcctgctttgaacccactctgccttggtttcttattttcactatttgatatcttttgactactcctctcgattcactctctttttatatcttccatatcatcgtcactggtcgctttccgagatcttttatcttcctctctctctctttgcttcgagtttgcttcttatctctttctataatgtaccaagctgctatcctttcgattctttatcatctttctttctattttcccgtctatcgtctttctcatagtactctctggatcttcttccataaaaaagccatacgcgcattcttcatactaatatacgaaccctgtgagctcagtcttccaatactcaatctctctcggtctgtctgttatcgtatcttccatctcgtcccactatctatctttctgtcacctaccacccacctccactccttcgtatcgtgtcctagtttgatctccgatattctccactccctatgctctatctccatttcttttgggttttctcccctccccctcttctattcggcgacgtgcttgacaggttcgtcgctgtcgcagcacggctttttcttgatctagctcgcgtctttgaatctgttggcatctatgtctttattctttcactttcttgttgtcccacacaaacaaagacagagccaaagagtgtgcctcttgtgtctctcttcgaaactgagccagagttcattatcgcgagtttgtatcaacctggggactaaacacagacctctgatggaaagctaacgagatcaaattcacttcagctttcaaggagaaatacaaagagatcttttttcttttctttttttttacgatcatacaatgattcgatctctttttattagttgttatctttgccttcgatcttgatctctccctcctggacgagctccttgacctcctccttcttcctctcgatctcttctgacatcccggacccaaagccctcggcatcattcaacgctttctctttcacgatctcctcaatcttctcttccggaatcgaggtggccgtcgtcgaaggggtatcagaggacgaagaggattcaacagtcacctcggatgcctcggcagctttcttggaagcgagctcttgctcgatctctctgacgagcttatcagcgagctcctggatgtacgttgtgctagccttggtagtttgaagcaatggcgaggtcggttccgaggggcctgcctcgacatcgaacctaaagagttccccagagaatgaaacaaggacgacaaagcatatcagtatatgaacatcgcgtgatctcacgaaaggagagcagagaggtctgaactatcagaacgaaacaaaacaaacggagagacacaacgacttacttgccccgagaatacttctcaaccttgatcgacacatgttcacctcgtccactagctagaagaaccttgatcatcacctcgacactcttgtcatgagcgtcccagatgtccatcgtctctgtgtaggtgtatcgttcgaaaacctctttactcttcgcatgaacgaaaggtgacctgaccgccgcccaacgcttgacctttcgggggtgctgagtaggtccagtaaccgggatgaggagagcaagagcacagtgtcgaaccatagcggcgtactagatcgttgaggttgagaaaaggtagaagaaaaaaggttaagcgtgcatactgagattgagacatgtgccgggaagacacgcttacaggtcgaagagattcatgctcataggcggtgaacgtgatgctgtgagtgagaatgtcgtgggttttaggtaatgttgggggctatatcaaaagaaagagagaagaaaccattcgagccacatagatgagcgattatgtccatcgcctcatagccataagtttcaaatcgaacttacaagcgcgtaaacatcaatgttggtagaaggaagtcggtacggagggagtctatagttgggaaaggttcacaaaggaagatagaagagtaagtgcgagttctaacagcctgacgagtcttcttcgtgatgcttgtcacgagaaagatgatgatcagggatcgacttgcccagctcttatggccactttgttgggaatcagctcagatacatcggggttcaagaaaggtcgtcgaggcttgttgtctccatccttggaaggataactccattcgttgggctgtcggacattgaacgaaggagaggaggtgaaagatcgagctgaaagaccggcgacagagattgatgaccggttcgaagccagtgatcggagagcaaagggaccactcatgtttaaaccttcgagggaattcagagaatagagacaagactgagtcgtttgaatcagagaaaggaaagatgatggacgaccagggagtgtgttctttctttttttgccaggtattaaaaaaagaagacgcggcggaaacgttcaagtccggaagtctagccctgaagccttaacctaggttgccgcgaaagactagcctgccgagaacactgccgtgcttgcgacttcttgaggatacgtacgacaatctaaaggattcaagtttccaaaaggactttcagattcatagtcttgtttgccatgagtcggtccaagcttgctcaacttgctccgatctcgatctctgctctcagcaaaacatacatcaatctggtttgtggaggaatcacgtcccagggattacctactcttctggacgcgttgaaggaggagaagggaaaggctagagagcgtggggtactgacgagtgagtagagtctctttcaggatatgtatccaagtgtgacttgatcagacgaatctgtacggtccctcgatctgaatcggtttgtcttccatgctctctgtgatcgaatacagtctcaaatcatatctcggtgtaggtgtgtctatgaacatggtgaagggctgaaaagcattactgatacacagtcattctatcttcctgcgcggcatgctacccctgtgatacctcagtgttgacgatccattcgtaagtagtgaatgttttgctctgctggctatctctctgtagccgttctaacgtatcttgcgttcttcttcacacaacagctatggcaggtactacctgtaagtacaccaggtttgatgtaacaccaacatctttcccgtctaatggcaaccgatatcttttaatttggtcaatcacctccaaagtggaagtactttttcaacccgcgcacaactcgatgggtctctggtgcccaggacatcatgttcaccaatccgtgcgcttcctcgtctgtctttctatgctttcattttcgtatttagctaatatcgattgcgctcggcttcccatagagtattctctaagttcttcgatgcaggccaggtcatctcaacagatcgattcggtggaatctttcaggaggccatcactgaatcttcccgtaaattaggccgaggagactgggtgagtagatggatcatatgaattatagtagaaagctggcttaccctttttcgatcttcaggttcacgtgtttcccgagggaaaggttagccagccatctttaaacccttattttgaggatggcatgtttaggtttcgatggggagtgtgagtatcatcttgtcttcaagacataaatgtaggttatcagattggttaatcgttggggctcctttgtgtttgttgtcgtggcgcatggatcgcgtaggagtcggatattcctatcttcccctataccacccaaagtcattcctatgcatatcgccggtcagcagagcttgtaacttgatgcctctccatgcgtgacactgtactgatttcgattctcaacccgtcttcaggatttgacaaagtgatgcctgagccaagaggcttccctgcgtgtatgttgcaatgcttgattcacaaacttttatcctctgttagcattgctcaaagaagaatccgacttcttcaccacttctccaacagttgttccgagaccggctcctactggaactttgagggttgccgtcggggaagtactagatgatctttgcctaccatgtatgtgcatttttttctctttccctttgtttcgcggcaccaagtcgattcaaacaacgataggttagacttcttggtgatttcaactgatcctggatttttctttctgtatatctagtgtggaaagaatggcgtcacagggtcgatcaaggtctgataaaagatgacggagatggcccagaagagagggagcgaagaatccaatttgccaacttgttgagagccgaggttgagaaactcggagtctcaagtgggctggcagagtctatagaggaacgaaaggcaaggagtgtgagctagagaatgaagattcaatcagctgggtggaccaatacataacatatcatcttctcagatgctgtagattactatatgaagaacacatagcaggggtaatcgcgtgacaagacccaatgaaatcacgtgacctgcacagctcacctctgcctctggtcctttggtgtcagggatgtgacctgagtgtcacacctcggtaaccttcttttggttctgttgtttctcctgcctcggtattccttatgctctctcattacatcaacatgcaggtatatgaccttccagcgcaggtgcttctagcaccttctatgacctgttctattatgcataatcgttggagtc

SEQ ID NO: 1961 - DNA, 11377 bp, Xanthophyllomyces dendrorhous
agcctgaatcctttgtcattccttggttccctagtactcttgttccattgttgtatcaaccttattcatacgatttccctgccttgcgctctcgtcacagtcaccaagctagagagcctgaacttccttcttgccagccctattccctgcctggttacattcttgtaaccttcccgttaccctctgaacccggaccctgacatgttgtcaggaaccagggttaggtaacatatagcaagagatcatccaaaaacggccaccttcttttgtgaagggaatcttgctctctttcttcttggtctctccatcatgagctctacacaaccggcatcctcgataccgcttccattggcaatcaaacagcctccgcggtcgtctccaatatcactcgtaaggttctagtctttttccagagtctctgttgtcttggccgtcaagacgatactctttctgctcagtgtggataacatccaggaaagcatgtttcttcttattttctcttctataaactagacgagccatgagatcaacatcttgattgccgaatatctagccgaatccaacctccttcactcggcatttgcgttcagattagaatccaaacttccaacaacgacgcctgctgagcttcatgggctcaaggttgaacgaggtgctttgatcagatggcttcacaaagggttgtgttggagcgaagttgaaagtcatgtcaccgaggttcgtttgctcttcttttaggacgtctctttctctctacagttcctcgtagattcctggatgggagacgaaggctgagcgagcattcatatttgtttccgaccgatcacagctcggtcataaacctccatgttcggcgccgttcacccttctgaaaccacacaaatgtgtggcctacttgccgcccaccgcatttccatccccttctccgccaccaccatcgccgtcccggtctgtgttggcaggtgaggggtcgacggaagcgtcgagctccaaactcccggaaaattcaataacggaggaaaaggtgagggatcaaattcagacggacgcgaacgcgacagacaaaccgcaagtaagacaagagcaggggaaagagagggaaaagggaaaggagaaagagaaacacaaggagaaaggaaaagagagagagagggatggagaagcaactagcggcaatggtaagagtaagcgtaaggccagcctttctaccgcgaaactcgggagtgaagagaacggaaagagcatggtaagctcctcttcgagcaatggaggaagtggtggcggtggcagtggtggttccaaacgagccagagtagaatctccgcccgagtcaaacgaaagctcggtttcgaataagaagggtacgtgttttatctccgtattttcgtgtcctgataattgccccgtccgttctcgtgtactctggatactgacgatcgacatatggatcaaatctacagcgcctggtcatccgcctcttccttcgttttcacggaaaaccacgtccaacgggtcgaacatgaattcaaaaacgagcactaccttgaaaaccggatcaaaaccttcatcaccctcggcaaacacagtatcccttccgtccgtgccgacaagctcttccaaatccacaaaaacagcttctcctgagacagctcctacccgtccacaatctgccgactctctttctcccttggttaccgcaccgatatcaaattcggtgacaaaaaagaaacgaccggtaacaaatgctgccacgactgccgatttgtcgtcaaaaatagttgaagattcgaaacgaccaagtactataaacagatcgggaggaaagtcaggggagattgaggggctcatctatgggacagattacaccttagccaagaacttgaaggaggtcccggtgtgtaaggaaggggagatagctagcttcaagtctcatacgggcgaggtgtttgtctgtgcatttggaatcagagaaggcatcttggctacagggtgggttcctttcttattaatttttctctgtgcatgtttgcgtgttgtattcttctttgcttaccattcatgaacggcagagcgggagacgcgtcggtccgtttgtgggagtttacaccgccgtcaggtctgacgactgcctggtcggtgaaggaacctccgattatttgcaaacacctacctgccacagacaaaaaggatatcacgtacgtattgttcaaacgaaagacatacaggtgcggtatgatgcggtactggtatgttgacatgccgctatctcgattttggtagatcgatagagtttaatccatctgggaccctgatcggtacggcctcttacgatggaatcgcccgtatatggacacctgagggagaacttcacggagtgctcgtgagtttcttgactttgacaattctgaactggagagaagaaagtctgacagagtatggcttcacgtcgctttacgaccctacagacccgacattccggtccggtgttcagtctcaagttcaatccgaaaggaagtttgatcgcaacggcgggaagtgatgggagtgtctgtgtgtgggacgcggtgacggctcgattaaagcagtgttacgagtttcattcggattgcgcgttggatgtcgattggttcgatgacgataccttggccagtgcttccaaaggtgtgtgtttctatgtttcatagttatccatattttgctgaacttttttctaccttctcgacccgtcttctcccctccctttctcttctcacgaaacacaacagacaaaacaatacaaatatgtaaagtcggttctacgatccctttccggacattcaagggtcacacggacgagatcaaccgggtacaatggtctcctttggttagcattcctgacggatcgacatcaggatcaaaagcagggacgactcgccatcgccgtcaaagacgaagggtactggcctcatgttcggacgacgcgaccgttaggatctggtcactcgatggggaagataagccttcctttggtctttcttcagacgattcttcatcaacaagcaacgcttcgccttccacttctggttctgccacgacgtccaacacgaattcaatgatgaactcgaatctgcacatgacaaacacgacgacaacttcgtcctcagcagctgtatcttcgttcctgatgactggcggcggagggggagagaggtgttgtctgggcgtactgagaggtcattctaaagagatatactctttcgcttggtctccacttccgtatgaaggctcggaaaccaactctgggactgaagctgaggtcgagactgaggaaagactggtattggcaaccggctcattcgacgagacgatcagaatatgggacatccaaacaatgagttgtcgatgggtcttacgagcgcacacccagacggtattttcgctttcgttctcgtgcaccgggagatatctggctagtgctggctgggacggtcttgtcgtcatttgggatactgaggtttgtctttctttctgtcctttcgcttgttgctcttgacttttgacattggttttatctctgacttgaaaacattcaaacgcccaacagacgggcaaggcgataagacatcataaggtaccaaacgaagtaggcgtatacgagattgagtggagcaaacacggaaaggtgattgcgatatgtcaggccgacaaggttgttagtctgattggcgtcaacgatctggaatgaagattgtttctcgtgttttctttcgttttatcgcttgtttgagagtgagcaaaggatcgggtacaacatgagaatactatgcactattgagacaaagaaagaaggaacagagagagggcgcgcgggattagaaatagggggatagctgtctatctagactctgtctttgcttccagagactgttccccaggtaaagaaaaggagaaggacaagaatcaggcgctcgattctctcagccagctagagtcagagctaatgaaaagaagatacagagaggacacaccttcgtgaagctgacggaactgccagagaacaatctatccgcatcggtgacttcatactttttcttgtgagcacctcccgccgtcggcggtttcagataatcgttgaagccctttcagagagtatattatacaagtacgcagaaaaaagagaacgaagagacttgttagtgagttcagggaaggacgatacgtataggtatgtagggtgaacttagagatagtaaaggagggctaaccttgaagatatttccagtgttctgaccgcattcctccaagtaggagccttcgaatgcatagatcttgccttcggtattgatctgtttgaacgaatgactaagagttaggtgtggtcgaggattcagtgttaaaagagaagggagagcgagaaaggacagcaagaatgtacaagttgcttctcaatctgcctcttccgttggagtgcgagctgggagcagagtagtcaagagatgagaacgtaatggattagacgaaggagcaggcgatctgaagagatgagaaagaggacagactatgagatcgttctttgccttctcggccacgacccgaggatcggccgctacgttaggttacattaagaatgaacaagcgagtgggtgtgttcagcataggtgacaaagaagagagggcattctatgaagagagaccatcatgacaaagtgagaagacacgaagacatggtacatgatacatgccacatccactgtctcttgctctatcccaccactcccactcttgttctcatcctcgtttccattctctcactctcaatcccaatctacttaccgtttggaatgttggacatggccgttttggatgggttctcgaagacaggttacgacattgttcgcgtgcctgatcacactgccttactgcggatcgcccagatttgtcacgatattgtaaccatgtagatcggtgacacgccggtagtcaccctcgttatgccccgcctcatcacgcctcgcttgccctttgttgttgttattgttttcctgtcaccccacgcgttccttctcgttttcttttctttccaatactttcggtgcctgtcacttttcccctgacagctttttccgttcctattcttcctgtcaactctggtttcttcccttcatccttttctctcttaaccatcaccccgtctttcgttgttctctctttccctctacattcgttcattcacttgcctgctctcacgctcttatcttcacacactcactctcactcttaccatgctcgcttcaactctcgcttccatccttgccgttgctgccattgcagcccgggccgtttcggtcacctcgccagacaaggacaccgtttggggatccggagactcatctgatgtcagtcgtgctttactcatccgtcctctcttccggcttcccctgttatctgtctcgctcgtcccttctttgccatctcctctgacttgaacaaatcttgaaaactcattactcactatgcttttttctttattgtcttgtcctcacttttacctcatttgtcccgccacttcacttcttctattcacacattggtatacacccatatgcagactgtagagtggtcggtcgtgtcaaccgatcctacctcgttcgatattgttcttgtcaacatggttcgtttagttgatctgcttccattcttttctatagccgcagttgctcttccacagcaaacttcctaagctaagcctctcgtcgtactatcactatcacgttattttcttccctctttaggccagctaccctacctcgagtacgactttgttgaagagcgtcactgcttccagtgggtctgccacagtctctgccccctcgtacgtgattttctgcacctttaggcggtatcgtccactgtttgttcaaaacttactttttttctcctttctcctccttgctcttcctcttcacagcggcggattcccagtaggaaacgcgtaccagatcaacattttcaactctcagtccagcgcaatccttgcccagtctgctcagttcaacatcaccgagtcggctgcttctgcgtctgcttcatcttcctccgccgccgccgcttcgtcttctgccgctgcgtcgtcttcttctgctgctgcctctactgcggcagtgtcgtctgcctctaaatcctcgtcttcaaagtcgtcctcggccagctcgtgagtcatacggtatctctggttctgtagttctatggtcaagatcaaatgttgacatatgtatatattccttcgtttgatcattccttccattcccttctaggacttctgctgcctctgcctctgcctctgcttctgcctctgccagttctagctcagctttcactgcggtcgagattcctggggctactgcaagcaccactgcaagcggcgctttctccgtggtatccttgccctcggtcctcttggtcgctgtcattggtctggccaccatcaccctcgtttagatgtagctgggctatgttctcttgggcttctcatgtcttttctaattattatgataccaacacggacaatctttttgccattattctctccaatgtctttcttccttagaaagttcttcttcctagagccaaatcttaaatggtgtctataaaccccttcgtttgggtcttgctttctttcgtcttagtcattctttgacttgctgtttttcttcctcttctacacaaaagaaaatgaacaatgcttgttgcttttagccttaacctttttgaacggtactccacgtgtacttcaaccgtttgatttcgcccacggttgtttactgccaaggtgtagtaatcgcgtgaaagattgattattcatcaacgtcgtcatttcgctgatcaccccaacgcaggtgccaatagatgcagatgaactcattcaaaagccgtttggatttttagatcgatctgtttctgcttcttcccttcttcaatccatcagaagacctcccatctcaaccaggtaagtgctctcaatctcatcgatttttgaaaggctctctttccgattgctgattccttcttctaggacatcccatggcatatcctttcccgaccatcagatctcttgcccgatcgaatcaacccttcaacctctgcgccatcctccacagaaacatgactacccaactgaagaaacctctcgaggtctacaccgccgggacaccaaatggccaaaaggtcaccatatttctggaagaactcaaagcggtctacccagattttaagtacaacgtgaacaggatcgatctccaaaagaatgaacagaaggaagattggttcctgaagatcaatccgaacggaaggatccccgccttggtcgatcctaacagagaggaccatcctgtctgggaaacggccgcgatcttgctctacctggaaaagcagtgagtctggtgttgtcgcgctctctctccctttctcttatctatgtctgatgtaggtctttttttttggttcttgttctcctgaaagctacgacccagaccacaagttttcgtttggagattcggcagatgtggataattacagaagtgaaatccttcagtggatgttgtacgtttcgctatgcatttctcgcttggctcggtgcggaggcctaaagagaaacgagaaagagacactcaccttgatgattcggatatccgttctttacaaaaaaaaaacaaaaaaaaaatcagtttcgtccatggaggagtcggaccgatgcaaggccaggcgaaccatttctacagatatgcacccgagaagatcccttatgtatgtttctccctctctctctctaaatgtgatctcgccttgttgattatgaatccgtcgttacgttctctttccatcgaaacaggccatcaaaagatatcaagacgagaccagacgactgtattctgtgctcgagaccaggctccgggacagagactacctcgtcggtccgggaagaggtcagtactccatcgcagatgcgaacgcgtttccctgggtgttctggtcgccattcgcgggaatagatcatgtagatatccctgtgggcgtgaagtcgtggatagacagaaacctggagagagagccaacgatgaaagggttgaaggttggttcggataagtcctcagagtaagttcagtctttctttctttctccgaactctctcggctttccgctctctttctttccggcgcctcgtgtttggcgatggaagatgacgtttgtgcttgtttatttctattcgacggaaacactatcaggttgatcgagaagatgagaaagaacggaacgcttcctttggattgaaggtaaacatgttggctttcctttctctctatcacacacacacacacatacgcgccttctttttcttactctgtcgtcatcggttctctttcccctctgtaagcccccgtccttgggaggtttgatgaattctacttgaccagtcaatttaatcgacggacttacgtccttattcatgtatccgtttgtttctctctttctgatctgtatgttttctcttcgcaaatcgagaggaaccgcctcgagagttggggatgggaaagcatcgcgaacgactcgatggtatcgacgaaagaaagaaaagaaagaaaagaagaagcgaaaatgaggagaaaagaccaaggacggatcgaaaggcaaagacaagagaaaggacacggtcgagacctgtctcgacgttctttcccttttgtttctacagtcgaaacagactgcgtcgaaccaagtcgagcgcaatccttttttgggacgttccctcctcgggtttcagaatatgtcgagcaaagtataaggaaatggcagctttcaaagcgatagaagaatcgatcgattgatcgagtgggaagcgaaaaaaaaggaaaaggagaaaaggaaaatatgaaagagagatttcaaaacgagtgacgaaagagagagcaaaagaaagaaaggacactagagaaagatagaaagatagaaagaaacggatggttaggccgaggaaggtataagatctgaagggatatttgaggtggatatttcttttgaacgaacctaaccgattagcaaatagaagagcagcaaaaagagacagaaagcaaagaagggtatacggatatctttgtgaggttttgtttttttttggtctatttatttatttattgtttcgttcttgttacacgcacgcgtgtaggacacgaaaaagaatgacaggactgaattaaatggcgatgaatgatccatttaaccggccttgacgtatcgccatccgagatcagtgagatctccgccaaccttcatcaacccgttcgcggtgttgacaccctggttgtcctccatcgctccgaacgcggcgaatctggcgacctggggagcggttaacatccactcggtcgtgccttggaagaaatcaccagagatgtaatccgaggagcactgagcaccaccgttgtagttctggcaggcgtactcggtcacccagatcggcttgttgaaggtgttggcaaagtcgaggacgtaggtctggaaggcctcgtacgtgacatcgtaccagtgcaaactgtagaaatcaggctgggcctgaggacaggtcgtctggaaattctggagccaggccttgccggacggcgcaccgtcaggcgcggcggaaccgagctggattccgggcaccttggttcggagctgttcgaagtatgtcgtccagagctcacatccggactcgactccacagttggactggccagcgttgttgggcctgtgtttgtcaaagtcgatcgagcggttagtaaaggatgggaaaacatcaggccacttgaggtagagactgactcgttcaagaaaagagcggccttgacacctagggaggcgtaggaatcaatgttctgagtccaatctccaacctgtcgccatccccaaagctaaccaaggagaaagcaaaagaaggaaacctatatcgtcagcggtgccttgattaatgaaaacaacggaaaggagcgtaccataggaacaaactcgagacccgtgagctggtcaacaggccagggggaccaagtgtagtacctttgttgttattgttgtcgattttcgagaaaggggaagaggaaacaaacggaatcaataaaccaatcagggcactgaagaagaagaacaacagacacaccaagagtttccgatagcagacgcccagacaccgggctggtcagagtttccgttgggccatgcgagaccggccttcttgactgtagagctggaggacacagagacagagaccgagacagagacagaagcaaccggagcagcggaggactagaaagatggtgtggcaaagagagaaaggagattggctaagcatctagacaggcaagatgaaacgccaaaggcgagaagataaaaataaactttgagaaaaaaaagggtgagacgaacaacagtgctggtggtgggagcagcccagttctggacggcagcgactgaagactcgacggcagccgaggaggtagtgggttcggccgaccaggcagcctcggacgatgtggtggcagcagcggaagaagtggcagctgcagaagaagtggcagcagcatcggcgacgtaggcgacagaagacgcgatggcggaatcaacagaagaagaagcatcggtagtagatgcagcccaggaggaaaccggagcggccgagctggcggcagcataagtggcagaggaggtggcagaagcggtggccgaagcggcggcagaaaccgaggcagcggaggttcgggctttgcaaactccaccgtctgcccgcctaccgagggtgacggaccgtctgttgacctggtgaacaggctctctgctgtttgctccagggcttcgcctagcgttagcaaccgctcggtggttggaacctccgtgagcggcgttaacgggagcgagtgccgacgcggcgagcaaggtggaaaggatgactgtggtgatggatggggacatcgtggacctaaaggaaagggtgagggatgggagatgaggaaagggagatgtaggagggaggaccagacctagctagtttgttggaggagagaaggaaaagagagtgagtttgtgagtgagtggatgatctacctagggatatgaaggagagagaggaactgcaaggaggcgagagaaaggaagaacagaagaacaaaagaacaacagaagaggagaaaaagaagaagaagaggagaagagagaaaacaggatgaagaaaaaaataacagacgagtttaaacagaaaaaagaaaacaacaaagagaaaaaggcgagcgagaacacgcaggccaagatgttagccaagacattgttgggtgggtcttatttggggtcatcgggggttttaagggtatccgggggg

SEQ ID NO: 1962 - DNA, 10895 bp, Xanthophyllomyces dendrorhous
gttatagggggcgttttggggtttatatggttcctgtacggggttttagggtgtaacaaggggcaaagtttgggggcgatcattcaaacatttggtcatatatgggtatacatgggtatacctgggtatacctgggcatatccgggcatatccgggcacacccgggcgacccaacctcgtcagctcttcatccccgtttgatccgtgccgatcaaaacaaatcaaacgggcgcctcggtccgcctttgaatggttctccctatcgtcctctcgatgaccttccctgttggctctgttggtcttaatagccaaacatggtggctggaatcgtgttacatgcatcctgttccgctctatagctcactcacacacccttccctttcaggtaacacactcagtctgttcgtcatcatcacatccttgttcacattcacacccacacacaaaatatgaaagattcatctacattcaaatcgcaacctggacgttttcttgtcttcttatttaatctttttaaacacattccgggtggcctaccgagtaagctgcatgtcgtcgatcctcaacaataggcagaccgtctcggtcgcaagctcgagggcagaggtcgagacaagcagcggctgcaacacgttctcttccaaaatattggaaatgataccctaaggatagagaaaggcacgaacacgggcacagaaagcaaagcaaagaaaataagccacgcgatccttaccatatatagaacccacttgcgagactcacctttcggacgttgataccagcagtgatctccccattcgcatgtcggttcctcaattcggtcacgatcgcaatcgggttcaaccctgcgttctccgccaatgtcgtcgggatgatctcgagtgcctcagcatacgcctggaaacagtaggcctccattcctttgagtgtctggccgtactgagtcaacagtcgggacactcggatctctggtgctcctcctcccacgatcagggctctacaaaaagtttgtaaaagtaaaattgagaaaagcgttagcatatggcaagcataacatacgtgtcttcctctccttcttccattctttccttccctttctctctacttccctactctcctcctcccaagaaaagaaagaaagaaagaaagaaagaaaccctcacctcttcttgaccaaacatcggacgacacagagcgcgtcgtggagacttcgctcactctcctccaacaccaaagagtttgcacccgtgcaaaccacgctgaccgttctgcccgcgttcttcacacccgtcaccttaaccaccctggccccgcttcgctcttcctcgtccaccaactcggcctgaccaagcttgtcctcagtaaatccatcaatatctgcaatcggcttgcaaccagtagactttgcgataaactcgatttcgtcccgctcaatatccttgacgacaaggatcttgagctttgccaagaagtgaagcgaaagctcgttcaccgcgtcccggagaatcgacttttgaatcagcagcacgttgcaacccgtcttcttgatcttcttgcacatgttcagcagatacgctcgctcctccttcaggatcttgtccatctgtcggtagtcgttcaccacaatctggttgtccatctgaagaaagagaaaaaggacaagggtgagcaagaagggctctttgattagtcaacccaggccttcccattgtctttctctctctcgttgaagtattctcctacatgaccactcacatcaggcttgggcgagctcaactggaactggatcagtccaatctttgccttctccatccgggtcggtccaccagcagacgtcgtcacagactgtgtcaacgccaatccgtcaacaagctcggtatcgtcgatcgttcctccaaccttcttgaccagtcggatatcccggaggtcaacgttcgtcgatgtcggcgtcaccagtctcagcactgacgagactgcgatcggagcaagcacagaagagtactgagagacgatctgaaggaagggcagagaagaaaacagtcagacataactgagcctcaaggtgaaatcttatgggccaccaagattttgaacacctactttagagttcaaagaggtcgaagcagctcgaagaagagtttcccggtcgttcaaatccacaggagtagccatatcggtcaggaactcgacagattttgaggcagctcgctggaaagattcggcgataagggtagggtggatacctgatgttccaattgacatgccaatgatagaactttgtcagaaagactccaccagcttaaccatgcgataaatagaaagaaatacacagctggacatacccttggtcagcatcttttcagcagctcccaacaagcttccggccaaaacgactacagacgtagttccgtcaccagcctcgatatcctgtgcggcagaaagctcgacaagctggcagaataccaacaccccagaccagatacaatcagcccaaggccaatctcgagaagtgagaaagaaaaaagatagagagaacgataggaacaaaccattcgagcggcaggatgcaagacagccatgtgcttgaggatagtcgctccgtcattagtgataacgacttcaccctgggcggtttggatctggcagattaaaagatgttttacgttcagaacaagacaacccttccgtcggctcagagcaggcgtacacgaagccaaagctgtcagtcggaatgcacaccgtaagagacaacttaccatcttgtccattcctttgggacctaacgatgttcggacagcatcactgaccgacttagcggcattcatgttggaaagtcgaacttccatcggctttccctgttgttgaaagataagagaaacgcccagaccatgaagagttggaaaggaaatcaaggaaaaactcgatgtttgtgagctttctcctgttctttttcccttttttctctgtcctctcttcttctcaacaagaaggctcctaatcaaaacgacgaaccttgtcgctaaactgagcattcccaatattagaggcggcaggtccggctgacatactggtgaatttaaaacggaaaaaaggggagaaagaagagaataagaagagatcaacggatggtaggtctagctgaaggaaagaaattgggcctgggtgatggagggactgtaaagtcaaccgacagcgagatttcttgttacgctcgttggttacggtttctgtaaccaaacaggagctagggttaaacctcaatcgcctagcaagttgtttctagcccagatttttgttctcttctttactcgaatcatcaacccttcttcatcctcttgcattcacatcagcatctctcgatactcttcagggttgagaacgtttggttaacatttccacagagtgatttaaacaaaaagataaaaaaaccatcaaagaaacttagattgacagaccatggaggtaggttcgtcgcgtctctttcagcaggttcagttcaaatcaagacgcatgcctgacctggtagtcaaacctatctctcgtcccaatcaaggttatcaagccccgaaccgccttcgtctctgcccgtgaggcattagagcatttgaaatcgttgaagcccgaactcgacctaatcgccgaagccaatgggaagcggtacgagcgtacgagccgtgctagagaagaccctacagcgccgatagaagagccgtccgaactggaaaagaagtggtttggaagagatcagcagctcgggttatatcaagtggtcatctcggtttgtcttctcttacgttgcctttccatatatcgcatgcaaaatatggccagtattgagcgacctcttgtcgacggaatctagtcgatagaacacttcacgtcagcagaacagtcaatacccaagcagagcctcgcaggcaatcagcagctatcctatgcactccaagccataggcaagttcactcaggtagaaatcctacagatcacagacttgagtccacgcacaccagttgaactttacacagtaagttgtatctgtcatccgctttcatctcagcactacagcatgtcgttatctatattgacagtgttggttttgttttgaataggtagtagaagagctctttgatcggttgaacgaagaagagattgcccacattctcgatctcgttaaagcttccctctctgcagcccaaacactacccaatcctgatgcgcctgtgcccaggccagccgacctcaacgggaagtcggtagtagatgatgctgaagaagacgcgtacaatgatctggaagccatggagtacggcgatatggatgatcagggggaggatatgggcttcgagttggacgaagctgccgattaatgtgtttccaatcaccccgagagccttgctcaatcagctagcgtatgtgtgtgcacactgtccagtatcatcgctgccagcagtccagcactatggctgttgcaagtgtatccagacaagcaagagtaagagataagaaattgggaagaaggcagagagaacgagataaatgtcacgtgatatttccttccacctggagtctagcgtcaccgtttctgttcgacagtttatccttctgcaccatcatcttcaccatcccgtcgtcgccgcttctttcgttgtcttatttcccgtcagatctcgttcttcattcctttcatcgggcctacatatagatttatttggtttacttaaacacaatcacatgttcaatccaaactatgcggatgcagcccaaggtggtggctttggaggaggtaagtttcacagattccacgtatacacagtgcgatcgaagatgaacactattgatcgatgcgtggctcatcgttctgaaccattacattcgacaggaaactttttccagcagctagcaggtatgggtggactgggtgggataggagttgctcctcctccgtgcgtacttcattgctgttggcggcggacccgctccttctggacttgcactaattgtgttagcaccacgccgttggttggttaaccgtatgatgacaggacggcttatgacgactacttcaaagcctactcgacggcgatgatgagcaccagatctgaacgtgccaatttgaatcatggaggaaaaagtgagtgttgataaacatgatgtctcctatagctttgaaagtctctgaccaacagcttatcctttgtgatccttgatctgaaagtcatcatgccgccttctgccctggcccgattaagtaggtgatgaacggaacatgaaccttcgttcaattatctacagaaccagtctaattgtattttgtatctatagccaacttggaactcgaatctccgtggactttccatcttcagaaccctaggtccgctgctctggagacccatgcaggggtcttagagtttatcgccgaggagggtgtcgtgtatcttcccccttgggtatgcgtctaccgctactatagaatatctgagacttggtctgactgactcttttcacttcttaccggtttaattacaaagatgatgcgaacgttggggtcagtcgagcgagttgaagacatatacgtgcgctacagagcccgatagctgacatctcgtaacgtgactgtttccgaccttaggcttcgagaaggagatcctattcgtgtgactggcgctagacttcctaagggaaagcatgttaaaatccaggctcagaacctagagtttttggaagtcagtgacccgaaagctgtgtgagttctcttgcctagagcgtctgttttttctatcagatcgtcagctgaccttctcgaaatactattactttcagtctcgagtcttgtcttcgaaacttctcatgcttgactcagggagacacattctcgatatcatacaattctattgccttcgaatttcttgtgatcgagactttgcccgctggacctggaatctcttgtcaggacaccgatctggaggtaaaccccatcattcttctcgctcacaagtttgagacgttcatatatagaccagcaggctaacacatcctgatattttctcgctaacgaaaggttgatttcgacacacccaaaggatatgttgagcctgcggccccggcaccaaaatcagttgagacgatggcctctaagctcaacatcgatgtcaattcgactgtcccatctcgcacaggatcagtatctggcgcgggagacgctgaggctgaagccgcgttcgaagccttcattggaggtggacgaactctgaatggcagaaggacaaaaggcaaaggcctaaccagaaagattgaggaggtcgacgaaggctccaaaatctatcgaacagagtatgtcctgtttttgcggttctgtttcttcttgatcatctcaacaaaaaacaacacaacgttcaactcatatgctcctggtctatcttcaaaaaaaaaaaaagcaaatctcgctttatccctacctcatctctagcgtctggttcaactgacaaagtgccttccgcactaaatctccctcctggcaagctcttctttggatggtcctacaaagcatacgatccgaatgctccaactcctctttctggatccacttcgacaaagcctgaacctgtacgcgctgcttttcagaatgtttctctggttttccatttgcctccttggatctgatggagtttgactgacgcttatcatgtctttatctcgtactctttgtagacacctgcattctctaaccttgtgtctgcaggagcgaccttatctggtcgagccccttggtcgtcgtcttccaaccctggatccattgattcgtccactcgtccttcggctgctccgtcgcccgcacctatacctggccgacctgtctcggcggcacccaagccaccgaataaggaagacgagaacgcgctggatgacaagccggtagacccgtgggcaaaactctctggatcgggaggtaacacattaagtgggagataggctgtgtttcatgtacaatacacagttatcgatgtccgagttacgcgcgtcgcttatgttttgaactaagttgaatgctatagaacgcttcttctgtctgcttgttgtcttttctcagtaagcatactgcacatatgccggtcttcattgttgccagaatgattagaatcaagtgttgcttgtatccatcaaagagctggacaaaacatgaatgaaagatgagtatatgacgatatcaagacgggaatggtgtttgacaggcgaaacgatgcgcagccgatcgagaccatatcaaaagtgccgcctacatctcagcatacatcatcccatcgttcatcaaaaacaccctcctttttttctcgagcgtgcctctttctgtttcttcttctctccatccgttctcatcgccaccatttcactccttttcagacctttcttctcgcaatcaatccggtccaccgtcgtccgaagatctgcacccgtaagtggctatctgcctctgtccttggatcaatgctgatcgagaatctttctaactctgtctatccgcatctgattactcatcatccactgcatgtgattctctgtgtctggcgaacaactttggcatgctctagctcgttcaaaacttctcaaccactgttttcaaaatggctcctatccctaaagacagcgtcaagacagactcctacgatctgtaagtctaagcagttcttccttcttcccttcttctgccatcaaagatctagaggactgatatttgaacatctgtagtttggtcatcggaggaggtcagtatttcttctccaagccgtcgcgctgctgattgagagcctgctgctgatgcatctgatgggtttcttaaacttgccttgtcccgtatgcctggtctattgacacactataggatccggaggacttgcttctgctgtaagtataaccatgttcagagtcgaaaaggcatgccttttgtcgaaacgatcaaaaataatctgagaacgggcttcaatctaattcattatgtttcagcgacgagcttcctcgtatggtgccaaggtcgccatcattgaggcttctcatcgactaggagggtatgtttagttcatgcaacacgaatgagcgatgaaccaagcgtctcaatcttgctcactttccggatacctcctcttgatatcattcagaacctgcgtcaacgtcggttgtgtccccaagaaggttcgtgctatttacctacataccccttctgtttcgtgccctgatcgaatatttatctggtctcaaactttggtaactattaactgaatagattatgtggtacactgccgatattgccgagcacctcaagaacgctcactcatatggtttccgagttcccggtctgaccgacgcgcctgccgaacagcccattccgttcgactggaacactctcaagactaagcgagatgcgtacattcaccgactcaacgggatctatgagaagaacctcgagaaggaccacgtggacgagtaccaaggccacgcgagcttcaagaacaagaacgagcttgaagtcaaggggccggacgggaacacattcagccttaagggagataagatcattatcgcagtcggagggcagcccacctaccctgatatcgagggggccgagcacggaattacctccgatggcttcttcgagctcgaagagcagcccaagcgagtggctgtggtcggagctggatacatcgctgtcgagttggccggtattttccatactcttggttccgagacccatattatgattagacacgataggattcttcgaaccttcgaccctatcattcaggatactcttactgagcacattggtaagttttatctctttgtctctagcctcttgatgtcccggagatcaagaggctgattgtattggagcatgtctcgtctatatatctggtaccacagagggtaccggtatcaacgttcacaaacagaccaatgtgaagaaggtagagaagacctcctctggtgcacttacccttcacctcgactctggaaagaccgtcgaggtcgactgtctcctctgggccattggtcgacactctatgactgaaaaactcaacctcgaggccgttggtgttaagaaggtcgagaacggagacattccgtttgacaagttccaggtctccaacgtccccaacatctttgtcattggagatgtcggaggaaaggcgctcttgactcccgttgctatcgccgctggtcgaaggctctcaaaccgattgttcggaggagagaagtacaagggtgaattcttggactacaccaatattccttcgtaagtttcgcctgtttactaaatcttcatgattggattgactttgttgatcaatatgaccgctttcgtttgtctatatattccaaccaaaacaatagtgttgtcttctcgtaggtcctgtctctgaatatctcgagtgcgcgtcatcgggatcattctttctgactagaatacaatgttattactttctaaacaggcatcctactgctggatccgtaggattgaccgagcccgaagctagggagaagtacagagatgacaagatcaagatctacaggacaaaggtattagttaagctcaaaatattctttagatagaataagcggcatgcatacttacccgatgaatctctctcatgtggttcaagttcaccggcatggtacgtatctagagagttttttttcctatagatatcgagactggcgagctcactctcggatttgtgatcatctagtccaacgctatgctggacaacccggcgcacaagtcgcctacggcttacaagcttgtatgcctcctccctgaggagaagatccttggtgtgcatatcgttggagagggtagtgacgagatgatgcagttcatcggagttgctgtcaagatgggaggtacgttctcgagttcttccttctctccattcacgtgtttagcactatccactcaagacttatccgctctttcctcttttctgtgtgtacagccaccaagaaagacttggacgatacggtcgctatccgtgagtgttgtcttcaaccttcttcgccaccttacatcgatgtctatgctcatcactgttttattttatccacgttctcacagacccaaccagtgctgaggagtaagtctttttgtttctattctcgtttgtttctctggggctcgattactaatgactttctgttgcgtcgcgaatttgcttgaacacagacttgtcactcttcgataaatttgaactatcttctaattattctgtggtacataaattaatgattatatggatccatgtatcgtcgtctttctgtgttacatgatgagtaagatggtgattgttatgcaaggtagtttctcatatgataccttggcgcgccctctccctcttcttctacctcacacaactgtaacagagaagaaaccggtcctactcaggatgtatggtgttggcacatggactctttagatcagcgtgacgtcaaaagatctattctctcacaggacgtacaaagtccagtccaatccgctgaaaagtggttagtaaccaaagttcgtgcgtcagtccggaaaagtcagcaaccaccacgaccacgaatacgaccacaacatcttacgaacccgagcccagtgttctttcgaccatggctactatactccccaagatggcttatccagtcacatcaaactccttccgtcgatatctatcatctactgttcccttgggtcgattttctgctccaaaaactctgcgaaaccaccgaactgaccccttgcgatcgccgctgtacaccaatcgaggggtccaacaagagttcaagcccagatccccggatccaaactcgaacttgacccaggacggaacgggagctccttatcatgctggtccatatcctatagg

SEQ ID NO: 1963 - DNA, 60491 bp, Xanthophyllomyces dendrorhous
catatcctataggagctggtttagggacatccgcattcagaaggcaggctccaagaaaagcatggaaagagcttggatgggggtccaaacgtatgtcttgtgatcttgaaaattgaatcgagaaagcagggaggatcatctgttgttctccttgcagcttattggacaacagaaactgatttccgttgggtttctcctgaaaccacttttttttgcataaccaaagtgtacagggttggagctaacagctccaatttgctcgttgtcgctctgggggggtcgttgttcttcatcattgccatcagtgtctcgaccgagttattctctcctaactcgaccacagtcatctttggtaaagcagttgacaagctaaaggaacaggatgaggtttgtctatgaatgtttcttcttctgtctcggttggtaggcctatgcttccttggtagcttatcgccatccccttctacttttttcagcttaagcactatctccttcccccctacacataccatcctccgcacaccaccacgccttcctctcgatcccaaacatcctcatctcgatatcgactgacttcgtttccgtcaaacatctacctcgacccacggacaggtcgagaaactcactcgttcatctttctcgtcgaaggtcaagaacaaggtagcttccggtctcataccggttggtggggtagctggcgagattggactcttgaacaggtagaaaagggatggaaggaaactaagcggctggcaagcgacgctcaaatgatcatgaaagagaatggatggatttcatcggatgaagagattgtgttaggcgatgacaagagactcgctttacctcagacagcagcggacaagagctcgactggttgggggttaggtagtttgtttgggttgaagaaaggggaacgagtgatagatgtagtcaagaaacgaggtctccctccggtaggacaattccagactggggaatgtcacgtcgtatgcgaaaaggtgagatcatgttcttccctgtttactttctgttccctagagactgcagctaaagcttcttttttttgcgtccatataatctttagaactctgaatctcatcgactggaactcaagtctatgaaagtttacattccttcatcgagtgcttctcgaccatacacgttctctgtccctgtcgaggacaacaagtcatcatggtttgattccatcttcggatcaaacacagcagacggtcttgcaccgtcaagaaaagacgttattggactggtggaagatgctagattggaattggagaaagaagaaaaagagctcggcgcaaagagacttgtgtgaatgggcttggaatcatgttcttcaatgctattcttatatgtatgcgatatatatatacacgtatatacatatgtgtgtgtattccttcacacgcgccatgcataatttcttacaaaagaagacgcctcactttaccaagcttgtcgactagggaacatagagaatgccccgttcttcaagaccctagtgcgtagggcggtcttggtccaacttgatagaccagtcagtgagcaaagagtcaggcgatgagtatatgatccaaaaggtgttggcgctaggataaataccgaaaaaggaagagtgacataccctttctcgtcttgagttccacccaaaacagtcggtcctctgatccagacgactccctcgatatcaccggtttcttcaaacacgtcttcatcgagttctctgaccagaacctcaatgttgctagctggcggtcccgtatgcgcgccgactaacaccgggtcttcttctgctgcgtcttcccattcaaccgaatccacgttctttgttgttcccttctggaaagattgtgaagatttgggtgtgaatgcgatctcacgcgggttaaatgtgggcgttgttggaacagacatcggaggcaactgttgtagatcgtggaaatgggagatgaagagcggagaagtcgacgtgagggaggtcgtgattcgggtgatgggcagggagagatgtatctgtgcggagagaagttgtcttggtgagggagtagctgtttgtgtaatgagtcagacggataaaacaaaaaagacatgaccaggctttacagtcaatcacctagtataggtatttctgttcagatggcttgttgttgaagagacttacgaccaacgacaatgacagcccgtatcttatcctctatctcgggtttaatacctcttctcgccgacatatttgccttctcggcccattttttcaacgaagcaagtctcaggggcttccagtagaatttctcaagatatccgcttcggccaacgtatccatccgcgatgttggccagttggtgctgcttggctgcatcacggaagatgttggccggaagataaggatgagacccgttctcaatctccgaggaccattcgaccagcattggagttgatctagaacaggtagagtattgagaagtcgatgcgtttgaacgaggcttcagtataacattgtccgagagatgttgcgcaaacatcaaaaccaaaaagaaaagaaagaataagctgtgctcacaaaaacacgatcgtaggagatggtttctcagggtgaagcatgttcatcaactggactgtctctcgcttgctgattgaaccatctagtgttgattagcagaccaatagaccggtcagtatatccctcttgcacagatattgatgtggttgttagagactgcatctcacgcactcttttcttcggtctgcgcctgatcttcttgccattcttcttcgtcgaccgttcggaatccagcacctgaaaaccaatcaaagaagggacaactgttcttaggtattcgaatagaaatagagtttggcttcataggctagtctcggcagttggttcactcaccactccagatagatgccaaggccaaggttatcccgacgggctgagcgagaggaatacagctgacgaccatatcgttcgtcgcaggtgagggtctcttatgggcagggaagagcgagagaacagaagcgattccagaagtcacgttttgatgggtcaccgtgctggtttgaggtttctaagagatacccgaacagatgaagattgtttgtgaaagataaaccaaacacatctggtaagtaattctgatcaaacagcagaatctcaagcgcaaccaacctcttcatcatcctcccagaattggatcgcaaacggaccctctcctttagcagagttcgccctatccgtatccttcatggcgcttccgagcgcctcgacttcttgccaggaaaccaccttgagtgcatactcttttgccatctcgaccacttcttgaatttgggacgtttcctgttctactccggaagaagcggcgtacacaatggttcgattcgagtaaccagcgccggcgagctctccgaggacatctttgaggatcttggcgctaacgacaatcaccgccggaggtaccggtaggccgacaacatgattgaacagagcggggttggaaagtgttaagagagggtgagatacatcaggctggagggacatagctatagaaagcagtaaagaatctggagatatatcgtttgcaaattgaatggtttgtagaatgatgagtagagatttctatgatagtcatgtggtcagagaagctcaccaaagccatcaggtagcaagtttagaatccctttggacgctttgtctgttctagatgtagatagtagagagatcaatcctttggacacgttgttggcccgaagtttgagtagatcgttcgagatctaggaacataaacagaatttgaaacgcgttatatgagcctcttccacatcttcccgaaactggaagtactgttgttccatacctttatttcatagatgaatcgctgaggacatttgatgtctgctatgttggcaaccgttttcagtgagctggcaggtctgagagagagctagcgtgcaggacgaggcacgcgatatgatcagctgtattctgagagctattacctaagcataggaaactcgagagaaagctgagaccaaccggggaaccatgacctgtggcccaatttcgatagattccactctggttcttttctctggtggccgagagatcactctgcttgcctaagagtaaaggatggaccaaaggtgatgggcgagaaaagtactttagatacgccgccatgcacacggtgatggagagcaatatgagcgacacgtcggacagaaagggttctgacggcatgacgatctgctgatcactgtccggaaaaggaaggaccattctttgatgaagcacaactagatctgtgagctgtttggaatcttgtacgatggaaagagcgatgtgtaggaaagtataagaaggagcagcaagatggaaaagcaaaagaagcgagtgagcccatcggctgcgataaccctaaccgagccggtgcatgtgaacttgtccggctgcctcagccgatcatacctgagtgacgatgcattcaatgatccactcccgtgatcctacatagacagttatcgatctgcataccacccagacttctggtgtggccaccttttcttttgacaagccttcatccatggaggttcattcttataactatcaaccgaaactaaagaacgaacagaacacacacatacattggacaacaagatggctttgggaacggcatcatacctggtgagtgtcttgctgactctttgtcatatactcattacaaccattcacaccacaaaatcgaaatttgttcaaacctttgtctgatgactgatagatggtcatcctagccagcatcttggcattcacattactcaccttaatttcccaccttttgagccggaagaagcttgagccgatccacgagcctacggaagaaggactcgcagctctccgagagggaggggtggtgatgtgggatatgcaggggaacgaagttgtcgaaattttcagccaaacgtggaccaaccccttagatcagagtcgtattgttgaacctaggttggaagaagtgtatctgatggaaggcgactgggatgtagagatcgaaaggagcgtggaaggttatttggtgcgtgccgaacgcgtcatctttcagtactattactcgaggtcttgcaactgacaagtcgtgaaaccaatgccttactcttatccatagccgttagcatgctctctacctcctaccggtttatctgagatcgaggttgctgttatcgtcgcgttgccatgtccaccttgtcctccgctctcttcgtcctctgccacccatccatgctcacgctcgatatcatcatcatcgccatcacctgcagatacggaagaatgctttccggatgttatggtcgggtcttgtcgattttccatacctccttcggctgtaagggagctatcgcctttagcccttcctccacctagtagtttggtcgagaaaaaatcgatgtgggtcaggactggccgtcgaaggacgacgacattggatgttgggtagggatagcattttaccaaggggtcctactttatctatcaatcttttcctctttcaattttgtatatggttattctgtagttatcttcctccacattgtaatcctgatcttgtaagcggttgtatccttttttaatctttgagctgttttcctgtcgaatctttgtactcctggttgtaagctctctccttcctatcaagatgatgctggctagcaaacacgcatgtcatgcacttcgatattgtaataacttggctccctatgtcctttgtttcaaacgcgtttatataaagatgtattttctacttatctttaaacacgttcatttcgttgtttcagctcccggaataaatgttgtttacagaaaaagaagaatcagaagattcacaaaggctacaagacaaacagttaatatggtttctatatggtagcagctggaccaaataggcaaataggcaaataagcatgcttgccatgcataataatgtctgcatccgctacccctatggcgtaaccagaacagaatagactctagtgatcacgaacgttccagactttgcgtgattgttcgtctggacctttcgatcgccactaggcggtgctcagcacgctaaaacatcacaaatacgccacatccgcacgaggccgggcagcgtcgtcgtcagcagcagcagcagcagcagccagctgtagaacgaatgcatcgtattccatctcttcatcctttgctgtcctatttccttcttccctctctatcacacacacactcgtattctcgttcgaaagcggttctaccatcgtcttctttctctactctctcatacatacctaattggaggaacaaaagaggtcaagaggaacacagcgaaaggtgactcttatcgcaaggttcgcttgcagcgttcccggagatctattggtcagaggtcccactaaagaggccataggtaagctacaaaggtccatgcatcagttgttcctccgtttgccctgctgatcaagcttcatttctgtcctctcatctttcttctttcttcttcactctccccctttggttgccatcatcgttgtactcttggccctggtcttggtcttgcttcgtctcgttgtctctctctttaggcttagccttgtcttccctgctcttcccgtctcatcccgttctttttgtttgcatatattctctcacaaaaagggaacaactctctctgtacgtctgatcttttgcttcatcatcatttccagtcttggtaagggcgccgaccaaggaaggcctctccttcaaggcaccattcgatatccagactgatatactcttggtagctagaaaacagagaatctcccacaacacccacttttggttccgaccctgaccgtcatcgccggacccttccaactcttgacatcctttcccgcctttcttagcacattctcttcccttgtcagaaaagacctgggtataagccttcctttcctctagactttcgctctcaacagcaaatatcatggcccaagttgtgtcttctcaacaggatctaccaattgaaccagctgagatctcagagccggctgtgcacctgtccggaggttgtttgatcgactacaactctcatcatccatctaatcacccttcaccaactccactctttctctcccccgcccgcccggccttaccggcaactactgactcctcgtcccatccttggacgaccggtttctccgtccatccatctccaccttcagattgggctatctctcctcccaccacgcctactccttcaggcaagcgacagggcacaccctctccctccgagatggggattagagaccttcgcgatcgagaaggctatcacgaaggtcctggagcggtagacgggatcgagtacgaatcggagtggctgaacgggttggaagttctcggcaaggtcggccaaacggtcgtccgagggatcaatgtcgatcaggtccgtaagcgcctggcgcgtgttccagacgatttcttatgactcaccagaggtgattaacaaagttatcttgggtgtaacaaaccgacatatagtacgctcatatcgaacaactccacctctccctcgatgtccccgagacctgcttgtttccttgggttggttggattgttgcttgcgtgcatcctagtctccaccatatgctgacgtccctttgtttcttgtcccttctagttgcatggaatgggcgatggcaacaaactcttagacgactttttcagttcttttccggggttagtctcgtcacaatgtagaagtgctcgtttcgtcagagactgatcttgagattatcactgcctccttctttacatctcataggttcaaggcccagtggcctgcgtacgtgattccggttattctctctgatccattcagagctgtgcttattgtgaaacatgttgtatacatagccctcgttaccgtggattaactgtcctccgatcacctggacctggaaatgacgcaccttcatcatatacatcaaatccatcatggagtactctcgtcggaaggaagcgcaacggctcgctcgcaagcaattatagcgcttcgaccgatcttagtagcagtggagatcgaagtgcttggagctcagaatgtttgtgcctcttcttacttcttacgcattctgcctctggaaatctaatcgtcttcgctctctcaaaacatttctaccagctcatgcttcgtcctttccaacctcggtatcatctctttcctccatagggtccgccggtgataagggagacagtcctccggttgatatctctaccttgcccgagggtacctatcttcacccggaagtcaccatggcacatgcagccgctctaccggagtcgtccattccaacttctagaacaaaagaaacaggaggattaccttgctacttgatttcagccgtggacgccaaagaagttctgactattgctcgatctacaaacaaagctgtgggtgggagatcaaacgaggatcttcgacaagcaggaagattaagcaatgggtttcagcgctcaacccatacccgaagctcgttcgatctcgatctagctgcttctctagacccaactactgcggcggatgacgaaaagggacagtttctgaagagaagcgtcggagatactatctgcttgaggaacctaggcttacaggtggtatgtgtcctctctctgtaccgtttgtttagtcctcatcaggtaaattctatgtatatgcgcttatttttcgcggctcttcctcccactaggccaaatacgccactatatctgatattgtatgtcgcttccaagtgaatgcatgttttcacggtacttgcgctctgaactttacttcttcactcaggttatctatcatccccaaggcctttgcacttccgctttaaatgtggccgagaggtatgttccgttctagtttacatacaatcgagaagctattttgtattgacacctgtcgtgttgctcttcagatgtgctgaagctatggaagccgagtatcttttgcgaaagaaggtggcaggaagagatcaagatcccgtccgatataacgtcttcgtagtcaccggcaggtcctttgctacatctcatcgagacaactactgtgccgtccatgctaactcgcggtttgttttcatagatcctttcgaggagtttgaagttcgacaccctgatctcattggagtagattcccagggcaaccgtgtcaacaaggttgatctatttgagaaggaacagaccgaatccgtgagccttaccaaagcaagagaggtctctccaaacttttgggtgagttctgtctcacatctgctggcttttgatattgacacacaaatcactcacagtctgctcaacgttcactcagatgggaaactcttttgactgtccggtactcctggggagagatcgggaggtcgatgacgggccccgggaagacttgaacccccacaagtttgatatctgtatcgaggtctgtcgaagtatcccttcatgatactattctttcgtgctctgaatcggctggttgtgttttgtctttactacaggcctttgacggcgccgagatgcctgatcaggatcgattggacgataccaggcgaacgctggcatatattgctaaacagagagaacactcacaagagtctctggtcgagtctctaacaaactcacatctccactctgattgccgatccggtggttgctctgatgatgcgtctgatatgaccgcctccgggctgcctgtgtcaggctcccccaaaccttgtcagatctaccatttgcagacaatatcgacctcactcgttattccacaaggtgattggagggcccttggggtactcgcggccgaattcgtagagtttgtcagatggacaaaagaaatgatcgacgagggtcggcgagtgatggtccacggatttgatggctacgtgagttaattctgtgaagatttgtccgtggcttgacgagtttttccgaatactaaagctgcacgaatcgtttgccagactgagtcttccatctacgctctggcatacatcatgtgttgccatgagctcagtctgcccgaagcttacctgcatctgcaccttgagtcaaagaggtgcttctttgtctatccccacgatctcccactacttcgcaagatcgaagaacttctcgcttcagaccgactcaaacagagtgttggtagtagctcccgaccgtccttgggggaggccgggttctcgatgttcaagtcaaagacaaaaaacagcaagccaacgtcctcatcgccaaaggcccagacttcggtagccggccttgtgagctccaaattggacaaggaaaggaaagcgtttaacgcaaagaagcatggggtttggttcaatgtttgtccttttctactccttcttcttcttgcgaagtccagtttgttgacgagccattcattttcatggccacgcttacagagccctacgttcgaaggctgcttgccttctaggatcaccgaatttctctatctcggaaatttgaatcacgcttccaatccgcacatgctacatgcattgggtgcgtagaatgacagctggatcgagcgcgtgctcgtgttagatatagcagaagacctaatcaaccttttccctttgtatttcgcctctatgtctgcgctcaggagtaacccatgtggtctctgttggagagtctgcgctgctagatccatcccactcgatatcccagtttccacactcgtatgcaccgaatacgtcactctggtacgagcatcaggctggccggatcaaggtgctcgacatgcagagcatctgtgatgacggggtgagtccgttgaggcctgcgatcgctgaggcagtagactggatggaccaagcgaaacgagcgggagggaaggtgctcgttcattgtaaagtcggggtgtccaggagtgctacggtcacgattgcgtaagtgtttccttctcttaacataccgcgggtctctgatactaaattttgagatggatacggcttccctccccttttagatatctgatgaagtactgcgggtattcattgatagacgcatatatgcgtacgtatttgatcatcttgtggccaccaagaagtccttttcttttaactaacgccatctctgaccgatctaacgtgggcagtcgttcgagcccgaagactgaacgtccttatccagccaaaccttaagtttttgtatgaattgaccggttgggaaggtttgttcttggactcgggttctttcccgtcttttcaagtcgtcgattgactggctgatttgttctggatatgcgcgcctctttatcggcattttaacaaaaaacgtaatctagtcgagctctcgtgggaaaaagcagaggcggctcggacgctggcgtgcgccgagaacggacaagctgaagcccagcaggaagcgcctcgggttcatggacggaaggcaatgagttggccggtgatggctaaggagattgtgagtgactgacggtttgacgttttcgacgactctgacccagttctcactagtgcctatgttttttttttaaaatccatcgttcaggccatcctgaaccaccgatacttgcgaggagcaagctagttgatgtacttttactttttttttctctttcttctctcttcttgtcttcatcctcataggtttcccttgatcaacactattttctttttccaattctgtcctcacaaccttattatccgcatttcccatttatcttattcctttcttctctcacgagaatgtattgtttagtctgtttcgtttctttaccaatccgtgtttgtttctctctcttctttcttttcttcaagggtttcctaaatttgcagtagatcatgtctttgacgtcctatgttccggttttctcttccatcattgtatgcgtttctttcctcttctcttctcttcttctcttctcttctcttctcttctcttctcttctctgtgtctctttctattcctgttcttatgaatattatacacctaagctatcgttcttcttgaagtatccgagtctgtgtcttcttctcttccgtgctatctagccgctataatctcacttggtcgttccgtcttaatttatcccgtttatatctctgggaatccgaataatcagtcgtccgagacggaggacgaggggtggttgtcgatcaagtttgtgccgacggcagagtgataagtcgtcatttgctgtcagttgtgagatatctgaggctgcaagtaagagaacgagattttgtctgctaggaatccagatcagataatgagaagagaaggagaaccggacaaaaataaatgacaacggcaaatcgcacttcctcttgccctttctcgtctgcgaagagagagagagagataaaagccgacggaagcgcttaaggaaaaaacagggttaatctgattacttgtaggataaactgatcgacagaactttctttgcaagggggttcacctgagaaggacagacgaagcatatatcgcaagaactttctggaacaaataaacatgtttattacaaaacacggtcaccatgatccaaggatttctctggtgatttccaactctcgttcgtgtcgtcttgccatcctggcttctaatcgatgatttctcgagttgcgtaatcccgtggctgcatgatgaggggtttacgttttttttccttctttcatcttgatttaatacaatatacgaaacagaacgagaacagcacagtgctgtctgatgaaattccaatatccctttggttactaccctggttctcctcttttcgattcacccggtcagatccgaatcgctgtctggacctttttgtgacaaagaaaggggaagtgaagaagagacggagaaaaggggcaaggaagagcagcaagaagaagaagaggaagatcatgatgatgatgataaaaaagaaatacaaaaaaaaagagaggagaaagaccacccacggcgaaggaaaagacgagggaacatgtcgatcgggttgatccgtccgagtgacgggcgtttcttcgcagccagtcagcgcgtgtgttctctgactggtttgaaaatcatattcgatgacggacggacggacgatgggattctgtatcgttcgttaacaatttgcaatctatactttccagtattcttacgtcttgtcctttgtctctatcgaacccggtctggtgtactcagtttcttcttcctcttctttgtatggacgggcaaagtagggggagggagaacaggacggcgtggtcttaacgtgtgatgcatggaatcttttcttttctttcgatggggcacaagcgaatttttattcgttttattttaatttaatttaattttttatttctctgctttttttctccgggcttttttcccagcaatcctcacactcacactcacacataaggtgtaggagggacaaaccctttcacctgtttcctttcactctctcttccactctctctttcactctcctccatcttggactctggacgtgatacggaggtgcctatctagcctagacaagtctttcatctcagaacatcaaggcagaataggaagaaaaaaaaaagctatttaaactacaaagttaaaccgtagctcgctcggtttcttctccttgatcctttcctctccttccatccaccggactatgtttgaggaagtatgcttgttctgtggtttggtcagtacattttctctttcatcctctcccattcaatctagtacgcttctgactgtcctttcgtattcacacacacacacacacacacagccttcgaatggattgtacgtgctggagtcattctccaatccctttgttctcgccgtgttgatcaaccacgttcgtttttcttccttcaaaagctgacattgttttttttttctttcttttcttttttggaattcattcggtttttgcgaatcactcgtcacccactcccatattttctctacttcttgttcggccggcttcttttacggatcgactcggaacgttttccatcgtcgccaaacgttcctctgccgtcgcccttgtttcttcacacgacgttccgttcccaaggctgtattgttcggacacatgtagagcaaaggacaatgaacccagtccggctattcgtccggcagatcatcctctctctcacctgtcgtcgacccatcgaaactcggcaaccaacacgaggtcaccgtcgacgttccaatcaccagtcatcccgttgacatccccgttcctaggtgccctcccctcactcgttcactcacgtcctcatggaagagcatccaactcggtcacatcctcccctgccacctcgtccgccaacacatccccttacccatggacaaacccaaaccacccggccgtgccgaattcgcctcctcccacgctcgctctgcctccgcaggcgtacccacagccaacgtcgacaggcaagtcgactccttcggagaacggagcagccaggctaccctccttcaactcatcttctctcgactcccattatatccgaggagatgaaaccctcaggttctccaggcgcccaggactcacaaaccatttcacctcgcccagagcactctatccgttggtagtccattccagaacatcctcttccaacaataccaccatcaccaccaccaccagcagcggatcggccaagccagataacgcactcggcctttccggagcggagtccttgagcccgagacggtccgcagaaaaactcgctcactatcatcaaaagtcaaaattggacaggccgccttgtcagacggcccactcgagcggtcgttcctttttcagcgacggctcaaccaagattcgacgagggagcgaggaggatgacgttcacccatccgacaacgaatacgaccactcatccaccctttccgcccatccacacagtcatatgtacgcaaactcctcaagaacggacagccaccccgcccatcgtcatcatcacgactatgcctccttccgagagtctccactcaagccggccgaagaatggacgtcgtccgtctcgacgacgacgacatccttcggtcgacaggtctccaacccttcctccaaccactcggcctcttctagctcacgtacatccccatctgcaccctccctttcgcccctccagcaaagtgagccacaggctgaacctcgtggacgcagaagaggcagggacagaaacgattcgtccgacagagaaggacatgtgtacgaccgaagcgacgtggtcgaggagagagagtctcggagtcgatctagagcctcgagctcccgacgcagtcggtccagagtagcagacaatagtccgagacggaggagcagcaggtcgagtagaaacagggagcacatcgaatccagcagagaacgcggcagacggaactcgagtggcgctagacgttccgattctggaggcagggcaaactcgagagaacgctcgagaggtcggagcaatctctcccaacgacctcgagatgagtcttcgagaggtcggagtcgtagtcgggacgagtcttccagaggtcggagcgactcccgaggtcgcgcaggccgtgggacggacgaatcggtttccccgaccagcagcattcctcctcttggtcagccggcaacccgaacgagacggccgacaatcgtcaacaaggcgcccccaccgtttaccgtgctctttggccagacgacgctccgttcggatgaatcttcccaatcccggtcgagagatcgcagcagacggtcatccgaagaatccagtcagaatcgtctccagataaacgcctgataactcactggatttccattctgatcacctcgtcccaatcgatctctattctacctgccccctctgccctctcgttcatgcactttcccttcttacgacaccgcaacgacctcgatcatgcccatcctccgttcctctttacctttgtgtttccatccgtctcggtttccttcctctctttctccctcttcctcgtttttctgggcttttgcctctaccgctcgttgccatccatgttttcatactttcagcgttctctccccctcactcgtccacatatcgcctttgccattgttacagtatccgatcccctctcttaccactcgcattcgaccatcctcactttcctcctgtccgtgtttcctcggtgtattccttgcacgtttcgatacgattttaatatttccaaaagaacccatcgcatccttgcccccggccacttcacttcttctctccatctttgtcaaagataccggtcttgttccacccgtccatcttttcgccttcacctctccctttctcttctgctcttttcaacaacaaaaaacacttcgatgttgcctcgtcgtctactcggaagattttactctttattgttactgtatcttgagtagatatccccctctctttgttcgtctctttcttctttctttttttgatccagacgtcctgctctcagctctcttgctagttgctttgatcttctttcattcgatttgcatcttcggctcccacaaggcctttcttcactttcactccttttgttgtctattcgaaacacacacgcatatatacacactcccctcttctctccatcccatctcatggcttcctctaccgttctttcttttggaaggaaaaccacttcccagtttattcctctgacgttaacactaaaaaaaaacaccccgatgggatcgttgatgttgtttatattctctactgtctcttcataatttattaaaaacaaaaacaaaagatgaaaatgcgatatatgcaatgataccagatatccttctttggtgcacacccaatttctccaccgatgctatcggcgtccctcgagtctcccaccttgtttcttctcatcgttgacggaaacgagaacaaggaccacgggcggcaggtctacctcatattggatgttctccctcctcttgtttcacatcgccttaaagctcttgtgtactcttcttgaacctctggctcggcgggtccatcaccttgaccgctcggacgcccttcaaccctttgagaccgtccaacacatccttctctatcctagcccaatcttgagagccagaacgaacgttctcaacagaaacgatatgttcgtcggggagttcatcgacgggcgagatgtaggtcaccggcacgggggatgtcaatagttgtgaagaaggactcaacaccaacgcgtcagtaaatactgagaccggggaggacagggtaagaagaaggtaggtgctgctttggaaatgtagttgtggaggttgaactggaccgagtgacatcgcaagataggtctctttggttggtggatgagtgggtgagtgggtgagtggataggttgcagacaaagggtcggatcctggttttgaaaggtttcttgtctaggttagcaggcgggtcggggtaatacgtctcataccgtccagacaaagcctgcttactctgagtatctgatggctaaaggcgagagcgaagacaaggacgataagaaataaaactgatgagggaaggttaaaggagaaaaggcgaataaatatctttccttaaagaaagacgtcatcgggcaagttcaacattgatcctccaccaccaccatcatcagcactcacaccgacaccgacacatcgctcaggctttgcaagctggacaacacaacatgaacagatcatttcaccaagcactccgaactggtccagctcggatgaaaggctcgtcggttgctctgagaaccagccgtccaagcgtgatccacgctcagcgagcacctttacacaccactcttcccactcggtttcctccttctaatcctctactatctcctgctgctgcctttacagattcatcctcgtcctcgacatctgcagagccgggtccgttggaagctgcctgttggtcatgttcggccgatctggcgagtcagcctgtgagccgagcatcgacttgttcgacctgtttagctatccaacctgtcgtccggtcgacgaatctgtttgaactctttgggatggacaaaaacgggacgttcgatctggatgaaggctctttgaggagagagtttctgttgaggagtaaagaagtccaccctgatggtttcaaggggaaaggagaggttcgttctttttttttctgcgttcgctctttctttcctttctctctttgtctttcttttttgtggtgcttggctctgttcgtgtatgaacgattcactgatgcgaggtgtccatggaaatcgatcaaaatacaaaccgccagatcgagtaccagtttgcacagcagcagtcttcgttactcaacaaagcatacgaaacgctgaaaaccccgttatctagagcgcaatacatcgtatgtctgctctctttgttttctcttccttgtcagatatctggcaaacatagattttcaagaaaagtcgatactgatgaatgatatttctttcgtttacacccaaaacgatttctcgttcatctaaaaatcagttgtcgttatccgatatcagagtccaagaggctgacgcaataaccgaccaggctctcttgatggagataatggaagcaagggaagctctggaggatgctgaatcagaggaagaagtcgatgcgatccgagaagagaacagaggtatgtcgtcaaatctttcgctctgctccctcttgctgagacttgactttccttgtttatatggaagcggaacgcaagaagagctgatgactgattgcttctaaatgattatgggttggggttctctgacgaaacccaaaaaaaaaaagaaaaagcgaaacggacaactgaacagctttcggaagcgttcatgaaaggagatctaccgagagcgaaagatttgacgatcgagcttagatattggaggaacgtagatgacgcggtttcgaacaagttacatcctgtcgattgatgtctctaccttttgttgcggaggctgagaaagagagagagagagagagaagcaagaagctataagagatacaaaaagagtcccaattgtctgactttgagggcagttcgacaacactgttttttgctcattcgatttaaacttttaggtggttctctttgagatacaaaagaaacaaaatagacaagatcaggtctcggcctcctcgacctcttgtccctctccgacgacccatctggagccaccctcgatcctgacggtgacgtccctactctctccccagatcttgagcacctcgcctacactcttgttgccctctgcttccggtcctgggaagaacataaagtgctgttcgacaaacacgtcggacccatcgactacagcatgctcgccgttgccacctttgaaggcgtagatgtggttgcaaggcacaccgaccatctgccgggcgagcgcccgaccgagagcctcggtatccttcaacagtttcccctgtgccgacggggctttcgttcccggaccggtcagatgaaggacaaggaaggcgccgacggtaccgacattggcaggtagaccggtgggtgtgtgcgcgaagaacgaagggtagaacaatccttcgtgggtctcggctgtgggcggggcaaacaccgagagtcgagcaagagaaatcttttcaccggttgtagtgacgagtgaggtgatctgttgggcggccgtctgggacgtcgaagggaacgacgggtccggattcgggctcaacaaaggcgcgtccgagatcacagacggagacacgggaacgaggtgcgacgtagggtttgcttcagatggagctgtcggagggttatggaagaagacggcggtgtggtggatcgattggagtaggtcagtgaagccaggcgttcggtagacgaacgaggtttcgcagtttagctgcaagagaggaggattgacgacaaggaaaaccccagagaagaaaagcaatcagtactactgaaaagaacgcattgtattctcatcaaacaagaatagtttgatcgattttgactggaatccaaatgacaaaagcgtacgatacagctcgaacggacatacctctacgattcctcctcgacggccccaaccttcaccaatgacaccgacggcaatgagaccttctttggtggtcctgttggccaactttgcctgtttcgctgcaccaccagcctggagatccttctcgagccattccaaagcggaaggaatgtcaagatttgcagcggcaagtgcttctcgagctttgacgatcgagatcggatgttgagctctatggataaacccagagatacaagtaagaacgaatgaccatgctagctcgaccgaaacaaacgacgggcccacctgagctttgcgatcaacgcgactggaaccttgacgggaggcgcggccgagtacgctctaaggacagggcgagctgcagatgccctaagaggagctcgaagaagagagaacatggtgtgaacgtccaacggaccaggatgaggatgagaagaaagatggaggaaagaaaaagaaagaaaaaagaaacactagaaaagttttgtagtgtttttcaaaaatcattacgagctttttctattgcccacgtcggccgctctcttttccgtttcccccccaccggctcttcttccatccacccaaccaacatcgtcatcgtcatcatcgacagtagcatcgacagtatcgcccactaaacagagaccaagagagagagattcactggctatcaggcacggcttctagtttatcatagagatatcggatattcaagtctcacactcattcagtaggtcatacatcatctggaagtcgaagcactcgttctgaccaatttcgtttttcttgttcatcccggtggtctgcttttggaaacattcgttggaacgttttcgaacgcaacagatctcatcactgtagctcgtttgaatcgccagagggcctgattgttctgaatccatgccatccttgttttcgttaccatcatcatcatcagcagcttcgtcatcatcatcaccgccggcttccataccggaatcgtcttcaaagccaaccacatccgacaacacgagttccacaccgaacacaacgtccacaaacaacaggtcgataccggaatcgaccgttccagtctctgccgttgacactccgacagattccgactctatagagccagtttctcccgcgaatcttcttcagccatatgctactctcttgaccccgtactccgccacaccacacccgtcctcgtcgtctcctccaccggcaccggcacctctaccgccgttccccagctcatctctccggtgcttccttctttcgtcgtctctcccgcctcttcctcagcatgtcgcgttcattccttacacaccatacacgccttcgcttgcgcctccttccggaccgaacgtcgagcgttctcgagcggtctgctggcgccggaaagagctcaccaaggaagactgggctcgagaacgcaagggtgtcgagaaatgggtcagatggctagagggtaaagagctcgtgcttgtctctgggtccgaggctgtgagaagcgtgttgttcgacagggaacccaccggcgggtcggacgaggataaagagagcttgatgagagccaagcaggagcgaacggtgtggggagacaacttagaaaagtatccgagacaaagctcaagacctcttttatccgactgggttcaagggcgtgaagagtaagcccaatacatactttctctcccctttgtgcatgcaaagcttgtgtatatgcatagtacttgaactgacacattcgatttcactctctcgtttgaatgttcttcaacatcttctttctctccaatagcttcattcaacctcttcccttgcaaccaccattcctttctgtcctccaggcggctctaaaggtgtccaccacgatgagtacgatggtgacccggtacgttcaatcgttcaccgatggtactcaactcggcgcgttcaacctcatctgggagcgcacgccgctggccttggagttccttgtggaaaaggtgccccaagcatggaaaaatttgccggacaacctaaagagtatcatcgatccagatggcggtacgggtacagcgggtacgggcaagacggaataagcgtctgtggttgaggagaacagcatgcctttcgtttgttgtacatacatgctttctcttttctttacgtagaaactttgattaggcgccgtactctcatacaggctttgttttgaacggcgataaagatatgtgtttgatgtacaaataaaatttcatcatgattcctcgaaggatgagggaatgctggacggaaggattctcttaccgttctagccggtacatctttaccgcgagacccgaaagagcttcactctgaatcagctctttgagatcctgtttcttcagtcttcagtgtccgctctttacatctcaaacaccctcctcacatcgtctctacagactgaatctaggagaagaagaagaagaagaagaagacaagggagaaagaaaaaaacaaaaacaagatgtccgacacagtcatgcacccaaatctcccacagacgaaccaagggactcgaatctctcagatgatcgttctagatagatctcgtttggctgactatgaggcatgccatcgggatgtatttcctggagtgctggctgctcttcgaagagctcatatattcggtcagaacatcacttccttttctcggctcttcatcgaatgattcggacagtctgaaaagttgctcagactatcgtcttgcttgttttgacacgactatagattatagcatccatctgtacgacatccctgcattgaacccaaacccaatcctagtcgccacaatgagatactgcgggagcgatttcgagcgagatatgagctcagttgcgcaagatacagagacccatcggtggtggaagatggcaagcacgctcatggttttgacccttgtattttctcgatgaagcagctgactccttctttcctcttcatacgcactatactccgatgcatctgaaaacaccaaaaggtcgacccgatgcagaagtcccttgtagagggagccacaggaagcgcctcgggccctggctggtggatcgatggcaaggaggtgttcaggatggagagctgagggagagaacgattctgtattccttgttgtagttgttttcgtctatactctgtaatgttttctagtcaatttttttaataagacggactttctgttcaccttcaagttgcatcttaccattccgttctatctcccttccaaaaccagagagttcaatcggctcttttgattctcagatgacggatcgtcctatccagcctgcttatccaatggccttcaaactactccgtcagccagcctccaagttctccagcagactaggacaattgacgttgaccaggtcgggtcctagttcagaacctgctccttccgaacactcaatcatacttcctacccctggtctgcttcgaaagacaacccagggagctgtaccccatttgacgaatgataatctggaccgtctgcaggattcggttccgcttgctcatgtgtctctaagttccttgtcagtttatcttccatgctcttggtttatcgggctgatttccaacgactgattcgccttctttcctgaacctgctctgtctggctgcttaaatatccagctatactcatcctcaaacgataccggcgatctctaaagcatcctcctcacgtccactacataagtttcttgttttctcaccttctactaccattctctcgctctcactgtcggatccaggatcatccagccctcctccgccagccgcaggtaacacccaattatgcttttcctcagtccgaggaactcactctgttgcgttcggcgacttctatcgagctgcgttgagcctccgaccggacatcatctggtcgccttcagacctcttcagcggttcggttgcgcctacaggcacaggaaagaacagccggggtcgaaaggaacaacgaggagtggaaaggacgatcaactggttggccgaattgatccttgctcgccagtcgattgatccgaacgaacgcccagccatctgggtcgagctgatgggtggagctgagccaagaaacagacgagcgttcagccaatccctcatcgaccccccgcctgtcaacatcgagctgactgaaccgctcgataaagaagtcactggctacgtccttccgctctcggctcttcgacatcgactacacccatcggattctgccagtcggtcgattcaaggcattcaacatcatccgtcgccgacacctttgttcattcaagagatcaactccctcttggaatcgtctcttgaggaattgtcagcggagaagccaagatacgcgccagcggcgctgtcgccgtttgagatgttggatctcgttgagcgtggatgggacttgtttgattacacgccggctgaggaggcggccgaggcaggagtagcattctcgttcgagttccccgttcctaccgagacggaatcaacggaacctgaagatattggaatcaacctgtacgatcctcggtttgagttcgatttcacgcccttgaagcctactggaaagaagaccttggtgtcccacccaacgtttgaccaaaatccaattcagcactgtccgctctcaaaaatcgacgtcgagaaggacacccagccggctttcacaaaggcctatatccatcatttacttctgacccacgagtgagaacacctctttggatttcttatagtgctgctctcttcttatctgtgctcatgcgtgcgactgattcatggttccccttttcttaacgtacacgtctgaaacgaataaagaatgctgtccaacttgctgatagcaacacacaacaacgcccacctcgacgccttcttctcttcaattcgtcatcttctctccggtccagacggtccggcccggtttgcggccgagaaagctcgattcttcagccactatgctcagactaccgaagagctcgagcaaggttggcaaggccgagcgggtgtcaagtttgtgagagggaaagggtcgatgggcaaggatcgggatcttcaaaaagcaaagaaggatattgagcaagggaaaggagaatctgtgaaatatgtcgtgcccggggtggagagcatgcaacaatagaattccttccaaacgtcttcctctgtgtcctaatcacaccaacaagcaagtactgaactaacagcgcaaggtcaaacgcacgaagaacacgttgctagtcttatctgacgcgtctacgccacatggcacgtgagcacgcgactgatttcatacaccgctttcgcgtatggttacatatcatttacgcgtgcccagcctgcgcgtgacctccttcttttttctggatgagattatctggaggaagcagagaaacaacgctcccgtttgaccacccaaacatcagccttcctcctcttcttggtagcttcggggctctatagatcttgttaggttactaatatccaccaagtattcaagatgacatccgctcaagacagagttcccgtaagtttttggctttctgccctccttcgacaggaattttctcgtctttccccgttgcttcggttttattttgatctcttcttccgagcgtttaccaagaatatgatcgattctaacaaaccttgattccgctctatggctccgttgtctttgtagctcgctctccacgtcccgctttcttcaatcccgttcaacccaacgaacgtccctcacaaaggatccaacgggtacaataatgcttcacccgccgaagccagaaagaccgcagtacagcttttggtcgaagatgctcaagctagagatttcgatcatgtttgcctcagcctgaccaactcgtgagtttatctctctgctccgaatgagacgaatgttcttgttgatgtttctgtgtgtcgtatgtttgcatatgtgtatccaacacattgatcatttcccccggttgtatgtcttttctttaccgaacgcatcgtcaacagaaattggcaaactcgatgggagagactttgtctccgcgcggcggacgcaccggacgatccagagtctcgacgaaagacagaggaagaggccgaacgctggaggatgggaggcggtttcatgagaggcgaagttactgtcactcgacttggtgggctcaatcgaatttcatcctcctccctctccctacatcggctgctgctgctgccgagtctttgaagctaacgtgcgcaagagatttatcacccaaattcgcagaggaaaccgagcatctcattggaatggcttctgaatggttggatctcgactcggcagatgaaggtattcgattcgattctgaactcgtaagtaacaccttttgctttttgtaccgcttatgctagtctgctgtcatgagctacgcctgaaccaacagacctatctacccatttcttcaaggcactccggcatgagcttgctcaagcagcttatctcaacgtacccgtcgtgatccttcccccaccccggaaccgagcgctcgtcgctgactacgcccgagctgtgaatgcctgcctagccgctggtggtccgtatacccagatctctattcgaatctcgatctctgatccagcagagcttatcaaccagccaggagataacgcaaggagcagtgggagcatcatgagccggaacagtgtccgtctgagcactagccggccgggcggtccggacccaagcgcgacttgggaattgtgggatgtcatcagaacgatgtgtggatacaaccccagacttagttgcagtgagtaaattgtgctcttcatcaaactttatgatccatcagcccattcaactgtgcatattctgctcccgagattgactgtcgacttttcgtgtttcccttcccagctttggatcttaccacccctcttccgccttcccctggcgctctcgctcgatgggcttccgaacctactagacatattcttcttcccgcctctagctttatctcgaacgccaaaggatatcccgtgctcagcaaggccacccaaaccttcctcaaggaagtcatgaaggtatctttctctatgtttattcctgatgtaacttccatacctcttgtttttctgactcggatcttatctaaccctaaccaacagcaacgaccaacaatcattctttctcaaacgacggcaaaccttcacccttcaggtggagccccggcctatcctcagtatgttcgacatctcgagcgggcagccaggcagcttcatacatctcctggcggaatggatgactttgcaagaggctactgggactggctccaggcgccactccagccacttatggatgatctgcagagctcgacgtacgaggtgtttgagcgagatccggtcaaatacaagaactacgaagaggccgtggtgttggcgttgaacgacagaccggcagggacccccctgtgagtaattgttctttctcttcccttaactgatcatctcaaacctgatggtatctcatgctgattgtcatatgatactacttatcaagggcaatctatgtttgcggagcaggaagaggacctttggtcgccggtgtgttgcgagctttacagcgtgcgaaccggcaggctcatgtatacgccattgagaagaacgccagcgcttttatcacgtatgtaaactcttctgcactgacatcacagtagacttgctaagtctcaatgctcaatgaacgggctcgccttccttgaaaatcgcatcttgtccgagggtttatagactgcaagagcgtaaggcgctcgagtggggagatgcggtcgaaatcattcttggcgatatgcgaacattagaagtccccgagccggccgatatcatcgtatcagaacttttgggatccttcggagacaacgagctctcaccagaatgtttggatggagcgatgagattcttgaaacgttcgttctcatactcctttttgctcacaagaagatcaagacagatcgaaaacacactacgagtggatgttgattcgtcatgcgttttaccacacattttgcttctcattcaaacagccgatggaatctcgatcccgtcttcctacaccgctcatcttgcaccactttcttcctccaaacttttcaacgaggtcaacgccacctctagagaacccaagcaggcagagacgccctatgttgtcatgttccaggctgtcaacacactttcaggagatgcccctccggacagcgctcggtgtggaccaagggttcaggaatgctgggcgttcgagcacccgaggagggatctagtgctcgatgattcgggactgcctctcaccaattctcacaacactcgatccgcccacttgacgttccatatcccacatgcgggtgctctccatggtctggctggttactttgaggctcatctttatggctccatcgggctttccattcatcccgaccgacagcacatcatcagcccggacatgctcagctggttccctctgtttttcccgttccgagtgagttccaagttgaacgcctgcttcttctctgggaagtccacataattcttacgatcattcgtcctttgtacttggcaggaacctctcttcttaccgagcaactctgaactagacgttcacgtttggcggttgaccgactcgcgcagccgcaaagtaagtccgcttgatcccttgatcttagcatccttcttctaatcgacaaacgtttggataccttgttcatctatttctcttgtactcatccctctaggtttggtacgaatggcatgccgaagcgttcctaccccttacttctccaaccgctcttatttcctcgccttcactggccacgccgggaatgccttcgactcccggtaatggtgttcgaacaccattggctagtccgatgatggacgccgctcaactgagcggaggcctgttcagggaggggacggagagtctgactggaggaacagatggatcccgggggactggacggatcaagattggccagacttcattgctcaacccaggaggaagaagcagttatattggactttgatcagagcagaacgaaagttcctctcaagaccgattttagggaggaaattctcatcatactcaaaatttacctttcgatttctctcgccttctcttttctttcttgggcgagcttccctgatctctatatacacatggtcgtatttatacatacatgcgcctacttccagacgctgtgagcagatgaacatacatgaatcatttttgaaactatttaaggactaggatctggtaattacgaggtgactcgggtaaaaacactttgtgctccgtcctcgatcgacttcttctttcttctgctctcctcactaccctcacgtttttctatctctccctctcctttcagataggaaaaaaaacagccgagaccatcttagcttgagttagtcccctatcaagagaaacctggcttattctgttgtgaactgaatcgattgtgtctcatgcgcatcgccctccgctgacgttgtatccgtttcgaaacgacaaaaaaaagttaggtctcatctgttcaggaccatgtccaacgctagttctaccaatgaccaggtggatattctcaaagtctcgtacgcatctctctcttctccattctccttgagtatcttaagagaaacgtcgactgatcaattcgatgagacattctctccttctctttccgtacagaatcttgggcaaagagagcatccactgcggttttcatttaacccctcacctcgttcggaccgtcttgtccgagctcccttcttcagcctatgctatcattaccgataccaacgtcggttctctctaccttccagctctcgtcagcgagctcgaggctgggatcgctgcttcgtccaagcccgacactcgagtcatcaactaccaggtcgacccaggagaggaggctaaatcggtcaccgtctgggacgatcttcaccagtggctgcagtcggaaaaatgcaccagagataccgtcatccttgccctcggaggtggtgtagtaggtgacttggctggtttcgttgcttccaccgcgtaagttgtcggtcgtcttcaagctcgctctttgattgatcgaacgtgtgtgcgtcgaggggcattttcgatcatcactcagcgttagcttacccctcttgtcatctttatcggggaaattcgactattgaatagcatgcgaggagtccggttctgccagatccctaccactctgttggctatggtggattcggctgtcggcggaaagaccgccatcgatactatccacggaaagaatctcgtaggagctttctggcagccagagttcatctttatcgacttggcctacctcgagacccttccttcgagagaattctcaaatggaatggctgaagttgtcaaggtcagtcaagcctctgttctatcgaccacctctaagtgcaacagagttgacccctattctctgtcatccagactgccgctatttggaaggaggatgatttcgcttctctcgaatcccgagcggctgagatcacttctgctatctcttctggttcaacaacgtccaccttcgcaggtcgaacggttgcttctcggtctgaagcccaaaagcttctccttaccgttgtctctggatctatcggcgtcaaggccgagatcgtcaccttggatgagcgagaaaccggactccgcaaccttgtcaactttggacacaccatcggacacgccatcgaggctgtgttgactccaaagattcttcacggagaatgtgtcgccatcggaatcatcttggaggccgaggtcgcccgtcagcttggaacgctcagccaggtagccgtcggtcgactcaagcgagcactcaaggcctacaacttgccggtctcggtcacagacccgaggatttcatccttgccagaagctaagggtctcacggtcgatcgtttgcttgacatcatgcgaattgataagaagaactctggatcgcacaagaagatcgtgcttctgagccgaatcggaaagacgtttgaagagaaggccaccgtggtggccgatgaggtcatcaggaagactttgagcgatactgtcagggtcatcggcggtgttcctcacagtcctatcaagatgaccacgcccggatcgaagagtatctcgaaccgagcgcttgtattggcggcactcgctaacggaacctgtcgattaagaaatcttcttcactcggacgacaccgctgttatgatgagctctttggtggacctccaggtcagctaatgtgccttttctttctcgaggagaactttgaactgacccgtgtccttctgtatgtttgttgacaacgtcttttcacacgcagggtgccaagttctcatgggaggacggaggagagactttggtcgtcgagggaggaggaggattccttcggtccccccctactggaaaggagctctacattggaaatgctggaacggccgctcgattccttacttccgtctgcgctctcgttcagtctcctgccgagtcgaacgaaaagaccacgacgatcctaacgggtaactcgtacatgaaggtccgaccgatcgcccctttggtcaccgctctcactgctaatggaaccgatatctcttacgttgagggacaaggcttccttcctctcgccatcaaatccgatggattcaacggaggaaagatccagctagccgcatctatctcgagtcaatatgtctcctccatcttgctctgcgccccctacgcctcggaacctgttgtgctcgagcttaccggaggacaggtcatttctcagccctacatcgacatgactatctcgatgatgaagacgtttggtatcaacgtcacccgagatgtcgatgctgacggcaccccgctcaacgtctatcgaattccccagggagcgtatgtcaacccggctaactacagcgtcgagtcagacgcaagtagcgctacctacccgcttgccatcgctgccattactggcacgacctgcacggttgctaacatcggttcgtcctctctgcagggagacgctggtttcgccaagaacgttcttgagcccatgggctgcaaggttgttcaaactgaggatgaaaccacggtgactggacctccagtcggtcagcttaaggccctcggagagattgatatggagaccatgacagatgcattcttgaccgcatctgtcttggcggccgtcgcacttggcccggctagggacgagaagggaggcaatatgacccgaatttatggtattgccaaccaacgggtcaaggaatgcaaccgaattaagggcatgcgggatcaacttagtcagtatcttttttcttcactgctttcttttccgacagcaaacttacttattcttcactccacctgaaacatgggatctgcagagaaatttggtgttgagactgatgagttcgatgatggaatcatcatctacggaaccactatcgaggctcttgagtctaaagtcaagattcactgctacgatgaccatcgagtagctatggccttctctgtgctagcttgcgtggcctccggaactatcatcgaagagaggaggtgcgttgaaaagacctggcccaactggtgggacgatcttgagaacaaggtgcgagcttgtctccttcttattttatagtaacacagatagaaaaaggtatatactgactggtacctattctgtctgatatcttgatactcgtatggtatttagattggcatcaaggttcttggtcttggaaacggacaggccgaggcctctacgtctgcggtcactcacgtctctcctactgtcagctttgaatcggatgcgtctatcttcataatcggaatgcgaggagctggaaagacttgggttggagaggtcgctgccaaggctctcggatgggatctcgtggatgccgacgtgttctttgcccaggaggtcggacaatccgtttccgactatgttgccaacgaaggatgggctgctttccgagaacaggagacccgttgcctcaatatcttgatggagaagcattctaaagggcacatcatcagcctaggaggtggagttgtcgagactcctgaggctcgaaaggctctccaaaactatgctaccactatcggtcctgtggtctacgttatccgacctgttgaggagatcatggcattccttgagaactgcggtcgaccagcctacggagaagccgacattgacgtttggaaacgccgaacgctttggttcgccgagtgctcgaccttccagtacttcaaccacactcacctccaacaccgacctgtgcccacctcgtatccttctgtgaatactcagaccgaccgatccgagatctccagattcttcaacttcgttgttggtcgaaattacaaccgaccggagagcctcctccctcccaaacgaactaccttcctttccctcactttccctgaattgacgcccgctctcccgttcatcgaggacatctctgttggagttgatgcgattgagcttcgagtggatctcttgtcggatgatcaccagaccgtcacctctcccaagctaccttcggaagattacgtctctcttcagcttgctggccttcgacagcgaaccaaccttcccattgtcttctccgtccgaactcactctcagggtggtatgttccccgacgatgccgagagggagtactttgagcttcttgagctcgccgttcgatctggatgtgagtacatcgatctcgagattgggtggtccgacaagagcctccaggctttcgttgagaagaagggagcttcccaaatcattgcttctcatcacgatgcatccggaaagatgaaatgggatggttctgatgtcaagagccggtactcccgagctgccaagtacggagatatcactaagcttgtcggatttgccaacaccatggaggacaacttcgctctacgcgcgtttgccgccaaggttgcctccaagtcggacaagcctcttcttgctatcaacatgggtcaagctggtcaactctctcgagtcctgaacactgttttcagcccggttacccatcctcttcttccagttcgggcggcgcctggccagctgtcttttgctcaaattcagcagaccttacacttgatcggatctatttcgcccaaggagttcttccttttcggatccccgattgctcattcgatgtctcccactttgcacaacacctgcttcgaggctttaggtcttcctcaccactacggtctccatgagaccgaggtggttgacgacaagctcaagacgatcattaactctgccaactttggtggagcgaatgtgacgattcctctcaagttggatgtgatgcctctcttggataccatctctgagcatgccaagattgtaggagctgttaacaccatcgttcctatcaccagggccgatgggactcgagagctccgaggagagaacaccgattggctcgccatccgagatctctgctcatccaagcttcctattcagagccgaatcagcaagtcgaccacgtccctcgtgatcggtgctggtggaacttgtcgggcagctgtgtacgctctttaccagcttgggcttcagacaatctacctgttcaaccgaaccaaagaaaacgcccagaaaatcaaggaaagcttcccggaagagtacaacattgtcatcatcgactctctcgcttctttccccggcgaggcgcccagtatcatcatcggtacgattcctggccagtcgaccactctggttgagggggcttcttctttaatacacttgcctgcttcgctcctttccgccaaggaaggaggtgtcgttgtcgatatggcctataagcctttccctacccctctgctgaagttggcccaggagaccgaaggatggaacgtcgtccctggagtctctgcgttgttagttcagggatgctacgcgttcgagatgtggaccggattgaaggctcctcagatcgtggccgaaaaggtcgtttggaccaagtactctgcagacaactaatctggaaggattgccgtccttacccacttgtttttgagtctataatgaaatttcttgcttctcatctatcatcgcttttccttgtcttctagctgtgaatcatctctgctcagaaccaaaggacccggatgtgacccgcgtctcttagcatattcctgttaaaaatgttcctctttatgtgcaccaatagggtcaatctgaacaataaaatcatattattcaacaaacccaatgatagaatacaactaggaacgagggatcctgcaagtgcgcgcgaaaagagaaagagagatatgagaaattgatatgaacactttgacgagatagattcatagacgaaacttactcgtttacatcaaaatttctcaaaaagaccagctttttgaggtgaagaaacacccagcgcaccctccagccttgtttagccttccactatcttcatctgtcccaaactgtggttatttcgcgacaggtccaaatggtcatgtcgtgttgcactttgtgtcaggcctaagcctcgcgcccgtctctgatgtatgagccgaattggtgtttgaacgagcgcgcaagctcccgttcatttcatcgttggagtcgatcgatcgatggttggtcgatgctttgtgagatttcatagcagcctcggaggcgtcctttgcgaaatctttgttggacgaaggtgtctcccggtcctgatcctcctcgttgtcgttcttatctttatcttcatcgtcgtcatcatcgttctcatgggagctcaaattcgagtccgagtcttgatctttccggagaagcttgataggaagggaggaggatacactttgcagttccgaaccgatcacgggaagaaattgcaaaggcttgtttgaaagaatgttgcccgtagagatggactgtaaagtcatcgatcgacaagataggcatcaatagcctgcggacgtcaatagagaaggtaaggatataacctaccggagtcaggatatctcggaaagtcttggaatcaacgtccagtacacctcgatgcttctgttcgatcagatgaagggccaaggccgttccgacctttaagactgagctaacatctcgtagggaaggcagaaaggatatgcttacgaaagtagtgaagtcacgggcgtgctctcttcgtccgaccaaaccgaatggtacttctttcagatcttttataatcttttttggctctgccagaatttttggaacggtttccaacaacgggttgccgagctttgtcgtcaaggtgtctcccaactagaaggtcaattccaaggtcatatgcgaatgagcaaacgcgcacatgggtttgacagaacaaggtatgatattcgtacggtagtcaagaaatctcgaggatgtcttcgtagatcgggccgcacaaggtccgagaacacgcttgggagttcatcgagaacatgaacctgcacgacttcatcgagagtactctgtgcacggttggccattcggtcaatgatttccttgtcctcgatttcgttcataaattgagcacggggctgatggtgaggcatatcacaccaacgaaacaaaatcaagcaccaatgtctttcgatcagcttccaatgtaaactcagatctgcgccaactaggatgcgatctcacagtcagccccctaggatgcttcctcgtgaagccgaggtttggggatctttctttcacactgaacgagtgctgagatgaagagcgtttgagaagagcacttggctccgttgtcttgtgtgggaaagagcgagaaaagtgaaagcagtttgtgacgcgctcaattgaaaacttaaggactgagtgagaaacggtgaggtagaaggtttactaacgtctgcggcatggacgacactggaagcgaggggaccggtcatgttttcgaccattcccaacgggactaagtcctcaagaagtccactccgttggagtgaagcaaccctacttgggatgggcgcggctgaagcggagttctgcaacgtcaccaaaagcagggcgagcgtgaaagctgaggaggatggtttaacgtatagcatatttaaatgtgcttgaaagaaggtcagaggtcagggaaaggaggtggagaaggcacgaaggggcttgatgatgaagaaagttcttgcacatttgattagcgcggcaagtctttgagtcgttgaatatatcagaggcttacttgtgagactggctcttaaacggggcagaaacggagcttgaccagcaagacgtgcgcgactgaattcggaaaaaagagcgtgggaggaacttgtcctattgaacgacgagacaggagaaaagacagacgagctcgaatcaatcgaggtgttggttttgaagggcaaatgagtgtggggaagaggtgacgcaggagggagagggagtgaagggacagaaagaaagaaaaatgagagaaagaagagaaaagcaggccaagaaacatagacacccagtttgtcctttatacgatcagaggagcaagggctcatcggaacacttgatgttgttgtttacagggctgggtgtcgtgagaagggtttgcgtcagttcgttaggcagagatgagtgcctgacctcacccaggaacagacagaaaaaaacgactacgatgttgtacatccaggttagctcgcacggcgatcttacagggtcagcatattcacaactgtctcctttttctttcgttgtaattttccaatctaaccagccaatcccacaagaatatggagaaaaaaagcttttttcatccaaagcattgacaactatcaaaatctaagcctagccaaccctagaaaaaagattcccaatgaagagctccttctccaaaaaagatggcccaaggactctgactttaacaaaagtgagtgcgcgcttagtaagccttcttggcagactgagcgaggaagagggagaactggtcgtagggggtctgtccaggggcaatgtctcgccagagatcgggggtaaggatctggtaagacttggagagagcgacgaaagtggccttcaagaagttaggggtggtggcggtgcttcccttggactgggtgtagacatcggcgataccagccatctggaggagcctcttggaagcgggggcggcgacgataccggttcctcggggagcggggataagtcggcacatgacggatccggtcttaccagagaccttgcaggggatggtgtggggctcctggagggcggctccccagtatcctcgtcggacagggatgatggccaacttggcggcgatgatggcacctcggatggcggtggcgacctccttggcgcacttgacaccaagtccgacgtgtccgtcaaagtctcctacggcgacacaggccttgaatcgggttcgctgaccggcagaggtctgcttctggacaggggtgatgttcatgacctcatccttaagggtggggaggaagaagtcgatgatctggaactccttgacggggagggagaaaaggtagatctcctccatggacttgatctttccgtccttgacgagtcgaccaagcttggtgacgggaaccctgaggaatcgcgcgagacaggaggacagcaatgagttgaagatcgaatcaaagagtaggcgcgctcacgcgctgatcaacgcgtgaagaaatagagcagaagaaagaagcgcttaccactccttgtcctcgtcctttcggcctcctcgtcgaggtcctcgtcgtcctcgagtgtcacctcgtccacctcgggcaccagcgcctcctcggcctgtcagtatgtaaattccacatgagcacgacatgtcagtttcccactccaagccaataatctttcggacacaaatttcctttacaatcaaaacaaagtgacctaccgaaggctcctcgtcctcgaacttcagacattttgaataaagggagtgtttaaaaagggtttaaggtgaaggcgagaagattaggtctcggactcgggtcgacctaagaagctagttgaagtgcagaaaacgatccgctctgtcagcatcgattttcctaaggtttcttatgttgcctgtataacatatagcatcttgttctctctcgagacttgcaacatagcagatcaaagggctcacttgtttgctgaggaacttgcttggggagtacaagcgtctgcacctgggaagctgatcgatttgcctgggctttctagaaaggtcagattccggggacaaaagtcatgggaggtcaagaatttgaaggaaaagatgaatttcaaaattctttcaaaatcgagaacaacctgaaattcagctggctcaacgcacttacgtaatgtaaacatccgcctcaggtacaccagatgttacaactgttgcatgttaccgcgtctgaatgcgcgagccccatgcaaacccccgttcacccccaatgtacccccgatggtaacccgacgcaccccacgtgtgatcaccccgtcgaacgttggctcggtatccctcctgttacgttcgttatactctctacgcctgttacatgtgccattctgatactcggccaacactccagttcgcccactcgttcccccttggataccgtctatcaactaaccacaacgttcaataccaagcctccaagcataccttcttcagctttgctctttagccttccctccttcctcaacatcaccttccccgtcttcagctctgttcgatttccagaatgatgaatttacagtccaaaaatattatgtttaattcttgccctgcgtgagttacggttatctatccaagcttatcttgaacgtgtgaccccattgttcctcccggaccaactctcacctttgttcatctcaaacacatctgtatatgcatgctctctagcggcgtatctacgaccgggaacagggacaacactaacaacaacaacaacaacaacaacaacctcttcgggttccctcataatggacaagtgaacgacgctctggcgatcgcttcggtcggtggacgaacgttcacctacaaattcaccggcacgggcggcggcgggccaaagtgttgggtttgagggcggctgggtgaaaaatgccatcccttcgctgggatggtcacagaggtttgtcctcttcacatctctatccatcattcagcataatcgtcgtcccaagacatattctgtcgatgagaatgtcttggtatctgccagaaagggctcatactgactcggttgtttctggttgtggcgtgatcttaggcacgtgacaggtgcctctgtgcgagaaccttcttccatctccccttccccttcctatcctcttctatcctcctcgatctcttccctctcttctctttcgtctacctctctctccgtcgtttcctcttctgcatcgatcgcctcgacagcttctccgcagatcatcagccagggatcgatcatcattccctcttcgaccccgctcttatctcctcctctctcccccgaggtcttacctgacttttctcttcccacctggtttatcttcccctcgtcaggtagcttggctcagcccaagcctattcgccaggtatcggtcgacctgccgatcactcccgattccactccaccgtctccttcgcctttgggaaatgcacccaacttcaatacctctgccggtcgtccttctcaggaacgcgttcggcaaggctccttctgggacactttgctgcccaagaaggaagaagttgcggccgctaacgcccgatctgaaccggtcgtggtaagaagtgaattatcgggcatcgtctgggacggagtcttgttgaacagtgggtcgggcttgctccccgttccggcggacgacgaggagcgtgacgctagcggaaagatcttggtgatcggtttgcctgatgccgttggagttgagattagagaatcagtcgagatcctagttcgtcttgctgtcttgttgttttcattcttttgacagcgcatactgatttgtagaatcgacctgaaacaaacgttcagatggatctcgcgtctgactatctagacgttagcaaggtgatctttgtgcttcggaaggcctcgccagatctgcgcgaactccttcatggtttgctcttcatcggaggatctatcattgatcctaaaggttcatcttctactacatcgaacatcgcgatcaacgggggaaagaaacgcggagaactgaagcagaagaaagtcgagaagaatggatcggggagtgaggaagagagtacaggaagtgaaagtgagacaacaaaggtaaagaggtggaggattgactctggtgcagtcttggtgggtatcgagttttgagtaattcacagagttgctttagtcaggcggtttagctcccgcgacattcttctttgcttctcctttttttattttatcatctcttgttagtcctctccgtttccgccatgtcttcgttcgttcgtcttgctgtttcctttctttcacaattgcccagatagagaagagcaggagtcggttcaaacgtttgagcatcgagcaaacatatatttttaccatttgatatcatcctgtctacagaagttgacttttctatcatatgcgcctatgcttttattgtttcgacgagtaacgaggggagaggaagaaaaaggagagtgataggatcggcacagaagcgtttgcaaccttctactggtcccaaccgacctcaccgacccatctcaagacacctgagttgttcttccagatatccttgacccaaccacctcgttcggcttgaacggcctggacaaaagcaggaacaccgccatcctcaaggccgaaataaagcaccttggcggccacccatgtctgggtccgagaactacctttactatcttctgaactttcggatgatgttataaaagaggaaggaagggaaggagaacgacaaggaaaagaaacccgtcgtagaagttggacgagtggacggagagaagtcgactggtacaccgtttcactcgtcaatacgatatccattttttccttctctgcccttgtcatgggagtttcctcttccgaatcggaagcagaagaagagggagacaggtcgaatgtctgccaacctcctgagaagaatcgaagttcgatgttcctctctgctaggatcttctcgaacgcttgaattcgagtggccgagagagagaaagtgttgtcctcgtcctcttcgtcttcctcctcatcctcgggtttcgcgttagacacttcaggagaagaaggtgtgggagatgttgatcgaatttctgtagaactggtactcgcaccaggtgttgaagacgttgaggcggaggcaaggacatcggaggaagttgatagaagggaggcaaaggcgagaagaacgtttgggagagtgacctaaatcaaagacaacgaaagcagagggtcaatgttcatcatgttcagacgcgaggcgcgcaagaaactcacgagtttgagaacgagctcattgtaatccaagaaatggaacgttgtccgcggaggaggttggttgttggaaggagaaagactgctgctgggctttcgcaacaattccgataataagtaaagacttggaagagaagtcccgcatccgaccttgtgggttattcgtcacagaaccgtgacttcatggtcagcacgggaacggaaagagggatcatatagtgataacgaaggcaaacctccatgatcctttttccttcaatcgacttccagccgtcggttggactccttccattcttgtatagatcgtccttcaacaggttgactagatctatcgagcattcccaagtcttcatccctccttcgtaaactcccttcacaagatcagtctccggtccccacctttccttttcatcatcatcatcttcggctgtatcgatctgttggaactgggcgtcaaacatgtctctccggaggaggtcaaatgggatgttgggtaatcggaggggtgtgtaggagagcgtaggaggaagcgttcgaagctgaacttgatacaagagcagagaaacgggtcaatcttcgagggcaaagagagacacgagaggagaaccaggagacggaccaaggtctgaagactgatctcttggaaagaagcgaccgagggcgcatcagcacttatgtccgatgtggttgtattcgagtttgttgctttctctgtggtcggctggataaagtccaggttatcctggccttcatcatcttgctgtttttgatcgaaaaggaaagcgactttggtcaatggcatgtcctatccgtttcagaatgtcaggcatgagaaactgatagcgcactcgaagatcgagatcaaagtcgaacttgaacatgtcacagaggagaacagagtgaagttcgaaggtgaggttgagtgatagagaagaaggtgaagatagaaccaaccatgcaaacggacatacgccacaatacgaaactgactacaaatgattgggaagttttgtagtcgtccactagaaaaatgactctccactttattatccgagcacagccaagtttttagtagaccaaattttggagctttgcatattcaacaccttgctctccttgcacctctcgttctctctgacccactttccttccccacctgtaccctagccatgcctttcatcgacgacaagaagccaaagaggcgaacgacagtcactgagcctgccgacaaagagtccgtcaacccaacggtcgccgagcaggtcacagcaaagtccgccgcccgggacgtcacccacaagccgtggtccagacgagttcagcaagctccccagcctcttcccaagtcgcttacccagaagaaatctaccaccaccgctaccccttcctcctctactcagcagtctcagaagaagcgaaaggctcctgagcctaaggtgattgacccagagtctgaatccgtcaagaacgctccgctgctcaagggattagagcaaactggctaccactcaacttccgaggatgacgaggaggaggatagctcggatgatgaggatgaatcagatgttgatatcaaccatgaaggaccagttgagggaatcgaacttacgaagcttccgacaatcaacaaagacgacgaagtggtaaagaaaaagttagagaaggccaagaagtcctcggttcgtgtatagttctttattaaaaatcttctgtaggacatgagaatatgcttgttctgacattgctctcctctctcgaaatactttagaacaaggagaagggtgtgctctaccttggtcgaattcctcatggattctacgagaagcagatgaagtcttacttcgagcagttcggtactgttgagaaagtccgactcgctcgaaacaagcgagtgcgttcaaattctttcgtctctgtccttctgtcttctttaatgtctttgttcttaacgtctgtgttttgtatcggcttagactggagcctctaagcactacgcgttcatcttgatggcccaggcttcggttgcccagatcgtggccgaaaccatggacaactacttgcttctcggtcgacttctccagtgcaaggtatctttcattcattctcttacgacttcttgcaacatctttcttatatcctctttttgcgtatcattttcgaccgcaggtcatccccaatgacaaagtccacccggacttgtgggctggcgcgaacaggacgttccgacctattccttccgtccgtgccgagcgacttaagctcgaggcaccccggacggcaagtcagcaagctaaagcagagggccgactcaagaagcgaggagcagcaaagagggcaaagctagcggctctcggagtggattacgacttgagcgaggttgactacgtacgttttcaccctcttgtctgggcttcttatttctttaggacgcgcattcaactaactcttgcaatccgctttcgtccaaatttgttttggtgatgtagaagaaggcttcagcatagattcatcccttcgttcattcttgtttttctcctcatctgtagtcattccttctttgcttttttttccatcaggtgttatatttttcggtctcttgtcctttactttcatgcacatgacttttcacttccttcatcagaatctcaaagtttcaatctcatcagaagaccgcacagaaggaacagcagtgaggacgcgctgccagcaggatcaacctttttcagatcatgaggacattgtagaacaatctctgcctcttctctcgctcctactagagaactcatattcagtttaaaagaccttgcctcttgagatcctctgagtttcgatgacagcacaacaaaaaagatacatgcgttaggaataaaagcactacgacggagtgaggctgagataagtagaagaaagagacgaaccgtatgtccgtcgatcgtagacatttccatcagcatcctcaagttcttcaactgtttctactgctctcgcgtcctgtttgccttcatgcttcaatttctcagccactaatcccaaaacatgatcaaaaacgatggaaaaggatcgattgttcagtatggagcacgaagctagatatagaaggaagagggtcttgatatagtagacactcacaggccatggcatcttcgatcttagtaatctcgtggaaatgcttggtatttggtagaccaagtgcgcgcattccgaatgcgtgtcgggattcctagagaaaagtaggaagcaattcaaactggtttagcagcaatcccttaaaagagagatatcaacaaaaaaaaaaagaagaagctgagcgaacctggaaatgtcgttcaaagttttttcgacccatgtacgggtatcctgagcaaatttcgcacttgtattcgacaccaagcccatgtagtttgaagagccaatacgggatcggcttcccgtcccaaccaagaggcaacttcaatgggttatacacctttccatcctcatcctcatctgatccctcggcctcacccccatccatgccatcccccactggtggtgcaaactcgggaagagattcttcctgctcgagctctctctctcttgcggtcagcgctgatcgtctttcgacatttgccttggtatctgaaagcaaagaggcgaacgtcggagagagtaaaagtgactttgtctggaacgtgagtaatgccgcaggtcgaagcttcgcatgtcggagtgccgaaagggactggacagaaggagaggcagaggtagacgcatcggtggaaggaccacttgacgtcaatcgggcggcagctttctcgtgcttctttgacttcaaatgggcatcgtacaccgtctgttttgagtaaagcttttggcctaataaattttcagaaggtcaatatgatgcacgtaatttgcagatcattttgcctggtgggggtttcagtatgaagcaacaaagaaatggaccaacatgcagggcaccagattccttcatctttcttctcgtctccatttgcctgcactacgtccttctcttcttcccagccttctactgtaccctcagtccattttgtctcaaaatccttttcagcctcttcctcgtctgctgatagatcggccaggggccgggttcgagcattgaatgcaagtagatatgagtgaagcgaggtgatatatctaggggtgttatgcaaccagtcagatatcagtaggttggacaatatcgtcatgaggccaaacaacagacctactcaagatatgcctgagagcccttctctttcagaggtacacgatcatcaggcgcacccctcgacaagatatcgaaatatgcgagatagggaattctttgagagagaagaatcatgcggattgataagtatcatcaaattaagcatcaggtctgaaaaaagaagcgaactcacttgggaacatttttcaagttgatgtattgagagtgggaggcataaagatctaggaatcgtcctagagactcttcaccagagaagagactcgagatttctgatccaccgtgaacggcgatttagtgaacacgttctaagtaaggactgctgttgtgtctcataccgatcgctaatatcagaaacaattgacttactatcatacacgacctcttcttccatttcttcctcgctaggaccgtttactaaagccgcaatctcattttctactgctcgagagtcaacctctgggttctttcggtgaaactctttgatgtctacaagtcgagaataaaactcttcgaggtcgtctgccggtggaggaggtgcggaaagagcagcgatctcggaaactctctctctatcataggaacatcgttgcacatatacaaaagaattagacagatgatcacctctgtacaacctgtataagaacgaaggaaagcaacagacttacccagttgcatctttgtaggagtccctgagaaactgtttcttggccacaatacggttcaacacatcggatgccctatgttccttctcaagacgtgatttatactgtaaggggtgtggatgatgtcaaaaagaataagaatactaggttgagccacagaagacgcgaacgtgattcggtttcggttgagagcaaccaaagcaaagcaactgactgtcttgtctgtctgttgaaagattgaggcaagagccttttcataaagatctatctcttcatgagcctgccgggctgattcgatgaccgagttcatctttcagaagtatgtggtctgtatgtgtgttgtaggcgtgggtggatgtatgaagtgaattctaatgagagtgagatccatctgaaatgtttcatttcaatagagattttcgactttttctctattcaacctttgtagtttcttagcgaattctcttaatagatcgtttcgcaccttttgctggcagaccaccaacatctctcatccttctctcttcttaccatcagtcctccaaccgtcaacaagatggttgctatcggtctgcttgctcctttgggtacgttcctaaatcaaacaactttgtttgagatcaccgcgttgaatatcactcacatcatatcctcgaaattacgttgtttcttgaacatcagcatatggtgagctggcacctcgaacctgatctcgtcttaacgcaaccagacgccggtgtacttatcctcttctaaatttcttcctacacagccgccgttctcatcacagccctaggcatattttctcgtgtatacagaaggcgaatagctggtttgtccatgtttcgttgtgtatcttgtctcgatgtttgaggtaccaagtgacccttctcatcatttgctttgtactcgaccttgctatagccaaagccgaaaccgagccttggtttccttcccatacttctagagatctctatgtctctctcttacaagctgatcccgctcctccagaagccctcctcaaatccgccctgttggtccgagcgatgaatgacgttcgtcggatccttaagattcgagacgacaaacctgctttgcagatcttgatacaaaagggctgcgttggtgatgacctctgggctcgtttcttgaaagctgagaaggaactggaggccgaaattctagatgtcgtcaacgaagccaacactttctcccccgcttggggtccaaccatctttgctacagccagcgagatggttcaaagggaaaaggcaagacctgattgggagtgtcacgaaaagatcaagtccaaagctggtaagctaatgtgtttcttatatgaccaatgcctcagagtttgcatacaaaagagagaaacaaagactgatttccataacgcgtcttgtttggtcaaaccataaagctcggctaacccctgtcgttcgatcaacgacaaagtcttccattccacttacttcagcacttgagtccgcgtcctctgcctcgtctgttacctctgctccgacgacaccggtttctgctttttccccggtcactcctacaaaagctcctctggcaagcgccccaaccactccctcaaagtcggaaactagtgctcctgcgacgccttccaaggtatgtgctttaaatgaacagcaactctttagagaagttggttgcggtaaactgatgctggtatggatggtctctccctttctgtcataaacaattggcataggatacaccttcttcggcgaaaaagggcaagaagaagaagtgatgaactatgatgatgcacgttcaacagaacgaggatacgctggataactgtcttttgtcttcttcatgtcttataccatccgctttgtcctctgttcttgagttctcgaacctccgcctgagctgcaacaaggcttcgcaaaagaccagcttctcattcgaataatttatcgccaatcactacaggacacagctgcatatataactttgggttcctgacacctctttctatatctgccctgacttttctcgttgactgtcacatcatacttagacaaaaggttactgaacgcgatgtccaaagaacgtagaatgcttgcttggccaacctgcttctgtcgcgtctccttcaacaactctactcccggtgtttttccctttgtcactcacgatcaagtcgatcgaagctgccttcagttttaaggaattcggtacaacaccgaacaagcgactcctgaacaagaaaactagttgttcatttcaagtgtatcggaagctgtccgaagtagtcgggcgaattgtcataagccttagttttagaattaattaaaccggctctacgagttgggagtggacaagtatttggaaaagagaagaaagacaaagttgaagaaagctgacgaatattgacacaaagcatggacaaacggcaccaattgattgatcaatccaaacaaggtaacgggtttctctggagcagggattagatggcaatgaagcagaattgaaaatttgtattgatccgcgctttgatactaggtgtccaaagagagcaagtgaatatgcagatgtgagcgtgtgtgaggcgggtatagatagcggggaaactctttttaacaaatttaaattcacaaaggaggggatgagaggttgaagaacaaaaatggagaacaaaagacgtcggaaaaaagccaatcatcagacaagacgggaatgtctttgagatggatattgtattgtatttgatagatatttggctcaagggatgacaggactgaattaatgatacaccaaaaacacggaagaccctacaagaccaatctcgatattgcgtgaagcagaacctgactattacatgacgacgcagcatccttgtgccgggggggctgttcgtagtgtgtgaaaagagagagcaacaagcggtttatgttgatcaacagacgaacaaaagtatccttgtcgagtttgtgggaattaatgaagtaagttgagagatatatactaaccatatggatcatctttcttgtcgacaggtccccatacggatggaaccagtggatcttttgttgtcttgcagaaccgaatgagacttttagccagaaaacaaaagaagaaaagacccaaaggaggatgagtagtcagaagctctgttcacaacgcaagatgttcaaagtcggtcgattgactgtctacgtctcaaacacatgcctagaggagagcaaagatgttgtatagaatgttgtattccatagacatcttcgcatatctcccattacccacaacataatcgttcctttaaatattgacacttactttgcagaggcctcactgacttttgcccggggtcggttgagattctctcgtaaacgttgattgtgttctgttaatcgacgaagcttcaactcggacacggctgtagaaatatgacaccaacgacgcgtgacacaatggatccataagaattacatcagtggatctatgaagtcgcgttttataagagcagaaggacataacagaaggagacagacattgtttatgggctcgagaactcatcttctatcagaatacaagggtggaatgaagaaagctttgttcttttgtttgagatatattggggcctggctgctgttgttggattgcaggtgatatggatggaccgttttatgaagagaaagattggtattcattagtccacttcaacgcgtcctaatgaataacacatcaataggaagacaaatgcccgaagaagaaaacacagacacataaggagatgaagccctatacggattataaaggagatcgaagattggcttataataactcacgttatctccaacgagtgagcaattgatcacaaccgcaacaagcagacaagtattggttttgatctgatggatacaaattatgacgaggaagacataagcgcatatgttcacgtagaaataatacttaagtaggtggacgagtctcacaaatatcggaagacgtccagattgatggatggtgaatgttctattgtctgagagttgaggctaataaaaaggcggcatagagggaggcgggaagggtccgcacgtgacttacggctcaacgccgctcaaagtcactacgacatcgtcaaagataaccgctttgcgcaggtgcaacattgctgagagactaaacgaaagttgctcacctagccagagctcaaagataaaggatgacgaacaataaacgagagaatttggcatggagcaacatcatatacgacttgtacgtctctagcatgcgctcgtacatactagatgatgctttgttcttggagccaacatgagtgaactcggaaacatcagtacttagtaatctacctcgcaccttctcttcaacttgaccttgctcaaagctgaggcaatgatgttaaacaagtatatgtatattgggctgcatagaatggaatatatttatttgtaatggcctctttctcttcttttgcagctttcggattgctcttcatgatcatcaaccttcttatctagactctcccgtacattgatataacgagtcctgatgaggtaggtgaaaactttttaaaacagagtttatccgagtattctgagggcttctctcgcctgtcgagatgtcgaaatagctttcagcaaggtgtttctaggggttcttcgaaagaaatgatggcttggcgagaccgaaagggctgtgctatacttgtaaagggtcggggttcacaagcttacgaagggttactggagttgactagggatgttcaaggcgcggagatttagacttccaggcaaggggaaagaggatgaaccacgattgtatagcacagtggtcaacagggatcctaacttggagaaccatatctgaaggagcgcgcaagcgatcctttcatgcgttcgagctacgatgaagtggcaaccaagttgccactcgattactaaacgacaggattatcaaccagaagatcatcaagaacaacaacaacgagccaaatttatcaagcaacagatcactgagcgtatcactagtcaggagaaacagagatgagaataattatccagcgcataggatgaagaaaaggagcataacgaaatggaaggcatgatgaatcatggaatgtgagcatggtaactggcgtgtatatgttacctaatcctagtttctgacaatacttgcagtttggcgatcccacgtattatctgttgcacagccgacttcagtcattccattatccagattacaggcttacttatatattcttaatccgctagccttgatcttcatctgctgtattcgtccgacgctgactcatgtttgtgagtatgttcgtttgactgtattggtttggcttttctgatgactagttcatgtgttgtcggacttgtttgagcaggtcaaccatgctcgattacctgtaatatcggtcttctgctcattgaatctccgacgacatacaccccataagtggatatttcgaaagtatgcatcgcgtcctatacctccgatggatgccagactgaagcccggagacaaaggtatgaagtcaatgagaaatggcagctatctctacaacttttttttcctgaataatctttttgggttaacctaaaagtatatatcaattgttttggctggtgccgtaagtggttatggccatgtctggtggtgtggattcatcagtttctctccaacttctatctgagcaggtacggttctgccggtcttttcttcatctgttgcgtaagaaatgttaatcaagtatgtttttgttatacttacaggatctttctctttcggcagtcttcatgcgcaactggtcacaggaatcttcagatcgacttcgaggttgtgaatgggaaaaagactgggaggatgtccaaagagtatgtagacatgttggtgtttccgttcgtatggtaagtacaacttaacactacaagataggcggacgcgttggcttagctccctgtgcgctgacctggctgtctggcttcctccaggtcgatctttcaaaagaatattggacccaggtttttgagcctgccatttccgaatgggcaggcggattaacacccaatcctgatatatcgtgcaataggttggtcaagaaacgtttcaaagattaaatcgcctcaagtcgatattgatccattaaaacgaacttcgaacttctttacttatcagggaaattaagtttggggcattgatgagccgagcgctagttgatccaacagcgtacctggctacaggttcgtcacactacatcttgcttttgaatccaatatccaaatccttctctatatcaacttacacactattgatcttatatatgcaatgatattaggacactacgcgcaggtagacaaaactgcagatggacgtcaccgactgctgagatctgttgactcaaataaggatcaaacttatttcctttcttcccttcacgaacaacaagtggcaagagtacgcaacattcttccctttcgggtctcctcccctcatttggttaccctgagtgctgattgcgaagaaaagcgtgggacataattgtaacagtcaatatttccgattggtcatcttacaaagacaaaggtcaaggagctagctcggcagtttgatctgcctacagcgggcaaaaaggagagcatgggtatctgtttcgtggaaaaccacaatcaaaatcgaaattccttctctcaatttttatgtaagtatcaaaagaaactactctcatcatggacctgcttcttccgttctttttttattcatcagactgacaaaaacattcactatcttttctcacaagccgaatacatcgatccgaatcctggtccgatcttgaccgagtcaggtgtacaagttggcactcatccaggtttatggagatattctattgggcaacggtacagatttgagggctgcaagcaggacgaacgttggtatgtagcaagtaagaatgtgtctgacaactcgctacgagtcgttcttggacagtatgtatcttctccttcatttgatctgagacgagagcttctcactaatcgcagtatctgtcaatatttgttgactcttcttacaacatcgactcattttcaaaaaaaaatccgccgttcgtcagagaacatcccgctctgatgtctaatacgtttcagactcatcgatggagctggatttggcaggatcatcccccaccctcaattgactctcctgaaggtttgatctgtcagattaaaataagatcatcaaatcgaaaatcggcttttccagcgtccatccgtcgttcgtgagtaaagtctatgttctcaatatatgactgtttgctcttgaccgtggaaactgagacgcatgtaccttacttgtcgtcattcatccgttgataatcttgactggatcgttcaaatcatactgtacgataaaattgagatgatcagactgaatgatccgggcgtctgcgatgtgacatttcttaatgagcactctgattgcctgacgcctggtcaagtttgcgttgcctggattgatgactggtgtttaggaggtggtatcgtcctagaaaaacagtgggaatggaattctacatcatagctataatgacatctataacatgcgcggcatatatccaggcgatctctttggtcttctcacagtctgacacaaagaagaatgactgctagatgttctttggtccggttcgccctgaaacaattgatcctttgtgactgacaggttgagtggctcgttttgtgccaggaaccattcctgtcaactcaacccgtactctgacaagtttgtctgctctttgcttctctgttacccatctgccctctatttctgttaattcagacctcaaccatgagcaacagttcgtcctaatatccttcagaccgtctggtcacaccttaacttgttagtgcccacgcctgatcaggacgcttttcttaatgtgatttgtttcaggtttcaagtcctatgtcgggagaacatcatctgtcggcacgtcttcaaagccaacccgaaaaacaccaagtcggaagaccgctgagaaagattcattcaagtctctgatctttgaagaggacattgagacagagagtgtcgatcaccggaaaaaaaatacattcgaaaagagaaagagaaagaggagagaggacgctgtcgtcgaagagccagactcttttgacgagagtgataaacagatggagactgacgaagaacagggacacacaggggaaatttcagagggagtcgccggcaggtaagctgtatcattatgaagtctctatatgcgaaatcatcgttgaatgagaagcccgggctcatcttggtaattctgatgagcactctatgatcgtgaaaactgacactttgttccttccgtttatcgatccctggtcgctagccagattgatcttgtcagattgtctgaagaattccgtgctcgtcgagccaacaagtccgcggtgcttcgtgatagttatactactgttcgctcatccttacgtctcatagctggtgatgcattgtgtccgaatcattcactgatcgaatttggaaaatatggcatctgtagaaggtcgtcgcgcctatcataaatgctcgccagtccgttttgagtcaatgggagaagatggatgcccagatgtgagtacttttcttgaaaatgtcttctcaattcagcctctagttatttgccagcctaagcattctctcgttttcatgactagggctgaaaggatggattgcctaagaatgaccttggccccgacgcaactagacgtgtctatctactcgagtctcggagctcagcgggaagtaagtcgtttcaagggcaagtgaggcgaataatgaaacgtcgaaacaggtcattgactaggatttcatttcttgtctcggctgatttatccgcgtctgtttcaaatcacagcttgcgtctcaaactttatgctcagcttacgagagatgcactcgtcagctagttcccgaagttttaggattagccgacgatgacctaaacagctgtaagcctacaatttcccctgtcctgatatgatgagacactcaagaagctcatgtgtatctgtgtctactcgatactcaaataaataattcgtcggccctcttcgaacaatcgagtaaacaaacgagtcgcatacgtacgaaaagaaaaaaaaaagcattttgcttcgacgaaaaagaagatgaatgctatacaggcagaacaaaaggtgcgcttagccatatatacaccgacgcatgaatctacgatttctcacgcaatcatatatcgtttcggccctgcttccttcctcctctaggccatcacagattctcatgatctacttcgaaacttcagcgagatttttcaaaagtttcgtccatcgactgactcggattttagtaataagggcaaacttgagaaaggagcggggttcgtcagttcggctcacgagagaataatcaagccaatgaatacggcaggcgccataagctgtgtgtcccgacctacgttacatcaaatcctctgatcctagtgatatatcttagccgctctttgtgttcttgtacattcatctttctgcctttccgtcattttgtaattgctaagcgacatcgctcctcctgtgtcatataatgttatgtgggatgtatagaatgtcatcactacgatagttccaacgacattgggttcatttttttcagaagaatgactccccatctccaatgccaccatcgtcctcgaaggtttctccccaaacctcttcttcctctgagctttgaccccatccagtctcctgcccgaacatgccctggtcgccattcgaggagttttctttttcccaccaagggaggtcgtctgcttgtccccttgtggatgttggaagatcaggttgactaggtgttgatgttggagcagggtaatcagatggctgacgagcacttgccatgtcatcggctactccggcagcgccggccatcgtacccattccaggagacaggttagcttcgtcatcgagtacaggtcgttggtcaggttgaccggattgattctctaggtcggcaccatgaccacctccacccatgaagaggaaggggaaccccattcccccttgaccagagctgaaagtaaagaggagtgtaccagagatcgtttgtcttagtggacacacgcgagagtatgaagtgagagcgattgtttcggacatactgccttgagaaatagtcaaaatcaactttaaatgtttttttatttatttaaatcgggtattcagggagagaattgatgtcagattcaagctgtgataaagagaagatgtgagaaatgtcgagactgactagagattgcagtagccaacatgatcgctcgttcatctagtgtcaaccccttgtcactttccgcctttggaggtaacacccttaattcaccctctttctgcccatcgggtacaccttcttggactgcatcgaaacggatgacatatcgaccggtgtctgtgaagatctctcttccgaacccgccaaattcacgcccgattgatcctcggacagaagaccgatcggagacaaggaatgaccatgcccagagcccctcgtcgatctcggcaaattgatcaaattcttgagaaccagaacggaatctggaaaggaatagattgtatttccttcgccaaagatgccaagccctatgtttgttaattccatcgagaatttcaagtaaacaaacatgatcgtgatcatcaggataggggaggttaacctagagaaactctgataaatcgtctatttgtacgaccacactgatgagggacaaagaaacgtactgttgagcttcacctacgagtggagaatcaggaccttcatgagaatgaacgtatatttttgaattgatgaactgaaagggtcttcgaacctacagagaaagggattctatcagatttttatgagacacaatacgcggtctgaaacccggacgtacccagaggataggatttccctctacgtccatgataacggatcggaaagggcgatgggttctaaagagttgtcgggtgatggtacccatgaagcctgagtcttcctctgcgatactatagatcacaacatgaatcgagaaagcgcaggatttacaccgtcagctgaaattctgataagtgaccgtacaaagaaaagattccagggaaacacacaatccgacgggaagtccctctgggttagtgatttgatatcgattggcttgctcgaaccctgcaaacagattcagcatttcgatttgtctataagttcaagtcccaaagcagcatcatgagttcaactcaaccacagcatacccacaaatctgaccagggtgtttttgcttaccgagtgacgacaagagcaggctgttccaaaagtaaacttgctccgtgtgtcctcttcaacacaccctccgcatcctctggtacttccaccgtgacgttccacgctccaggcagctgtgtgtattctggctgagcactatgaccatgttggtgttcctcattgaattgtgcattggtgtcgtaagagggcgacccagagggacggtattccggtcgacgattgatattgattgcgttgcgaggaccttgtgtagagggagatcgacgagggagcgcaggggtcatgctcaacgggcgtagcagacttgtgctagccaagccaaatggagcgattcgatgagcattcaatagagtaacagtgttagggataagacgtgtgatcatggatattgtgtgtatatgtgaatctgtggatgtgtgtgttggccgggtgagaggtaacgtggttgtagtgactttgatcagagattgtaagtgatgttcagatttatgtctcagtctcagccgggtttgagccgatgacgaggcggttactaccatctcggccctctcggagggagagttttccagaacgccacgacaaatataatattaccctcctcgatattttctcatcaagctgttatccgtgatagcttatgatctgcgaggagaagcgatccgcgaagggatgagatcgtcaaggaggatcattgcacttcctgcatttcaacaatcaaagataatctgaacacaaaagggggtagtttagttgaactaaaccggacgacataagcattgcggaacgcccaagtttatggcttgaaagatatatacatcaaaatcattgaaaagacaacgagtcttcctttcgaaagggcgagaggacagtaggaaaaaaagcatatccgatgtagatgagacattgacaagagtgagagatacgatggcaaggccatagaaaattgtaaagaaagatagaaaaaggagaagtggtatcgtatagagggtttggagagaacaaagcgttgcaaagcaggattaacgaatgcaggaagggcccaaggagagcagagaaagcgaaactgatacagctgtaagggataaaacgggaagaatgataacatggataatttaaatataaaacttgaaactaaaggcaatactgggcccagaagatgaaaagtgatatatcgacgaagaaaattaagagtcaagacaagagaacaaaaaagtagatggacagaagaatctatagaagaaagatctaacacgtaaaaccaagtcagatcggagaaaagcgatgatgccgagaagggcgcagcgttctctaaaacatccatggttgatccatttcgtacggtcccgtgccaacagccatggtcccctcatacgaattctgcgttggcgtcgtctctcccgatctgagttccctggtcctggcaggcctggatccagccggcacctcgatagacccatcgtgatgggaaccgaacgattggtaagttgattgttgtcccacttgcggaatctcttccgagggaggcggcggtccgtaaaaaaactcagaggacggcctggatggccgatgaccagtagatgaccccagttgaagcgacgttggtcttcctttcttccggctctctagattgagagagcctcgaccaaatggagattccgctccatgagatgctgggcggtggtcgggataggtattgggatttggtgtcacactcggactgagggcctgatcatttggagagtaatgcagcgggcggggaccggctggccgggtgtgattgtaggg

SEQ ID NO: 1964 - DNA, 2256 bp, Xanthophyllomyces dendrorhous
tggtatcactgaagacgagatcgcaggtcggtctactttgttgaatgggggaacgagaggaacggaggcgaagagttgccttgactggttaagagctgacgataggctctgcctctccctctctgcatcatggtcttcagcttctccggtagaatgcgattcagatagatcttccaccattggcggttcgttctttgtcagattttctacttcgaccggcgacctcgcgatgattgaatttatgaacgtctttgtcctaggtgtctcagtttccccatgtgggcccatcaggaacgacggtctagaggctgatgtcggacccgaacctgagccttgtgctgagagcgtcccaggattacgtccatagttgactctcgggttcagtcctcgagaaaacccaagactgttattgccatctctttcgctctcagccatgcccacgcctggtaggctcttccaacctgtcaagctcttttttccttttccgtctccaacttcgagaagagaggacgaaaaaccgggtgtgatgggcgatggatcggacgtcggaagaaattgttggttcgcgccagaccgattcgatggaccagtttggtgcctgagattctctaatcgactgtcgatgggggtgtgggcatctacgagggagtgatggtcagatgagttcggatatgtcgatgaaggataccaggtctgtatggatcggtaagccggttgatgtggttggcagtacctaggattcgactgatcaaaatcgtgataatttgccgactgaggtcggtgtgaatgatctcgattcggataatggggatgaataggtggattgtcatgtgccgtagggagttgaggcatggcgtaagcatcgtagggcatatacgcatagagttgatggggaggtggtggtggcggtggtggttgtgaagaaggtgaggtgagatgatgggaaggatgagagtcatgagtatttgggtattgctgctggggttgatgctgggattgggatggttcgagactttgaggctcaaacccaatagcgataccgtgatctcttcctggtctatctcgtcccaagtcgttttgagagttgtacgaacgacgaacatctgacaacgcataaggttgagggtgctcgggctgatgggcaaacgaagcataatgatggtgagatgaatcgctcggacgaataggcgaggacgggcaatcacgggacgatctcggtcgttttctgaaggatacgagcgcaacagaatagacggcgtcaggaacaaagagggtcagggcaggtcggatcaaaatgttgagcgaattgaccaggtacgcggcatcaagcacaagtaactcacgtcgagtattcatcatccggggaatcgtaaccttccatcacctgaagatatctctctatgtcctttttctcttcaacagctcttcccttgtcgatctttagtttcttcgaagagttctcaagcaaactagccgcctttttgctggccttgctcccttgatgaagcctgctaggtttcttcttcgcgccggccggttgatagatgtaatcagggtatctattttcattgggtgagaaatgaaagcagagatgggtggcgcatacagtcagatcgccgtagggaaagatttgttgaaaggtaaaggaaagaaactgacaatcgattatgctcgtctttctctttttgggcagccaatcgatagggtgcctgctgagtgtccgagagctatgtagagaaacatttggggattgagtctcgtttagaaatgatagtctgaaagatgcaaaacttactcctttccacatcagtccgacaatcttactgatgttctgatgcttggtttcttccttgatcaaccctctattgacgacgtccattcgatacaacatgaaactgtttctcggtctgggcacgtggccttctggggtgggcttcgtgtgggaatttgtctttttcggagcagatacccctggttgagggaccggtttgaacactccgttctccaacgacggactctcagtgaccgacgcgttcgacagttcgagggtcaagccagacagcgaacttgacgcgctggccactgagttggacgaggcagtggtggaagaagaggaagatgaccagggtctggacgggaagccggatgagactgaccaagcgctagattgcgaattgacctggttttgcagatgatcactcgaaggacgcgtcatcgtcatctttgccgctgctgctgatggtttccaatctgatg

SEQ ID NO: 1965 - DNA, 769 bp, Xanthophyllomyces dendrorhous
tgatggtttccaatctgatgatgaaggccatgatgtgctggtcgactgttgctgttgctgttgctgtcgcggcggcggcaacggcggcaacggctgctgatggtgataatgatggggatgatggtgcagatcggaacttggagtgatggctggagcgacgggaaaggtggacactgtctcgggcaatccaggagatgatgggaaggaggctgttgaggtgatataaggagaaggctgtgaggggagtagaatgctgggtggttcgtagaacaatgcggaagagctttgttctggattgggatgagggtagtgttgaccgcggtcagagagtctcggaaagctctctgctcgtattggaggcgctgttggactaggttttggatccgacatcgagcaagggcaagcgtagtgggctgcagcgaggtatagaggagcagggcaggatggggcaggaagagaagaatttcaaaaaggtatacaggggttctgctcgccaaacaacctgaagaggttgtatgtagggtcgaaacggaaaaattcaagtcgagattaggacgagaggcggaagcgcaatgcggaatatacaaactaggatcacaggtaagaatccctacaacgggtatcagccagatgcgattgaagaggagaaggcaacaaccaaaagaagtggatggtcaaggaggaagaggagaaggttgcacagtaggaaatggagcaaaagcgaggagaagaagaaggaagcgtgtgtatgtttgtgtgtgtgtgtgtg

SEQ ID NO: 1966 - DNA, 1016 bp, Xanthophyllomyces dendrorhous
tgtgtgtgtgtgtgtgtgtgtgcgtgtgcgtgtgcgaaggatagagagaaagcgaaagagtgaaagagaagccgaaggacagcccacttggctgagaggggtgacgaaagaagaggaagagagccagggaagacagggaagcttgtaaagaaaggaagagcgaggctaagaaaggaaacaggtggaagaaaagaagttgaggtgaagaaggaagggttgtgggtgtgtatgcgtgcgtgtgtacttttttcaagattctagaggtggatccagatttccaagctcgatcatcaaagggacacggccaaccggtttgagacggcactagagaagaggcgacaggctggcggttgatgaacgacgaaattggaaaaaaagaaatatgaaggttcgaaccgaaagggaagaagccacaggcaagagagagagagggaattaaaagaaagaaagggaagaggaaacgatggcagataaaagatgtagaggaacgggcttgtcaatcgatcggatgatggcacaaagcgggactgtatcgatcagaagaggatgaaaacggcaaaagatgtgtgtgtgtgtgctttttggtttggtttggttgtagacagggggacgcggaaagggggacaggatctgtttgaagtgttcccagcgtttcatcagtttgtcttgacgattcaatggctactgaggaagagaaggacaaaaaatagagatcgagagaatagatcagacaaaagaaagagagaaaaacattcccatctgccgttcgagtttcattctatcttgcctctaggatcagagagtaagagaagagaaggttagtgggatgcgttccgggaaaggattggtcagagaaaagggcaggcaagacaacagagagaaagagagagagaaaaagggcacggtaacagacgaacaaaaggaacaaagagaaagaaaataaaagataggccaaaggcaagaggcattacaaacgaggcgcatgaaggcagaggtagatggtcagataacccgaa

SEQ ID NO: 1967 - DNA, 6596 bp, Xanthophyllomyces dendrorhous
agtcacaaggatgttccaaacgtcagtcgttgtatgttcctttcagcccgttccttgccatgttgtgggagcgaaaagacagtgaggaccggcaggcaagtcgggtcaggcctctttctctcgatcgtctcggcgctcgtcaatgtttgaagaaataaggttcgtgaaagggaaccgcattccctccgatgactgccacgtgagaacccgcgaagcgcagcttgacgaggcgtcaacacgcggagaaacttgccgaatatgaagtggcgttttttactctagggcaccagatcgaaccgcagcaagctgaattgtcctttcctctttatatcccctcttgttcctggccaggcgccatcgttatccactgatcattatcgatcattcccaccaaccggcccagctgagcaacgcatattcccatgaatttttcttccactgagactttgcatcagcatttgtgacttgtacccatcatatacattcaatctcgagagttgttctctgtcgcctcatctcctaaggatctcaagtcgtgctgggctgtttcttctttcttctctgcctttttctcaattttttttccttttgtttcactctcttgccttctccgacatttgcatcaaattcgagttgaaaatcatctcgaaaaactcgtcatcctcccattccgctgttctctttttattactctttctcttctcgtttgtttcttctgctaattataggtcgccattattacacaaactcactgtaatgtgcttcatgatcgtttttcatcgcttttttgttctactcaattcgagcgccaaacaatgagaccctatgagtgctgttctccggatgacaatactgtttaaaacttttcggcacaatttccagttttcacacaacatccacagacaaggcaagtcttctcacacctttgtcaatgttcacagctctcaaacattcctcggctaaagcgaggttcacggacattcagaagatggtggaatgtgactgtctttgtctagagtcgtcatcggaggccgattcgaccagcaaacacaagttctggctattttgaccattgttcatgttctctcgtcatgaccgctacttgttgtagaaaacgatggaggaataaacagaacgtgtcggcggattaatgatataccagtcgtgcgcacagcctcacatgctggtatcacgtgaaacatctcacgtgatcattttttgaaccatcatctaactgtgtcttccctcgtccgttcctctgcttcgatcaaagcccgaacactttcgctctctcgtgctatggcccccgaacaaccagtgctcaataaacgggcaagattggctgcaaacagacagattcgaccggctcaacgtacaagtttgagaaagtcgatcggcccggcattaggcaaagcaaatgaatcagcgttgaagagtgagtgtgtctagatgacttcagtccgtgattcttcaaacagatatcattcctgacacaaccctctacggcgaatacactttggctacctctgacttaaatcagatggacccgaattaccagcaaacgttgccgttgaacggtttaccttggtatgcttgatcttcacggaacctctaggccaccttgacagagatatctggttaaacaaagcctttaccgacgttttttctcccttcctcgctctctcgcacacaaaatcgtaatggatataggcacgggcagccgagatcacctcaatgaaagactctatgaggaacacattgtatgttgcttcagttgtgtagctcgatgctcttgctcgctttcttcaagctcactaaaggctcaatgaccttccactctcgttcattccttctcttctagtctctcggccacgaagagagctttccagacattacctcgtcatcttcggcgaagagcagcttcgcataatgctcgacgagtaccaggccgtttgagagcgaaagcggctgctgaggtgtgtttcgcgttctccttatgaaaacacttgtatcctggctcgctcacagagagtttggccctgacgattcctcatgtccacgtgttgaagattgatccaaagacaaggacgattccaaaacattatcctcggaaaaagattgctaaaaagatcggactgacgaaaacggaacggttcaggcgccgacaacgtaggttgcaacttcgcgctattgtcatattcatgtgtttgttagctgattctcactctgtatttggtctctcttccttcgttccttgcgtttttccttggctaggttcgaaaatatggcttgagacacatatctggcatgcaaagcgaatgcacatgatcaacgtctggggcttccgtctagcccatcatccgaccgaaaagtccttcaggccgtcccatcgagcggcctcccatgggtcgatcttgaatgacgtgtcttacttttcgttagtcgaactcaaagcaacagagcatgttcttgaaagaattttaaagactgttgccggtgagatctgctggggtaaacggtcagtcgatcattcatggtctgtgcgaggtatcgaatgaaggaaatcttgatgttcaatcttgtcgccaacagatactcctctggttcgcgacaagcacaaacgactctctaccggccggctagctatcctttgaatttgctctgtccagctaccgttctctggcagcctctttctccgacgacaacacaaccctcctccgccgaacccgaagccggcccgtctagtcagatcatccgacactcaaagcaaactgaggagcccatcagaaaagtctggatcagattccatgcatgctcccatgctgaagtttggggtgccctccgaggcgcaatcacccacgtattggatgagattactctagatcaacctggtctggatgagaaagaaaaacgaaaatcggcgtcctcagcaacggccggagaaggttcggtcgtgacggccaaggagacaacggtcgagcttaatgacataagagacagcgtgaatgtgtttgagattattggacccaaatcaggaaaagttctgaaaggtgctctgggagcgcttaccaaaagcgaagacagaaacgagatgcgacaggtgagcttcttttcttcattgaattgtttatacaaaccgtccacccggtatatctgatacaagaggagatctccggaaaacttgcgattcaatcaaatcaacatacataaaaagatctggaagcgcttgcctgatctcaggacagcgggaaatatgccttctgggatggtcatgggattcaccgtttacgatcctcgattgaggtgagcgagcttttccctagatgatcaagagatagagcagattcttgtatgcgttcgtgtatgtatccggacttatcatcactttggacgttcgcagctttcccccaaaaaacgtcaaacatgtagatccttcgaacaccgatccattggcaccagctttcccattccaacctagttcagagctagctcgttctgatctttgggatagtaaagtgagagcgagacttgggagaaagaaaactaaaaaggttgaactcgataaacgacgagcgaaggtgagatccttcttgattcctaacacacattgctctctttactcatttagattgaaccgcacgtctttcttgttttttttcttcttcttatccttcgctactcttccttccacgatgatctgtagctcgggatccctggtcaacctctccgagcgatagctcaggatgctcgaattcctgttcttctcatccaacatagcattcccacaccaaatccggcaaactcgatggtatcaaaaagctccatgcatggatacatactctaccttccgaaggcatgggcccaaccattccttcattccttggttttcaccgggactcggatcggtgggatcagagaacgacaatcgcaagcgtatgaaactggatctggaagtttcccttccgactggccgggcactgatgcttctgcgagatggtgggcagagagggagaaagaagacactcacagatgggagaagaagccgagcgcaaagagaaccaattggaatcggctcggctggaaagagggtgggaacccttggaagccagattggagttcactcttttcttcaatcgacccgacagcgatgatgacgagggatatagtgttgaatgatgggtcaaatggaagaaatagccaggaaaccattgccgccgatacaacaaatcaaccaaagcacccttggcttcttcgaacaccctctccaaccgaaattctttatcggatttcaaacccgacagcgtcatccgtaaccccacctctcgctctcctcgccgaacttaatgcacatcggtccaagcgcggtctccttccattaaaggacagtcaggcaaatgaactctactcatctgctttgatcagagtctcagtcgccatgctgggtagaggagttgctcaggatgttggaccaatctacaagctggcgaccgatccagtcgccatagaggaagaagcagggtggagggatgggtttgcccgtgggaagagaggaagagatttggactgggacgaacaggtcagtcttctttctttctctattctgtcttgatgatgcacagttgtacgttattgacaaggtgatgtttggaatggtctgccaacagtcccagatacctattcctccattctcggatacaatcggctatcaaaccaccggagcgttttcgctctctcgtggtaaaggacatggtctaggcgcgattcccttatcggccgctgtggaccttgtaagacgtgatgtcgagcgaactcgaattcagttagtagtaggcagacgaccgacacggaaaagtggagagttgatcaatctggtcaaagtcagagcgagagacagcaatgttgtaaggccggctgtgttggattggctcgattaatggaaatgaatcatgagttcatttctttctataagagatcactatttggaaataaaccagtattgattcgaagattcaatttaagaatgaacccgtggtaagttttgggggtgtacaacttggtggatatagtaagagtggatatatatatgtactaagatgaaagatcaaaaaaggaggatatgtctgcaaatctaaactgtatcagcacctttcaaacactttgtagagatctggtaggttagccacttgagtgatatggcccccttttagcaatgactttgaaggacggagatgtcgtcggagcgcgggaaagatgacgtgttcgatttggaacgattctttaatgaagtatatgccaggcaaaatttagtccatattctttaaagcggcgactataggaagaaggcccgattgaaagaagatacataatgagagaacatacccagctctcgctctttgtctcttgtagcatccgtctcgtcggatggtaaaagaggaagggggatgtaaaagtaagctagttcccggagaaacgactcaaaacatgcttcttcatctgaccaatcaacctgaaaaatactcccgaaggaacgcgctcagtccaagtctccaaatcctaactacgcgagacaaagattagcaaaacaaaagatttcaacactcactccaggtccaagtcgcatcaaaaattctggtaatcgattcaagtcaggtgtataaccctctaggagcagaggaatcgactcaatcctaccgtcctccgtgatcgttaaagaaaagtattcgtccagcatctctcgacgttcgatcaatcgctgttcaatcatctgtttacagaatctcatgtgtcagtgacaacgaggaagagggctctctcgatgtttgaaattgaacacgtcaaacgaacctgaatggtagcctcccttcgctcctcgggcacatcttcctctagaacgatcgctaacttcaacagaggtttgatctccgcaggtggatccaggcgaatctttccgatctccccaaactgacagagacccagctggtagaacagctcatctcttcatggtattacatagcagaaagagtatgatgggaaacttgatgcatgttcagccctagcgcaaagtatgtttcgacaggaatgacaacttacgcgatagcagcgtgattgaccaagtatagtttggtattgtgttgtatcaaagattgagttcgttcacaactcacgattcctacgaatttatgatccttgatgatttccgaaaccactatgtatgtccgatggtagatgtcaaaggaatcggacaaaattgactgttcagcatgaaagttggaaagaccgaataacaaaaaacttacaattatgccttttctctttgaccagatttctaagcctcactatactcgtcaacctacactcgctcgttctcactaggcctcctccactgatccctcgttctctgtttgatttctgttttgtttcatctatcgtgcgcgtattgacctcctcattgacccactctacttcatcttcactcatatctgcgtcatcctcaatgttagccttcgatttgttctcatcctcatccccttcctcactctcaacgcgttcatctattctacgccgcttaatcggagcagactcgggaggtacgatgg

SEQ ID NO: 1968 - DNA, 3465 bp, Xanthophyllomyces dendrorhous
gttgagaggagcaaacatcgagtcgagcgtccggacggtcggatctacccggactttatgcgcaggattagactgttgagtggatgctatgcgaatcataagtaagacgacattgggaatgaattagactggatcgagtttcacacacacaaaaaaggagttgaagattgagggacaactaacatcttgaaactattcgagtagaacttggtttactccctccataagtaccactgttagtaccgaaagtaggaagatttttgacctctcttggttcttcctcttcaaactctgggtcggaatcgtggtgtggatcagaaccctgttgcacggtgttctgaggcttcggggtatcaagagagatattgttagctatcatggacaattattggtggatttcaattagaaccgggctaacctgagtactgtatgttctcgatgaatttgctccgatcaagacctcctggactgtttcgcagacagcttcgattatctcctcctcgttaagaaaatgcacctgaaacaaagcaggatatgtaaacaggtaaggccctggagcaagaacaaggatgctgaaggacacattgtagaatgcctcacgaacctcactcttcgtcggatggacattaacatcgacattctcaggcttaatcagcagactacgtaggccgtgttagatactctacttatacatttaaaccattcgttgagaatgatctgatggagcgcatcaattgatactcgtctaagacttactctatatagacccaaggatacgttcctttgggaagaataaccgaatataacgcttccacggctttcttcagtcttggacagtctaccaagcgatctacccagcccgattccaagattttacacgctgtaagtgagcatatattcaagattgcggatatttcgaaatcacctacgatttatgaacaccaaaaaccctccactgcgtttggtattccaattggcgcctgtcagccaaccctcaaattcaaactcaaattgggtgttctttgttttcggaagatgaaggagctccttggccagagttgggccatgaactatcctgatggtttgtgcagaagtggagaggcatggagtagaaagtacgggggcagcctggccagcctacacagtatacagaggtatgtattgggaagatcagcaacttgagagcttcatacaaacaaaatgacaggccgacggaactctcttgaagacaaagacctgagctgacctttttgcacataaatgagacggaagggttgtgtatcgaatatttggttaccacgtccaaaatcctgctaaactcgtccgaggttgatttcagcgcctttcgtcgagttggcacattaaaaaacagatcttcaacctatagacgtttggaaagtacagagagaacgcgccgaatgtgtcagaagagaccaaactactgagactacaaagataaagaacaattctgaaacacacgattatagtagttccctgatttccggccgctgattttggctctgggctctctcccgggcgaagaggtatgagtacaccatccgaatagtttgctctgtatgatagaggccggcaacaccgttcacatagtcagaaacatgtgtcattgacatctattcgaggagaaagcatcgcggagacgagcactcacttccacgcgcaattgccttctttcgtctttgtgaggacagaaacatgagcaacgtgagaaatagatgctagagcttcgcctcggaatccataggttgcaatcgtttcgaggtcggagaacgttcggagcttggacgtagtgaaccgttgacagaggatgggaagatcggcgtgctgtcaggtaagagggcacgatgctcgatatcagtccacatgcggtccttcctggaaagaacagatagagggattgcatatacccggataccacacccatcatcttggatctgtagaagtttaagtcctccatctttaacagagactcttatggattttgctccagcatcaagacagttctcgatgagctctttgagtgcatttgccggccgttggatgatctataggaatcacatttacccagacgcgttagaaacatggcttcatcggcagctgctgccctatatcgtatacatggctttacctctccagctgctatccggttgatcacgatctcatccaacgcgacgataggctttggttcgaacggtgtatcctgttctgattccatcggtgtttgatctctcggtgttgttgctatgaatatctggctgacgggccacaaaggtgacgaaccggccttctcttcttgggcgaacgtgatctgttttaaccatctggcccaatccggaccgacttgcttctcatcatatccttcatccttctcttattctagaccgtcttttcgttcttcttgttctccttctccctcttgaatcctctccttcgttttctttaatacccgcccggatcgttcggttggtttggcgacccggtctacttactatgctttccttttctctactggcacttctctcggtcttggcaaactcgtccgcaacgttcgctcaaaatagctcaacagctacctacaaccctcctcccgtttcttcgggagtcagcaactcttctctaacctcggttcaacaatggtctaaccttctcggcaacgctctttacttctacgatgcccagaggagtgggcaactcccagacgggttcagagttagctggaggaattcctctgccttgaatgatggacaggacatcggggtggatttatcaggagggtgggttccttcgctctcggtttgattcagcctattaaaaagaggcgtatcgaatactaacagtccgctctccgggcacttgctcggatcataactaacaggttctatgacgctggagactatctgaagtgcactttccccttgactttcgtgctttcgtccataggtctgtacccaagttttctcgtatatttcggaaaaaaggtaaacaaaacgctgaacctcattcttttcttgtatagcatggggaggaatcgactatggacaagcatacgacacctccggacagacatcatatcttgacggcacgcgtatgtcctacctcatctctctaaagcgtgaaactgagcatctgacatttctttctgcgcattcacatttggccaacgttgcagtccagtggggtttggactggttgatcaaggctcacccggaatcaaacactctgatcgtacaagtaggaagtggtacggttgacaataagtacgtgaacaagatgtgaatcccaagtatacatcctatctgaccattctcgttcgcatgttcttatagctactggggagatgatttagatatcccgtctcctagaccatcctatcaaattaacggctcggcgtaggttccatctatcgggacgtgcgctcactttgacatcttatctataagcttatac

SEQ ID NO: 1969 - DNA, 4740 bp, Xanthophyllomyces dendrorhous
gtcaatccctcaactatcaaaacgtatcctcgaccatcgccaacagttcttacgcgtcgaccttactacagcatgctaaggacttgtacacgtttgcgacaacaagtacgttacaagtctaccagacggacgtaccggcagtggcagacgtgtatggcagcagtggatacggcgatgatctagtttgggctggactctgggtaagtttctaaacatcaagcaggaatgatgtcctttaaaggagttacactcaagcccgtttatgttccctcgctcatatgtatatgttcacagctttctctagcagccaacgactcgacttatttcacttcggctgcttccaactatgctcaatatggcctctccggtaaatcggccgttctgaactgggatagcaaggtcccagctttgccgatcttgtttactcaaatagcgatctccaaaccttggttgatggaaggggctccgtcgaatgtctcgagtgtttcttattggcagagcgagtcagagaaaattctcgaccaagtcgtaaacgaaaagttggggaaaatgacgaagggaggcctcgtctgggtacgtccgtctgtctgtgttattgagatagtgatagctttagacgccttactgatgttcttcaaaaccaactatgctggtgacgtgttaatagttcgaaggagactcagattctgcctctttgaaccctgcattgaacattgctatgcttctaaggcggtatggtcctatcgcctccacgacagctaagcaacagcagtatttggtacgacgctggtcattatgatccatgaattcgcttgagttcctctgttggctgacttgacatggactccttcttttcctatttagagctatgctcaagaccaagttgattactttttgggcaacaatcctatgagcggtacgttctatctttttgtaatccgtgttgaatttcctcgtgcttgaaggatacacgtctaaaagcatgtgcctatagttccctacgtggtcggttcaaaccctaattcgccaacaaacccacacagtgctatggcatctggaggacagaatattcaggcgatcgatacggaacctgttgtatcggcacacgtactttacggagctgtcgttggtggtcgtacgtaactccttttgttttcctatggcctccttggattctcgatatatctgtactgataatcatggcttttctcttatctctctttcacagctagcgaaagtgacaaattttggaacattcgatctgattgggttgaaacagaggtgagtcctccctcttactttgtcaaccgaatccgtgcaatatctctatagatatcccgcttaatggtctttttgtaataaacacaggtcgctttggactacaacgcacctcttcttactcttgtcgctcaggctctgactctgaacgcatctagtcctccctattatacctctcttcaagcaggtgcttactctgttccctcaggtcagccatgtgacgctgcattaccctgctcttcgaagcgcaagctcagcacaggtgccatcatcgccattgtcgtcgtgattctagtggttctgttggtgttgagtgccttggcaggttggtggtttggaggttggttcggtggaagcaaacgcggattcagaagacgataagctcgtgtttcctcctgaacttttgtggactcactcttcatctttttctttttttctttttctatcgctatcgcttgttgttcttatcttgcaatctttattcgttcctgctaaatagctaaatgtatgatcacctcgcatcttcattttgttttacatcggtgcttatttttcttacttcttctttttaagaatttggacactctaaactctatctatcgaaactttacacatttctgtaccaaaaaaaagaaaaaagaatccccaaggatgatctttgtttgctttatttctgtcattcttcttggttcttcctatcttttaaactctccgatgaaacaatcctcactttctttcgtctggatgcgctgtctcataggaccggttttccagcctctgaggaaccctcaaggcttgcatgtgtgacacaacaagttgttttgtccttgacatcaaatcctcctgttctctaacagtgatgtgctgctgcaattactagttcttttctcgttatcataaatctttgttgtgtttataggatctccgtcaccccaccttctgtcaacactccagtcttgacgacctcccccttctcctgcatgatatcctcaatcgtctttagcctatctgatccttttccttcggtgatctctttgaaccaacctaagtgatcggcgatcaaatgtctatggacaatttgaacatgaataggatgttcaagggataaattagttcataggatgatcgaaacaaaagaagaatgagaaagaccggttgaaagaatgagagaaagatatacctgttctggcaaccaggacattgaactaatacgattccttgagtataagcctgtttagagaactgatgggtcgaccggtggtggcatagcacgagcggttctggatcatccgagactgatggggtcaacgcagcatctgaggaggtggaggtggaggtggaagtagaattaggatcaggaatctgagctgtacatgtaaatgtcagagacctagtagtgtttcgtaagcgagagagaaagacaataaggagaaaagaaagaggattagcttatggcaaaccgaacaagcacaaagagtaagacgatcaagtcaacacttgcaattttggagtttgatcaaacttaagtggtccctttgtatcgtttccttctgctggcacccattttgctttaattccttcacttccactcgataaagcgtccagccttcgaacagaggatgagagagaccggatggagaaaggagggactatcgaggtaggaacgaaggccgtgcggcggcgagtaagggaagcagcttcccggtaaaccaaaggatatctcgccagcggaaggagactgttcattaatcgagcggagatcatcattctatgtgagaagaaggagaaggtaacggacgggaatgtcgagagagaagttggaagtgtggtagtgagtttgactggaaacggattgacggccgaggaagcggcgacgtcagctatgggttagcagatgattagtcagcatttccaaccggcgcacgactccttcagcgcgatcttgacgacatacctgagggaaagaatacatgcatagaagagtggcaacagacagtgtttagaaagatacagcaaaatttcaagagtttacaacacaaacggatgtatataagaagaggtccaaaaatttggtaagaaaaaagtcgtaagatcatcttgaggccgtggtacatgatgggatatatgacagaaaacacccgggcgagagagtatcgaagaaagatagggaagggctagaagacatgccaatgagttgaaaagatgatagaatgaggctggaacatgatctacccagctttgacgccctccgtgcgcttaccaatcccttcgctctgtgtaccccagtttttccaccaagactttttagagtcggacgagctggtcgcacgttcaggcccagcagccttccaccttacgcctgagctagatccgctctgaacaggaaatcctctcggaccttgtccgttatcctgtcgttgttcgccttcccactcaagatcctcgaagaaccgtccaaccgctcttccttcgacagtctcttgttcttctttcctccctgctgcaccaaccttgctcttctcggcttcgccttcgtaagactccgactgaagtccgaattcatgatcaatctctgcaactccaacgtaagctctccggacgagtgggtcctcttccttggtgatctttgcaaatcgagcgagtgctcgctcatgtgctagctgactcaaggtcgaggctggtaatgagggcgggggtgacggtaggaggagaagatagcttcgagtttggaggaggtggggtgtagtatgaatcgtggatgggggaagcttgttgagagtgcacaggtgatgtggctgatgacgaggacgaggctcaagcgatcgttagttctcagaccgataggaaacagagcagaggcgcgaaagggagacatacatcgacgcaatatttcaatgaaatcccaatcagcgtgtcacccttctgtatgatatgtctaatgacttggccgtttggaggatcgatatcgcccgcattcacctcctctcttgccacttttgcttggtcgttcgcttcatcctccctactggagtcttccctctcttcgttatcgtcgtcgtcttcgtcttcgtcgtcttcctcgctgccatcgtcacctaaaacaaaatgatgtgtttcattttctgacagtgtgccgcgtcccttccgatcgatagacgaccatgatccctcgcagtagagacacggattccaccgagcgactcgtccttttgtctctttacagtgtttgcaaataaaccgagagcagcaccttgtcttcaaggccgatcctgacagcgagtgattgatgttagacgagcaaagcaggcagagcggcgatggagtgtaccgaggagtcttcgatgtagacatggtgagtcgtgtggttgcgatttctggctctaccggaacgatcagatctggagatagggacgatcgagacttaaccctagccgatagctatgtaaggcatatgtaatatat

SEQ ID NO: 1970 - DNA, 10604 bp, Xanthophyllomyces dendrorhous
acccagcatacagacttgcacctcattgatcgaacagaacagcttcatcacgtcctcaccagttcttcatgccctccctgacaaggatcacatcgctctatccatatctgaatcttcgattgtcattcggtacatttcgtagtctacgggtccttcaggaacgaccatacacatccagacccctggtcggtccacatagaccaccgtcgttggatgatcttgagctcgatccgattgatcaggatgattcggctagggcatcgccaatttttgtaaataggcctccaccttttgacaagaatgactatctgcttccttctatggtaaacaaggtaggcttgtttggccgtcatgattgagaagaaccttcactgacagagtcatgaactgaaattctttgggtcatatagactgaacctatccgcaactctcggtcctcggaagcttcaagccggcacccaacgagctatactccttggaacaaatctgtatgtatatccttgtagacctttaacatgagcgccgtcacaatgatcttatcatggcatcaaccgttactaaggtttggcctgttatctaatatgaacactcagaacgacaaacatatagcatctgcgccgctgaatacaaataacgtatctgaagagaaagcccgagagttatgcaatatcttggtaggtaaatcttcaacagctgacatgtattcgtgactcttctgatttgagattgtctatcgaaatgcctgtgcgcatattcccactacacgttcacgtagatcgaacaccttcctccccagatgacgaagcgcgaactgaaagctctattcaacgagctcgacatcagagtcaattcgatcgtcaaaattcagaatggtcgcgctttcgttgctctcaatggagaacacagtttgcaacgaatactagctcttgatggaaacttgacacttatgcaagttcgtcagacttgtcacctacctttccttcagattaatattttgcgcagagtcaattaattgaaccatcttttgaatacgattttaatcagaaaaaggttcttgtgacccagattggtccactgaagtcctcatggcgcttcgtcagtattctatgttctgctcttgaacattccgttgtcatcattactcaccgtatcggcttttccccctttagacgatggaccttcctcgagatgttactcctgaagatatcaagaaagtgcttcagccattgaacgtagacatcttgtacaataagaaactacctgttggagagccaaatggagacaaaagagtattgcaggtaattcatcatgacgatacttgcgctttaaaataaggaaggctttgcttactgtgcaatctctcctgaactaaaactttggccctagaatgacaaagggtttctctccagaagaagccatcgaacatcaatcagagactctccaaacctctcgtacggaatccggaaatattccactaatgtgtctgtcgaagaagatgatgaattcttgaggaagggaaggagagttcgccgaccgactgaggatatagtttgtttattttctcattcttcctagccgtactttcagaaaatagctctcttacgctgtctgtgcgcttttggtgttgaagggtgtcgatccgggtcctctttctgaggacagtcctcgttcatcaaccaatcatccctcatccgaggaaagcccggcacaacactcagaaataccaaccagtgcattttcaaccgacaccaatcttaccaaaccagatcctccgtccagctgggagagtatcaacaattcagtattctcatcaaattcagagccgactggcactacaactgaagaagaaagactggttctcaagagagtactggccgaagctttgaagtacgggaaaaataaaaaagccaaatctgacgtaacctctgtcgcggaactgggctacgaggagtatcccgcaaagtctgagaacgtcatcatgccagcagatgactcgaatgatgacaaggcattcgaccaggtaagctagctcctgttgaatcttttttttctcttcctgctcttaacaacggatggccaactgaatctacgctctacatcaaattcaaaatcttgattagttaacaatcgaagcagaacagagattgcatttggaaaaaattcgagacgacaatcttatctatcaactccgggtgagcagcgttccgaaactaatatctaccatacgcctattctaattgaaatctaccacacatcttctcctgtcggcaatgcatttgctttgttaggttgatgggttcggatctcaatggagatacaaagaccttatgtcactcatacaggaatatgagattgattgttcgattcccactggcccgcaaaatggattggttctgatgtctgtggtaggaaagcataggttcgagaagcttttcaggatggcaggtctcgaagtgagtttcctatggctccatcaagaaaaccttgttacgtggtgcagttgacattgatatacaactctctcgtgcacatggtccttcttgggtttatcagatgttgctcaaactcaccttgattagttgttcgactaccgttgccgatttgttggtcgccctggaaatggctcaactcaaacgagatgttcgtcggttttccacattcgtcaaccagcactgactgacagaacgtcgaccttatattccttgaatttttttttcctcacgcttactttgtttcagcatcttctcgagaatttgggtattaatattggcaagatctgggtatgattttctgtcacagtacatatccctatgtaatgtcttaatatcgtatctgacggacatattttttctctcttatcttgctttgggttctcccttagacaccaatgagctcggacgggagaaaatcatcaccatcatctactcagagcaaaaacccactacagatgattgttcctcaatatcgaccaaatacagaccaaaaacactacgcagtccatccagatgcagtattaaacaaccctccgactgttccctatcaccctccgttcctctttcctgacgatgatcctcacttcggaaggttgaaagagggcaacaaacgcttcaaggtgtgttagcatcgttacgttcagcttcttcttattcagggtgcggatgagttgataacatgactcttctccctctgaatgtctcctcgtccggttcgtctacgtttagtcaaatgaaaccaaggtgcgatattgatcgttatgaccaaataccacgaagtgcagctctcgagattcgcttgatattaagccttctctcatactatatttctctccttcgttttctttttcttgttctttcagaatccccgtaaaccgatatcaggccactcggctgagtacaccaagagcgacaactctaagtctgatagccttcataaggacagatagttacattacaattctataccgctatcatgttttcatcctggatcgtctcgcctcctcccgtctcaaccttacggaacatgatagaatgtttctgggcacgaggagcgcgtttagtacaatatgatgatatattcattgacaggcgatgatgttgaaccctgcacactttctccctctttctacttgacaagacctatctgcgtatgttctgcacagagcaaagaccttgttgtgtgttgcttgtacgcacagagtattagagtagaaagaaggaaagacgaatacgaaagcacgttctaagacttatataggatagtgatacaaacaaagcacgaagatggaggaaacagagagtggggattatatcggacccagagcctctcgaatttctgtagatggcgacatgattgcaatgtatatacgaacaaggcgtatagtaacgttatcgattagcatcactagggtggggagagagatagaaagaaaggatcaagactgactatcaacaatctctatatatcgctgggtagctggcgaatctggatattcctccaagaaggagactccgtagtcacatgatttcccaatgcgagggtccaatgggatagatcccaaaaaagtgattccggctgggcgagttggagatcaacacgataagaaagcaggcggaagggggtaagtaaaatgatgtgtcaacggccaaactcatttatcagagaagaccacaatacggaccttcttcagccaacgccttagcgccacccgtggatggaaagaaaacgtctgatttgccgttacagctcggacagacaaagcctgacatgttctcgaccactcccaacaccttgattcccacctttctacaaaagtctaattccttcctcacgtcctgtaaactgacctcttgaggtgttgtcactagaacggctccgtcaataccaccttctttcatgtattggacgacgctcagatgttcgtcagatgtaccaggaggagtgtcgacgacgaggtaatcgagcgagtccccccaatcgacgtctttgagaaactgtttgatcatctggttcttcttaggacctctccagatgatagcagcgtccgtggaagggagaagaaatccaatggagatacaagatagattcggagtgagataaatcggtgaccagccggaggctgatgtgtgaagactctcgttttgaagtccgagcaggtggggaagggagggtccacatatgtcgatatcaagcagaccggtctatttcattttcaagaaagcagaaaatgagcgacagtttggattgaaaatgtccgagagaacaaaatggaatataaagacctacctgcacatcctcatccgcactcaatgcccaaccaagtccagagctgaatgtgctcttaccaactccaccttttccactgagcaccaagatctttttcttaatcacatccattcgactcttgatagccggaagatctgggtcgggaagcttgggaacatccgaagcgcagactgcttgattgggacatccgtcgcaagctgagcttttaccggccagttcggattcagtcccctaaagtggagagacggattaagcacataacgaggttagctctgtgggcttacctcgtaggataatacaagagacaggcttggtccaagcactcacaggacaagcttctggaggaggaactgtaagttgactttctattggtagtgtggacatgacaaatgctgcagagtgtgtaagcaatgagtaggagtcaatggatatagtgacgaagcaaggctaatgggcaagcgactattcaagttggatcccctgcctaagtcacgtgaccatcaagcgccacacgcagtaattgtgacgatcccggagtacaactaacaagtttctgttgactgggactaatcaccaaacaaccagcaatcgaccatcagctagatagcatcgctttgtggagtcagatagcaggaagtatcgggccatattaagggaaaaggtagctactccttgcttataaaattgtacccggaggaatcagattcgaactatcattcatactatcaaccaaaaaggaacgaacgccttccgcccgttgaatttaatatagaaccatcatcaacgatactcgagtgactttcgtggcatcggtcaatcatgttgttctctagacaaaacaagaaagggatttggtgagattgaatatccatgctatgcttaagtttatcacgctgcgtcttttgctcatacctgcgcttttgattcattgcctacttacctgccttgctctcgtagctacatcatcttgccatatactctattctgcctcctttgtgtcgtcttttcactccgctcaaaactctttcgtagacgaaacgtgccagcgtgggctcttcaaccccctctttcctacgccccgagtcttccacctccgaggcatccctcaatcgctcatttgactcctcttcagaagacccatttagtgaacctctctgataacccaccggagccttccccgaacgatcaattcaagccctggaaagctcgaaatgcgcaaacgtttatctcacttcacaagtgtgtgatggatccagaacggttgtgtgaaaacacgtccaaaggcaaggtcgtcattcttgaagcagattatttccgatggtcgttagggggagggaacgatggggagcatatttgggcatcaagcgtgttgacggcgtttgattccctgggctacaccgtactgataagtgagagcgcggaggagacaaacgaatggtattccggactttcaggcgcggtgacaacggtaatcaagactagggacgaggtcgacaagtgcgtggaggacagtcggtggggatctaaagggagctgtttggaagggccagataacacgagaggaattcctatctggaaagtacggtttgataaaatcgtctcaatattgccttaggacatgtatattcaaaccatccttgttatgcacgggccggatacctcgttctcgttcaaaacagattttttcgatgtatttcttccccactccggcccatcctctaggctcagcctggacgttgtctccagagccataccactaccactcacagatcaacaccgaggctcggtatttaggttattctattgaaaaagtgtgtctgaaggagcctgtcgttccgtgggagaagcgtgacgaccgagcttacatgttcgccaaggtaagcacaagttcttcagatacgaagagtcctaaggaatggattgaaaatgatattcaactctgttatctctttgctcgttgatagttcgattcgtacttgacaaactcagaagcgtccgtcttgttcttacctacttccgcctaaaaaatgctcatcgttggttgtaaaatattcggctgaccccttgtatcaatatccttggttgcgtttcctctgacaagaacagtacttggtcaacctcgtctttcccaaccattcaacgcctagtcaacgtaacctttgtaggagggtttatgcgccaacacggtaatcgagcggattctcctcctcaaatagaaggaatcacgaatttgggattgctagaccgagaagactttatccaggagatggccaaaagtaaagtactcgttggcgtcggaaaccccatcatctcacctacgttcgtgttttatcctgtcatctttctgctctctctcttttgatcactcagaatcaaattggatgtcaaagcttgttgctgatgtccctatgcgcattactcatgtgttacgaatctttaacagcccctacgaagcactctgtttgggtgtgcctttcattaacccaatcagacagtgggaccatgatgatccagaggatcgagataaatgggtcacgcagcacaacggtctcatcgaactgaaccctccgcatgtatatcatgtggtaagtgaccatctttcgatgtcttgttttggtcgcctttatatatacagtatatagaactgatctctcttttccgtatatcgtttcctctgtaatctgacggccaattgatagcgacaacatgatgaaaaggccttgggcgaagcgattcaccaggcgatgaacgctccgatagaccgatacatcctgcctcgaatgagagaggaaggggttaaggagagggttaagcgaatggtggaggacgtggactggtggaagaaatggagagcgctgcccggggtacataactgattgatcgataacacaatcgtacccatgtggcaaactcttttgataaatgattcgatccgaaaactttaaatgattcttatgcacataaacccagccgttctactaccggcagcgaaactgaaaacactgcaacagcaaactgatgaacaaagaactcatccgacgaagcgatgccgttccacagacgctcataaccgtaggagacgatgaagacattccgtatttggttacgcgttcgcgactgtaaccattacatgtaattttgttcctctacccagccccggcactcagtctttcctcatcctccatcctcaccctcagtcttgaaacagaaccatcacccactatcacgactatcaacatatcgccatgccttctgtcgcagaccgaaccgtgtatccttcgtcgactagcgagtgggttaagcctgctgctcgaccggtagagattgatgatttgatcgctggtgtcggtgagtcgctttcattctctctttctttttccctctcttctgcgtatctcgtccgtcgtcttcttcggccagatatggtatggtatcttaaaggtagcttcaggaagccgggaaaaaagacttccagatgtacgcatgaggagccaggaagaaactggatcgatgggatcacgtatcagaccagacctctgaatatatatcagcgtggttatgtctttctcttggctgcatatccacttttcatttgtctttgtttgcctctcgaatgcattcgggagtggaatcttccatttttgatctctggtttatgttctctgactcttggatctaatcattctgttctttcctggcgttcagatcgatacaacccggccaacgtgtctttcctggaggactacctttacgatcaggtcaagagcggctcatacgactgcctcgctaacttagctaccttgaagttgtgcgtttttctccttcttagttagattctatattttctgcacaaagagatatgtatattgtcaagctaatcataccgctatttgacgtttggccgggttgaaacggaatgtctcttgcgactgggcggggactggatgaaaattagatatcagttcaaccccaacctcctcaacaccgatgttctcgttcacatccttctcaagactctcatcgctacccctgggcctgattttggactctctgttgctcttattggagatcgagcggttggttctttttttgaatgcaaatcttcattccgtattctcctctcattccttcactgacctagaaccaaacgtgttggcaacctcttgatgccttacgatacttatgacgtggtgctgtcagttctctgttcctgcttcggaagaggaggacgagatggagggtcacttgccggctttgcttgagttccttaccaaggctcactcgctgttgcgcacgtgccagttcagccagttctggaagttgttgaacggagacgaggaggctgctaccagtcagttttcctctttaaaattaggccagaaacgcgagaagtgcacctgactaaaccatcataccctcacacttccttcttctggtagtccttcgtcaaaaccagttggctgagcaccctttgttcgccaagcttattcgaaccgatgttgtttccaaggccgtggcatcgacgaaccagcgaatttcttcctcacttctcggaaagtggcttgacttgtcgggtgacgagttgaacaagtttatcacttctgagctcaagtggacgatcgagggagatgtggtcacgatcggtcagaacgaggacaacgatgtcaagggaaagactgtcagggagaacgttgaattgaaccgtcagtatttctcctttcttcttccttagtcggtataaaaaatggcgaaagaagagagggacgttccttatctcacttgctaacctgtttaaccttacccttcgatacaacatctgcattctttcaatatatatagagttgaccaaggtcattgccgccggacagaggtaaactcacctgggagatataaagaagactttctttcgtggtgtgaattcagcaaatcacaggggaagatgaaggagaagagacggaatctttttcttagaaaatgttcgctttttcagaacagccgacatatataaacttatttttccataatcttaaactatccccaagggtacaggaatcactaaatactgcaagactgagcgtttgacggttgcatccgaccagctagttgaattgcctgaattaactgtttgtctgatcttggggccacaatgcccggagtaacacctttcgctaaccctgctgttttaaccgactgaatccggcatcttacacccctgcgtctagaaccatgatcttcccgaatctacctaacaatctctcacctgtcaaatctggacaatgcttcttctcgtctcgagtgcatatcggaaatgtcgctgatctgcttgaccttgagaggctaggttaatggtgatcccgtatttgtgttcagctgaatggacacacctatcccaatcctggggtgacagagtctggaatctagaggagtagctacatgaggcatcaacggaggtgctcaaggtgactgagatcgtggttgaaaggacgttgcaagggatgatcgccggtcagcatggacgagtagaccttctgatatcttagttcgttgtcggtttggtcccagcaaaacacctggtaagttcggttagagaactgagttcatgcagctcgatctaattgttgtgtcagatgtatgggttcagcgccagtcatcatcgccagggacacaaatggaagataccggcggagcctcatgaggcagaacgatggttacgttgtctaccgatgatggtctggaaaccccatgcagaagagcaggtagaggatcgcgagttgtaagaagcaaccgaaacttctttagctacgtgcaagggttttttctaa

SEQ ID NO: 1971 - DNA, 11217 bp, Xanthophyllomyces dendrorhous
gtaaataagcaactctagagtatcgatatcgaacatggtaaaggcgaaataattaataagtccaccaacaacactgacaatactttccatatcagatgcggattacctctggctcctcttcatcttttagttcttcatcgtgtatgaatacatcaagttcctgtacgctctgattgatactggcttcctgaaggaatgtgaagtcgagaagctccaagaacgggaagaaagagacagtcgttttcccttctgggaaaatcgtcttctgtcgccttcgcagtcagtgatcttcctaaactcttcagtctccaccttgcgctcgtcgtagggaactatttcgacattcagagtaagctcatgctcagtgactctagataattggcaagggagggttggtagatgagatgaaggatgaatatctccctccaacaagcactgctatctcgattgattacagcactgtcagaatgagaaaaacggattgatgagtgtgaattctatgtccggtagaatcccgtgcactataacagttgattttgaatttctggtccggaggaagaaacaggttcacgtagatctacgtcctacacaattcttgaaacacaacgagcggttcaaagatgagtctagcttctcgatcattggcaattgttggaaagctcagttgcaaatcaagcgaaaagagaatatcactccccgtcatacttggcctctgcttatacgacctaggttttccgtttctggaacagctgacgagaggatttcaaacttcgatttgtagagcgctcgaagatgcgtgtatcctaaactcttgatgacccgtcaggtcatcccatctcctcagttcgtctgctgaccctcttgaagtcaagcttggaaagcctctgcgtcttagaagctagcctcttgtgctcgaagaagcaactagcaatagtgcatttatgtatgtcaacctgttcaattgaaggcatgtaaggcgcgcgaagccctggagtttcagccgataagcattctggtctatcctttcaagcatcgtattttctcttgatatccagatgctgaaacagtagtctaaatgagatctgactctgggtaatcaaccaggaggagaccggagagaacgaagatcgaattaagttcgaatgaaatggtggtatcaaaaccccgagatggacgactttgaatcgagagtattccagttcaagatttaacttcttccactaatgtctgaatcttggcagacatagaagggataagagtaggtgagaagaggtagaaggaacacgatagtcccgtgaaaaatacaaaggagcatctggcgtcgtaacagacagctcaacaaacaccaggagagttcaccctggaaggcaatgagactggatcaggagctcgaatgatcacaagttgtctatcggtggacacagaaagacgtcttgctgagaggaggacatatagatcgtgtactttaggaaaacgcgtcggtctgggacgtgtcgcttaaatgagattacagcccaccaagtctctcttacgtgacacagatgccacacttcatcatacaactatagatcatcatatcaacttcagggcgagtacatactctacttctggccagaacttcctctcaaaaagccatccatcacggccgctttggcgtctctggagatatctgaattggatgtatataactttgagatccatttagttgccagcagatcaaattctttcaaagttgacaccgaaggcggaggaatgccagtcgcagagggagaagtgggggccgagagaagagctcgaatagtctacgttgaagaacgaagagcgaaaggtagaggaaatatgtctgttcatatctgtctatgcgtgaaagtgccaatagtattaaatttactcacagtcttgagcccaaaccaacaccgaacgaccatacctttaccatcgctactcttttcgctcaagcttaaacaaaggagataggccttgaatgctaaaggaaggtctccagcggtgtaagccgtttcagcttgtcgaagaaaatgtatagggttttgaggggcaaggagaagagggtgagaaatgcacgccagagcttgagtgtagctgcagtaggttttaatccagcgtcagtatagtgcagcttcaggagtaatatgatagcgctcaaacttacaggcctagggacgcatatagctctgagagaagggaccacgcatcgatatccgtgtaaaatacgtccaagtatttgagcaattgtggaatccgatcttgaggcgttagcgaaggcaaggacatcaaccgtcggagaacaggctatcacgatacccagaagaagaataagcccgagttcaaggtcttggttcgcctaacaggactttctcgcaatgcgcacggtttcaacgaatggacatagactcacgatattcgtcgagtccttgaccagaagtctttcgtaaaacgttttggcttcatcctcttttccattagcctcgaggagcattcccatcaagacttccactcggggagagttgggaaacttcttcgacagtttgttgatgcagtcctgatagaatcatatcattagaccagatcatggacgtatgataatgagacagacaagatcaaaagaggacgtacagcggcaacctcgaccttgcctaaatccattgaggatatagcgagctgttccagcacggcccactctacaaagatgagaagcacgctgatatgtcaaccgacaaaacatatatggatgagtatgccaaagtcgatgttggtacggaccttcatcggtagaagctcgtccttttcccttaagggcattgtaggctgattgaaaggtatcaagagaatctctagactgatgaatccgacgatgggtaaggacttctgatggatctgacatggattatcacaatatctcttaagtagtctggaagagatggaacgggatgggatggagaagagaaagagaagaggacaagattgtgtgtaatgttgcgtaagtaacagctaatgttacactaattacggttgccaacactacaaaattcccctaatgaatcaatacagaacatttgtaatcccagcctgcagaggatgatccggtgataacccccggtcatggctggacacaccatctcatctctttccttacaagagggcagcgattctcacccgccgtcagtgctcaccgtataattttccaatctacgttcttcttcctcatcaataaccacccccccgtcctcccaatatttcttcaaacaactcgacaccttctcgcaacgaagaagtcacggcaggtccagttcccgaacagtcggaaggatccaaccacttcaaccttgctcgcgacctaaatccctccacaattcgtccgcgtccgtctaggtcttgctctccacctgtatcctcgactaactcaccttcgaccaatcaaccttcgcccaggaaacgacttcggctctcatctcctagcatgtctttacctggctctcagctcgacgagcttcccatgcccgcagatgatagcaaacaaccgggttctttggcttcctcgcctgcgtatcctgccattacatcgacgaatatacaatcacccgttctgtcgccttcatccgctgcgcttggatctgtcatatcatcgccctcccgcctcaaagactcccatctgaactctcaaaccaacggacattcgaacggcaaagctcgaaacggattttctccgatcgaccattcggaagctgggccaagctcgggtaagagacaagctggtgtacctgttccaggagctaggctgtacaatgaaggttcgcatttggataaaggagagtttatacggataacgctgcaagctcttagagactgcggttacaagtatgtcttcctactttttggagatcgactgcttaagactatgctcacattactattgtctatctactcggtggtatcccagagattctgctgctttattagagcacgagtcaggctatgtgctggaggctacccctgtagcggatatgcgttcagctataatgggaggccgatgggatgaagctctaggtctgcttgaaacgaccggtattgccggcaccaagaatgagacagtgagttagctatcacagaggtcttattcataccgctcagaatgtatttgctcaacatgcttatctatcctcgttgacgcgcgatcaggcggccaggttcttttttgccgaacaaaagtatctagagctattagcgagctcaatgtccagcaaagctcttggagtgctacgtaaagagcttgctcctctgaattacaactctgaaaggttacatcagctgtctaggtgcgtctctcttctgggtgtctgtgatcttggctgatttctaatcaaatagacaggtgacccttttcttacttttatcgctttgtttagctatgtgctctgtataggcgaacaggagttgtataatcgatctggctgggacggtgcccaaggcacctctcgtcagaagacgctggaccaaattcttagtaagcttgatctgcctcgtccatcgttcgaggtatgtctactcatcgtctctttcatatgccagccttcatacccagcaactataggatacccgaacggagaatgggaactctacttgatcaggctcttcgacttcagagcgaggcttccctctacttagttcagccgtcaggatccttgtctctcctttcagatcaaacaagcagtcgatctcagttcccactcatcaagtttgcagcttgccaagagcatactgatgaagtatggaatttagcatggagtaacgatggaacaatgttagcaagtacaggcaaggacaaacatgtcgtcgtgcatcatgtgggagtaagtcagcagtttcatcaactcgtattcatcaatacttaacacattcctcctcctcatgccaatataggtctcgcgcgaaggatcctgttctaaacgagtatttaagcggatagcaaaattcgaagcccatccagcacctatcggaaatctatgctggtcgccggacgacaaaatattgattaccacagccgaacatcaaatttgtgtctggaataccaaaacgtgggagctgatcaaagtgctcgatcagcatcaagactttgtttctgctgtaaggtggtcgcccgatggaagctttttcatttcgagtggcgaagacgggaagctgttgaaattcgtgagttcaggcgatgtgcacggttcgcgaccgttagagttagattctaatcatccactaatcatccactattcatctccatacttcttctggaacaggatcgagcaggaccaagtcttgtgaagaagagcttagtcaagaacatgcgtctcttcgactttgacttcaccccggacggcaagcatttcatcggtgttgcagtgtttcctcaagagcctcaaccaaagtcattatatactaattcgacacatcaacgatctggaggttatcaggagccaaaattttatccatgcgtattcgattcaaagacactagccgacatatcgtgagcctctctcctcccttgacctcgaagatttatctgataaatgtgcacgtactattaaacgggaactgacatgttcctccttaccttctcggatctcgattctgcaaattgatccagccaacctgaccgaccgtcagtcaagataaatggtgatgcaactagctttcgattgtctagagatggtcaatgcggaatcatcaatcgtcaaccggatgtacgtgcctgttctaacacatttattgcgaatgagaatcaagtatcgttgctcacctcttttctaaattggacggcttcctccgattttatgatggtcttctttacctcaggagatacagatatggagcttcaagaatcttcaacccgaactaaagcagagtcttcgtggccatcgccaaaagcagttctaccttcggagttgctttgctggaccaaacgacaaccttgttgtatctggaagcgaaggtaaaccttccaattgtgtttcacaacttcaaaaagaagatcgtgacatgatactaacatggttacacgccgtcattgtttgtattgtttcatcgtctacgcactattctcagatggatatatctacgtatggcatcgaggatctggtcagctcctagagatcatcaaaggtcacaaacgtcccgcaggagaagaaagcaacccagagttgatctcccgatccgcatccggcacagtgaatgcggtatcgtggagaccagaggtggatggcgaagattcggcaatgtttgccagttgtggagatgatggccaagtgtaagttctcttggtcatgacatacaacgtgacccgtataggacaaggctaaatggttctgttctaatctgaccactggctgtagtttgctctgggagccagcaccacctggcacaccgcttcctcctaaagagctatccctcgcgcatgctcctaatcgcaatgcctcttaggttcacatcttcttatctcgtccacacaactgcatcttgatcatttatggttgaagtttgacgtcaatgtttgatatcttcaagatgtctttacaaaacctaacatcttatcgatcacctagcatctactgtaatctttatttgtatctcacgcctttcaaaggatcgcatagatccattttcgcctcttccactcatcttacacatatcacgaattttcatagcctctcgatgctatctctgttctatctttcttaacattctttctccggaaccacgatagttgatggatctttaagttgtaaccacgcacggcagaagggtaagttgcagtattctgtctaaccatattcatgtaagatgtgactagagtcagaagcgacagtcaatcccgtattgaatgacaggaacacacctgatgacatctgctgatcgctgtgaacacttcacctgtcaatctctgtcaagccctgttcctgtctgattctttccgtttgatctcctcaatcaacaactatcatctcctcaagagaaccgccatgcagccatcagatcatacgattgatattcccagctctgtatctcatcggtcgtttgagacagcaagagagggtgatcgcgttcaatcccgtaggtacctcaatatcagtcgacttgccggaagagcaaccccccttgaatcggccgctcgtcaggacgttcagtcgtcttcaaagaaaactatcaagagaatcaaacacaatacggagcagactcggtgtacgtcctattctttttcgtgatatcgaatgcttgaaatttcttcacaacaggccatatcggcacacttgaaacaaagctaacaattggatcgaggcaatctatggcggcgatagtcagctttgataccacccctgtcaagtttcattctgaacgagagtctttcgctccttctctgacgtccaaacaaactcatcaatcgacgaacaacttcattactcccggaacacgaacttcgatcaatcgctcacctctaggattggcgaaagaactgagtatcaaaaacagatcttttgcatccggacgttctttcaaaaatgtagtaaaagaggacggagaggacgcggtggtatctagtggcagtgaaggagaaaccattagggatggagaggatggggctagtgatggcgaagacggcgagtggggtgaggaagagtcgaccatgatgtttgtcgagactgtgaagaaaggaaaggatttagttgaggtggaagagagcgagtcgtaggttcttctttgtcttttcgatagtactcgagcgaaactcatctttcaatgacttcaacaatcctttctatagtgacaacaacttactgagccagcttctaagtaagcccgagctctggcgcacatgcacgatagataactcaccggggtcttttcgatattgacagatgctgatgtaattgaagatgataagataacggcgaatcttgttgacttgacgtctgtcagttttttccccttaatgaaccttatcgcgactggatcaagttgctgatccttaaataagcgcatacagcctactggtaaataattttgaaacattacggatattttccttctattcatccttcgtcgtctgtttcggttgcatggtatagagcgattcgtcaaggacctatgggccagacaagatcgacatacaaactcgtatatgtgagtaacatgtccttttcatccatcgagaggaacccccaaatcttattgataaaacatacctaaatctcttctagtcagaatcatcaagccatcacgcgcgccaacgaaggtttacatcgggatctgagtgctcagaacgatgagttgatgagaacctacataacttttaaggtgtgacttgtactcccaataggtgcatgatgcgcacaggaaacaagctgtttcagccattcatacctaatctagttgattttcatcttgcctcatagagtcaacaagagcttcttgttgcccgtgtagagtcagctcaccaggcatgtgaacgtaggaagctggaaattatcaagaccgaggagaacttcagtgagtaattgatattgttcggccaagatttttagaattaaccagttctcacatgacgttagggcaagagaccaaggaaattttcgaaagactacgagaagagatgaatatctccatcgcctcattcacgtgggtttcaaaaactactaagaattatttgagtgacctcctgatcttatctcttccgcttagttcaagagccgagttgacatcatccgagaaggaggctaacaaggaggtcaacaagatgttgaaggtcagtgcgctctatcattgcgatgatgtgactacctaatatgctaagtcaaatgtgtgttatgtcggtggacgtctaggccattattggaaagtgatgtgctcgaaggaactgtgtctcaagtttagatgttgtatactctcctagctggctatgtcgtctatacatttcatggcactcttgattatacaatacgtatataatctacaatgagttatattgaatcacgtgatccaaaatgtcacttgcgtaacgcttggcctccctccgctcagggtataaattcgtcagtttctgcccaatcaattttgcttttctccattgaccacgttagttcactttcctccccctctggtttttgcactctctcctcgatagctgaccttgtctcgctttgatacgcgtcttccctccactctacagactctgcaggattcatttctatagagatataactggtcttgctagtttacactagctacaccacataaagcgagatgctgatactccacccacaccccttcacggaggacatgcggtcttatgctcttgattctcacgaaccaaggcaggccgtcgatgaagtggattgactcttgacgctctttgcttgcagagtagccgacggacgacatcggggctgtgggacgtatctgatcgcttctactttttatcaccctctgaagactgtcttgcttgctccttgagcgagtgagaacgtttttattggcaggtttctcttcaggcgtgttctggttcatacaacggcttttatcaaacattttaacggaacaaggttgagaagaactgaaggtcagtatgaggccagattatttggaaagctctgttcgaaatatatatacagggcgaaactgagctgatgaccggatggttacaagtgaagtaaccacaccaagggtctgaggtttcaagggataaattcaggctctcggggctgggaaacaggatagagtagaaatactagagaacaggaatggcagggataacaagtcacagagaatccattactaacttttctatctacaactggtagagaccgcccgttttacatatcattcttagacgctgtgaacactgtagaatgcgctggaagtacaatccattggaagtgggagaggagggatagcgaaattgaagggtctttgggttacggtttacggtttacggtctacggtttacgaatcaagtgtagtcaggttacgttcctgacaacattgttcctaacattagataattagagcatcacgtgacactacagagatcgtgagcatgctgtagatattctcactcaactttcttgagcagcaaggcaagagagaaaatcctatcaaccaaccacttgttcaccatagacatacctatcctggtcgtatcgataccatcaggatcaaggccaaggccatcaacatgaatccgtcgaccgctgtcctcctcaattcgcctgctctcaacgcgcgtatgtggatcaactcattctctttctataagaatgtacactgaatgactggctggctgattgaacctgatgtgccgcatggacgtgttgtcttcccatttctggtaccttctgttccacagtcaaccgaaaacagcttgtgagcttatgtaaacgattccatataaaggcttctggaaaggtcagtagccatatatcgatcgaaacgagacctatcggtttatttcttatgttggtggaattgattgtaatgttttgaatcgtggctgcctggtttagaatgccgatcttgttgccaaacttcaaacattgtttgtctctatatttgacagacatttttcatctagagattgattgatgctccaactgacttgcttgaatgttcatccgtttatctattgttgttatcatctcagcgccaaaaccctccctgatgcagttgccgacagtccagattcttcaaccgcgactcacttagccggaaattcgaccccgtatcattctagctcagacgactcggagactgcatcttcgtctcccttcaagagacccactatggcaagcagtcgagttgacgaatcctggtcgaccctccaagagaaagatgaggaagaagtcggaacatgcatagggacaaatagctctcggaatgttgagaacgagagggcttcatcatcggtcgctctttcttcgcccgagccaagtgtatcgcgcgcgatgtacccttctgtttctagagaggagtctgcgattcaaaggaacccgacaacaccagcagctgatatcgagatggatgaagaagaatttgaggttttagccgctgtctcccccaagaaacaaactattagacttccttcgatggcgtttgcggcttctcccattaagcgtctttctgccgcaacttcgctttccacacgatctcccatacctggag

SEQ ID NO: 1972 - DNA, 8848 bp, Xanthophyllomyces dendrorhous
cccatacctggagcgttcccttccttgaccaaccatgacgttcagtcgggcaagtctgatcagtcttccttcagcccttcaccctttgttttcggaagcccacgacactcggtaagaaataacgcgttcatgactcctgtgctcactgcagcaacctctcaaacccctggtgcagtagatgccaagctatcatctgaagcgacctcggtatcagtcggattgtcaatgcgtgagatcatggaagcagagttgaaaaagcgagtagaggagaaagcctcgaagggagagttggtgcgtggtccagggttgctgagctctttgacaggaatctcctcattaggacgcgcagatggaaagaagaggaggttcgacgacgcgcatgagagagagtttgcaaagtaagtcgttcttgctcgccttattcccaactctatgcagtctcaaattcttatcacgctttttctctttgatttctcttgatcaattgtagaatgacttcgattgcagatcattatgccgctcgtcgtcccggccaatctatcaccctctcatctgtatcgtcctccgctacccttcagaagaagtcaaccgctcaaagacggccttcctccataactcatcggccttcccttattgtcaactcaaacgggagagcacatcggcctaagatatccccacaagcgtccactgaagatgattctggacgagcgatcaagaagactcgattttctgttctagaacccgtacaggtgccaaattcagatgtttcttctgaatcatccacggccgctgttcaacatgcagagagtatcaaaagggaactgggggacaaatctgaagtggaggcagatattcagagagagagggaaagaacgaggcgcaagctggccatcgccaaggcgagaagaagctcgctcgctgctgaaagaggtggcagatctagtttggcttccacgccaaagaccctaccacgtgagttatctttctgttcatccgttctatgagtcgggttttagacatccttctcaaagaacgaatcctcatatcctgtattatgatttctagccaaagtaaatgcctctcggttagtattccttcaaactgggatggatgccgtcaaaaaaggggtgtcctctctagcgagaagcatgcctgactcaactatcagcccgtccttcactctacaatcacctgcgaaagaaaattcagtcactgttgcgaaagggttccgaactctttcctcgtcaaccaagcctgctccttcttcatccgctgcagcgcccaaggctgcctctgcaacgttacccaataaatcctcatcaaatgcatctcgagccccgatccctacgttcaacgccagttcgcgatcttcttctattcgatcgggtcttgccgtcagttcgactcttcatgtacccaccaacactccgagtatttcccggtctgcatctcgtttgtttgcgccaacagcttcttcattagctagacaggccggcgcaaagacaccatcgacgacacttccatcctcgtcctcatcgagcagcctagccatcagatctaaagaccctgcggctctcagttcgaagcgaccaacgataccgactatgaaacgatcaccgagcggcttgcttccccaatgtcaagtccaagctcaaggaaatatacttcctgcagccggtgatagcacccctcgacccatttctctctatcctactctacctttcgacactgcgccctcaatgttaggaacgttcccctcacattccagtccgaatggactggtatcggccccttcagtaggccttccggacttttaccaaagtccgtcgagagatcggctcaaagctcaaccgaccgccagactgtcagcccttcaacctcggttggctggctcaacacctatcaggaagaagcgaagcacgatgtccgctcaatcagtaggcaagcctagtgggctttcccatcgggccatcatcgcgtctagcgtagggtcgagcggggacgggaacggaagcacgccgtcatccgcaagaatcatgacgggtaggaaaccgagatcatcactctcgatatctgtttctgctgctaaggctcgggcccgagctcaagctcgtgctcgtggtcgagctagcgtaccgaatgtcgggatgtctacttctgataccagcgtggatgctaacgaagctggtgggaggtcagatcgtctgagtctagctggagtttaaagtggatgtcgagagaggagaacttgaggtcatctcggttttcttttttcaagagggtgtggggagtgaggggttgtttatcgtttcgtcgctctagggaagactgagaagctcgtcagggtctgaatgaacgagggtttggtttggtgcgatgtatgcttctgtttatctttctttctttctttcacctttccttcgctcgcttggttctccgcatttgcaatttttttctgcttcctgatttcatccatcctcttcgcatattttgggaaccgtcttttctctatatacctatcctagatcatatctcccgtaattggtactttaatgctgcatgtccaacctaatagtatatatcctggttctttttccatctgtcttgtgatgaggaatcataactcaacgaacgggggacattctccataaatacatatcacgccgcacaaaccagggctcagagaaagagaagaggccaaacgaaaaagagagaagaaagcaaaagaagatattattaagggtggacgacacaactaaacgtttctgatagagggaaatgggccgatcatcgttggccggtctctttccctgctagtccgaacccttgacgcatgatctcgatagccgccaagtcttccctgaggatctttgtaagatgttgaagcgcggtctgttggtccgcgatgatctagtttattattagtattttgtcgaagccatcccattcagggtttgacagattgaaatccgttggagagttgaatcagttttttttctttctgtatttttctttcttcgtgagaaacagagaaagaaggaggggaaagaaaggagaaatcccaccttggcgagacgttccatcgcttcgtcatctactaccgcccaaccttccaacccatggccaccgtccgaacctctgccttgtctgtctctctccctttccgtcttgacctgaccgaggagaccccatagttccatcagccttcccttgacgttcccgtctgagcctgctccccttccgccttcgagctcgcggacaagaacagacaaccgttcggtcaacgcttcctcttccctcctgatagaggacgaccggagggtaggaatcaaaagatgaagatgcctgatgagaagtaacgttcggtgggatagctgagtttgaaggagatgtgagcgggagacccttagggagagtgagagatgggatgttttcgaaagtgtgctcagtcgggtggagatctcttggagtttaccccagtgcgcgccggccatcttcatctgagcgtctactcgtttgccgagatcgctaaacccaacggctaacgtgggtaccattctgttgaagaaatccatccccagcagacgcaaagagagattcgtcggttggtttgaacagagagtagatagttcagctccgactagtacctgaagagtcgatgggaacagctagaaaatgaatctcacgtcgatggctccggattgtctctctgtgctttgaaccacatggcgtcatctacattctccggtctggcatataatccgacttcgttctccggtacgacattgtagaaaaagtactacacgtcccggccgcccccaagaaaaagttgatttcataaacagacatatgtatcagatttgttaagcaggtgaacgagaagagagagagagagagacaaaccttgaaccgacagtacgggctactcgggtcccaagaagccttgatgtactctatcctctgttcgatcggtacgtcttccaccctcagtggcgctctcaagccagcaccgatccctccgtttgcaccgtacggtcctggaatgaacgttgagctacctagttggccgttgggattccctaattgactgactgtcaacgtattttgttgctgctgctgttgcggttgctgctgctgctgctgctgttgttgttgctgtccaaaccctccaccgaaaagaccaccattccctccggtcgttccacccaaattattcacgctcgaaccaaacagacctcctgtagcagtggcctggcttcctgctcctccaaagagacctgacgtagatggttgttgttgttgctgctgttgaggttgttgaccaaagagagaaggcgtagaggactggtttgttggagctccgaacaaggaggatggctgagtggttgtcgtgcctggtggttcgaacaaatggtcagattagatcgatagaatgacatgcatagaggagatcgatcggataaagatagatgggaagaaagaaggaagaaatggggaggagaaagaaggaaggaaggaaggaagagagggagagggaaataggaaggaaagtaagacgtaccgaatcctccgaaagcaggttttgcctgccccgccccattgtcagctgctgtattcccaaacccactgaacgtgcttgtcgaaccggtaggattactgttattagcgttggttgttgttgatccaaagagacctgtgcttggggggttcgtgttcgtattattcgaggaagggttagaggcaaccgctccaaagagaccagttgttgcttgtgctggttgttgctgctgttgggcaggagctccgaaggagaagccgcctatttgaatttcatagaggaggaagagaaaaagaagaaacaaagaagagtgaggacagagaagggaatcagttggtgtacagacatatgaacgagcatctctctctcagccgaatttgacgaaagagaatcatatcctcaaaagaaacgaggaccaatgggcaaaaggagagtgaccataaatgggcacgtaccgaaagaagacatgtcggtctgattaactacgcactcaaggctttcccaggagaggaatcaggttctgatgacggtggtggtctacagagattcgcgaggaggatggcggttgaacaaaacgaccggatgttgaacgatcagtaatgggcaaaaaatcccataacttacatcaaggatttcgactatttgtgatcctggctgggcgttctctcaatcatctcctcaattgttgaaacattgccagatgctcatacctcattgacagaagaagacacataactagttccgttgactactggccagacaaacgatgaatagagcatacacttgtgaattgagacagacagagaagggggaccagtatggaagcgtaacgaacgaaagaaaatgggccaagatcagtccaaaatggaaaagagggagagggaaggagaaggcgtttcatggggggacagaacaacagaacgaaaagaaaagctggtcatgtattatagatcaatgaagagaatgtacggctgaagaagagggagttacaatatgcgagaagaacaggaacaaaaatcatgaatcgtcatggggggttgagaaggaaaaacgcatgaaaagcataagctgggagggcgttgagatatgaccaaacacaaaagcccttggcctacttccttggaaagatgtcgtaaagagtgagaattggggacgtgaacgtgaggagggaaaatacaattacggccaccaaatggagaaagaaattatacaaagaatgacgaaatactcggagacgaggtatttgagaccgatgaataaagttggaaacttcttgaggtggacaaagaggacaacttgtgtgtctgatgagaatcagtagtcagatgagggtgggcaaaagagacctctgcctccggtgtgagcgctgcaagcaagtaaagggacgatccttggctgtcaacacttcacaatcaaccattaaaaaaaggcgaaaaagaggggacctacttcatggcgtccctccaaaagttcatcttgtgccaactcgcgatctcgccgttcgatccgggaattgcgccaacgcttcctgatgtgcactttccgcgtccgctgaaaagcgacagaaatagaaaaggacatagagagaaatgacatgagagactgacacgactggcgagatggtagatagaagggcgagacatactcggcttgaccggagaacgggcattgaccttcaagagtagaagccgaccttgagcatgcgtcgtcgagcgagatcctggttttagagttacccaatagtcgaactgatgtcggaccgggtaatatatagggctgatagaagggtgatgataatccgtcagctttttttcgtgttcgactggcttaaacgcgctgagaaatatattaccttatgggacgacatgttgtgacagtgaagaaggctgttgtggagaaaggagggtacgaagatgccggttgatcagagcgttgaactaagcgtcctgtcggacgatctcgttcttacgaaacgaaacttactggtatccgtagccggacatcctggtcagcaaccctttctctccacagtactcgcaaaagccggctcgatctcgagagtctgatcctttgatgtagcgtgcgccgtagagctgtagaaggaagagtagaacatgcgttggcaaggaaaggtcagaggagaaatagtttcaaatatgaacagaggtcaactttgaagaggaggccgacagatagacgcgtacgtttgattctggaaacgacctaaagacgtaaccttcctccggtgcgggcacaaacatccgcggtggtagctctggcggaaagatcaaggatcctgtgtgaacaaacaaagaacgggctcgacggttaagtgaatgggtctttttttttgacaatcccaaacgattggaacgtactggtcttgacgtggtcggccgagcatccgcctgactttttcttttggggactcgtgccgttagggccgggctttgagatccgccctttgagccgaggagcgtctcgcggtctttttcggcccttgacggtcttatcgctatcggcaagaacctcgtccaagtgtttcttgccgttccgtttaggtccggagccggacgcagacccggagtcatcagattcgggaggggaagcgtctctcatctgctgaacagtctgtgcatgtctggtggtctcgaggacgaaggatgtgggaagtgggaacggatggaacggatgtgccggcgcgaccgagggaaacggtggcagcggatcgggtggggtgaagaagggatgggacagcgaattttgttggaggcacaccatcgggatcggtccagggaacggtccagtcgagtggtgggtggcggttgatggtggaggataggttgatgattgggctgcgacggcgaggatgtcaagagcggatccgtcgatggggtgcgactgctgggagggatagagtgagtgctgttgagagtaggcggagtttgtggaggtagtagaggtggtgggttgaatggagctgaccgactgggacggatggccataggaagtgatgtatctatcctggttcggataaaacgacgcaaacgacgaatagccaaccgggttaggaaacatgttctggtgagagtcgatgtacgggtaggcgtaaggaaaaaaggtgggcgacgtggacgaaggattatctgaaaagtatgatctttgtgcgggtggtcccgagggattcgtctggtcgcctggcgaggcgtaagatatgctgctggaagaagtgtaagaagcttctggggaggacaggatccctgcagcctctgttctcgagccgtcttgaattctcatcggctggagagagagagaaagacaaagacaagggtcattacagacgaaaaggaaggacaaagacgagtgaaggaataaagaccggagagagggcaggaagacacggacctgcttgttcacgtccaagtctacatgaccccaaccaaagctggtggtgatggcctgatcggctggttcatccacgtcgacctctggctgatttgtggacgagatagacgaccaaaagctggcgacatcggccggtgggttgaagtagagcgctttgtgcgagttgagttccctagttgcttgctcggctatctcgagcgggatctcgactgaggacgggtaaccgggtggagagtgagtgtctgtagaggagtgactgttgaggacctgctggtcatgaataaaacccggtgggctatctgtgtgcgttctgtcgatcaaagacatcccggcagcgagacgacgaaggaagaaggaagagcagacgagcgaacaggactaggagaccgataagaatgtcaggcgaactagaaaccaacgaaagacgaacccaaggtggacgaaagatgaatggtgggtgaaggatggaaggaagaaggaacgaaagaaagaacgcactagagagaaaagagatgggaggagatagacagagggtccgtgcgtgggagggagagaccgtctgtgcgcacacacacacacacagggacgcgagcacacggcccaagggacgaggcacacacccacacgcgcgcagacgaggaggactgtgcgcgactctgtcgtgaccccacagcgagagggagagagagaatttgtatgtgtgtgtgcttgtgggtgcgtgtgggtgtttgtgggtgtgggtgtgggtgtgggtgggtgtgtgtgcgagtgtatgtgtgtgtgtactgagagtgtgcccctcattctatcgatcaccctctgtttgtccgttcatctgttcctctccgtctttgggtccctctcataggcacacacacacacaca

SEQ ID NO: 1973 - DNA, 7534 bp, Xanthophyllomyces dendrorhous
acacacacacacacgcgcaggcgacactcgtcgctggcgtatccaacacgccaggcatatcagcgcactcagaggcgcccaaatacacgcacaaataccaaacacagatccatgaaccgatcgctcgaaggtcgagactattcaagaggcggatattaaaaaaaaaaaaaggcttaaacgtcgtcatggaaagttgcgaaacattctgctcgatcgctcctcataaccccgtttgcccgcccccggaccgtttagtcgtggccaagtgccaacttgtcagcccgaaaatcatccgccccgggccggaggatttcctttcgctatttgagtacaaagcaaaactcgcaattttgggccccgccatcggtctcggacctatctcgtctgtgctcagatgtctatctcacgccttgatggtgctccagtgatcagtggcccttcggcctcgtccgcgcccggcgtaaaaagaaaactgagtgttcatctagactcagtctctatctgtgtgtgatgtatatcctatccatatatttcttcctcaatcttcctcactgcctgtagagctttctctctcgacagcctctgactggacactcttctcaaacgttctctctgttgactctgaatccctgcctggatatacgcgacaaagagaagaaaagtgattcaaaaaggacaaatcaaaaatagaacaagacgatatagaatgaaaatccttttcattcgatcacctctgaccctctctttcagcatagcccaatagagtcatcgtcgtcgggcctcgtgccagtgatcgcccaaggttacatgttcgtcacatgaacacacgcggttactaacattatgttacagtctactcacgtgaaccggccaagtccgatgacgactcaacccatcacgagttccactcccctcctcccttttggtcatctcaacttgctttctttccttctttctatctaccttgctctcactcccagtgttccgatcgacgttggcttctactcgttctacttggatcatatcgctcacacttccctatccttgtcgttccgtagttctttctgttaagccttgaaaccatgtccgacaaaacctcagcacatgtccctgtcgtcaagttgaacgacggtcgagagatcccccagatcgctttcggaacttggaagattcctgaggacgtctggtccgttctattcctctagcttgctctcgttctttctcattcttttcctttggatctcataaccttctctctgccttcgcgacagcaccctccaagtcactcaggccatcgagcttggattctcccacgtgagtgcaccatgcttctccccaggccgttctcggttgcaatacaagccttgctcatctggtttcctctacagattgataccgcgcaggcataccgaaagttggtatctctttcttcttgtctcttagccctttcttggatagctgacacgaacggcaatgttttccactcccgactctcgtcttccatctcttaacccttcagcgaggcagaggtcggcaaggccatcagaggcttcggccttcaccgagacgacttttgggtcaccacaaagtggtccggcctggatggcaaaggcccccgacagagctgccttgagagtctcgacaaggtatgtccagattctttacagccctgtctatccttccctgtgtccatgtatgaatcctctcgatccgaaatctggtcctacagctcggcttgaagcaaatcgacctctacttgattcactccccccgactggccaacgaaaacatccctggagtctgggaagagtttgagtcactcagtatgtcagactctgctgttcgcatgttttctatggtccacgacatcatgctcagtcgttctctgctcttccttcttttctatgaatcatttacagaaaaggacggactcgtcaagtcgatcggagtatccaacttctcgatcgccgacctcaaggtacttctctactctgcgaagatcaagcctgtcgtcaatcagatcgttcgtccttgcctttgtcaaacttctccattagtcctcaccccaagtgtggacgctgatgaatcagtcgacctggcattttccatcagctctttcacccgtacgtctgggagaagaccagacccttggtcgagtttatggaggagcatgacatcaaggccgaggcctactccgctctctacgttcgtctcttatcctatcgaattcttacctcttcgaattctgaccatgcccctgaccctttgtctaccactttcttctcttgatatacttctctccagcctcttacatcccagactggaggtccggtcgacaagcctgtcgacaagatcgctcacaagaggaacctcaagcctgaacaggtccttcgtaagtcacttttgtcttgcctcgtctgtcctttggacctcatgtttgaccccgtctcttgatgatccttttcgccgcccgctccatcagtcgcttgggtcattggtatgtttaccctccgcttgcgagctctgtgattcatgtcttgtctttctctcaaggtcaatttttttctctctcttcgctctgccatcgacattcctttattcgcacagcccacgccggtatcccgatcacgacctcgtctcgaccggatcggatcacgtcctatctctcggttccccacatccatctttccaaatccgaggtcgaatcgatcgatgaagcaggcaagaagtttcatctaaagcatgccctcaaggaggccgttagacagaaagggccgaccgtcgcgttcgcttcgctcgtcgtcgccggctggcttgcggcagatgctttcggattgatctgagatccgggttcccaccaacgcgcccggaatcgcgtttgacaacggatccgtgggacgctcaatctctgtcctcacgatcgttcttctcttctcctctgtttgtatctcgttttgtcttatctatcttcttgttgtcctatgctatgcctttgcctgtgcgtttgcgtcatgcattaactcaaccccgttcgttcttgacgaaccttagcagaagaaatgaagaacagaaaacatatataagaaatttttaattttttttccggtattggaagagagattctgggccaagttcagtattgttacaaagaccaaagaaaggaagaaaaggaaaaagaaaaagaaggcaggctataaccgaaaagaggaaggcagaccaaatcaatagacgaaaagaaatggaaacagaaagtggatgaaacgacggaagggagagatggatggcgttgggaatttatcaacaagaccgggcaggccattttcgcctgcctcttggagagcgaaggaggggggaaaggttcgaagagactgtcaagacagagggattgagagtggaaagagaaacacaatgtttggatagattgaagaaaaagttggaaaaatcgaagagggttgagaaaccaaaagatggaaagaaatgaagataccaaatcaaggtggaaggcaggaaggtagacgaagataatacaaaccgaacgagatagaagaaagcataaggaagaaagaaagaaagaaggggaaaaagggtagaaaggaaggaaagaaccaggatatatgcgcatacagcttatcctaattcattcttctcagtccatcccaagaaaaggaaattctatgcgaattgacaagacgcaagatctacgaagcaggactagctgctccacagtcctgacagaccgcccaaagggatcgttcacccatcggattgggatgagaaagcaccaatctcggaatctggttacaatgcgccccatgactcccgctaaagtcctgtccgatcccaagcacgccgaccttggcatgatcctcatcgacagacattccgtcctccaccatcccgtccgagccgcttaagaccgtcttcccgcccatgatcccaaaaggatactgagcaagattcatcgggtaagccgaaacggatggtgtgcggagttcgcattcgctgtcggatgaacctgcgcaatcgacgtccatcgtgtttccgggggcgtgtcgacggaacgagtgtgacgatccaagtggagagcttgaaggagacgacgattgaaacgacgcctgagatgttggcagatttagcggcggtagtcggggttgtttctaaaaagatccatacggtgacagcgggtaggtcgcgtccacaagagggaaggcaaggggggaaagaaccaagaagtcaggcttttgatacactttaaacatgatgaaacgcgacaaactagtgaacaataaactcaccctgacatgaatgaccttccggtcgctgaaatcaatttcctcggagcgggaagcggttccatcgaggtcgtgctttcgcttgttggagaacgctgagcgcgacgcctgcggcggctcagcagtggaggtggatgcgaaaatagaagcgaactgcatcgtggtttctttttatttgtttaaaaggaaaagggtggttggttgtaagaaggaaggaaaggggttgcaagttggatgagggatggtttggatgatggtgatggttgttctttggacgggaaatgagacaaatgcccaaaagttgaaggttttactaaaatggaacacaagaggaaccaacggaagactttcttatataaaaatcgcccttcagggtcacgtgtgacgacagtttctgtaacttccggttacaacgtgattgttgcacgtgatatgtttcagtctcagaccgagacgcgttgacccgcgtcgcatgacgtggccggtcagaggcgtgttcagacgcgtcagttagggttatcgtgtaatgactatcctcacttaataccacgctgatgcatcgatcatctaacaccctttcccacacgctttgcttctcatatgcaggctactctctcagccttcagcctaaaacgttcgtgaggatacgaggaaagtacgcccattgtgtccgtactcatcttaaattgcttcatacatacacatactttgatagatctctacaaagctttgacttgtctgacaaagttcggagaggatgttcatctccaagcgttggataccgaggtgggttcggatatttacagttcagcgttctcgatgctgatactaaatcattcgatctactcatactatatctggacaagctcattctatcctcgctcaactcgtcaaagacggcccatgcaaagtttcggttctcacatgcattcttctcggattacagcgtgatatcttcgtctaagcgagggctgacatgtcatctcaatgctaaggtgagttctttcgtcgattcatacctgatgtttcaaaacatgagcttgctaacgcccacctgtttgtttgtttgtttgttcttttgttcttttgtcaaccaaataggctctgctagggataatccgatcaagaggagtcgatcggactgtcgaaaagtgtcagctcgagctgattgacccggatcagaccgatccaatccaagatgaagacgagactcgaaagaagagacaaaagactggaggggacagctcagatgaagagaacacacataaaaggcaaagaagagagcaagcaagattcgtagtcaagctgttcattcaacacggttcgtccgcctcattcaacggcgaccacgagtgtcacatttcccccattatctgccttgtacaaagccgacgtcagcttactcgtacttgaatgatcggcctctctactacacaggtttcattaagacatataaccttcatatatcgaccattcagtctatccctaatcctgtccctcctagacttgacccatcaaaaacttcaaagttctctatcactgggaagtgcattaccgagtggatggaaccgtttcctacgtggattggaactgtatccgctcccggaagcaaagaaggctttctagcttgggctttcagtgatgagggagtccgtatcagcagctgggaaggtgggattatttcttagctcgcataggatctttaataggattgtatgcggtcaagtttgacttcagactgactctttatcttgtaacttcataggaaatattaaggcagatcatctcgcgactgaattcttcgttgacgccgaggattttttagagtactatacccctggcgagacagtgaccatcggttttccgatgcgggagttcaaggtgatttcttgcacgatccaacttgtcacataaagtcatcggctgattattcagatatatgttttcttcacaggccatcacattaacagctctctccctctccacaccaatctttgctacattcaccgctcccttcgctcctctggccatcaccctcgccgactctgagaacgtgtttgaggccgagtttatgatcatgacccaagaagtccctggctttggctcacgaccatctaacagggccaaggatgataaacgggacaagaagcgccgaagtatcagcatcggagctcgaagcgagactagtacagatagtggacttcccttggatggtccagtcggtgacagtcaaggcaagaagccaaaactcagattaaggagcgtagccgaaggaagtgaagaaggagaagcacctagcaggtcattacgaggatccttggcaatacgaaaccttgattctatcgagtcaagtataaaggatcatagaagtcaatcgatacaaaatggaggaggcgatatggccgaggaaggacatagggatgttgacaatgaagtattcgagctgttagaagcaggcatagttgataacggcgctgtaacatccactactcgatttcctttctcttcttcatccatcccaagacgtatgcacccatctcaatatgctacatcaacgcctaatcttcatgccccgacgtccaatctgcctcaagaacccctcttctatccaggttcacaggagatctcaatgccatcgacaatcccccctccggcgctcagtcagctcacgcaagctcaattagaagcgctcggtctcggggatttggatgatatggacctggaccttgatatagagacaaacgaagacgggaatggccaactagcgagcgaaaagaaacaaggagtgtctctatccgatgaagagaagatggatttggagtccgtcgagattccaatgggcacagcgaagggcatcatgattccaccgacgcagcgacaggctctaaacccggaaaaggcgttggttcgttcctttctttcatattggcgttcttctcaatgcgctctaatgaagctaactttgatcgcgattctagcgatcgtttgaggactcggacgcggatgacgaagacgataagcctatcggagcgtcataccaggctagccaggaggtataatgcacatattgagtaaatccagcggagagttgtttcaaaagacacctactcttcctcaaggtttcgatctctaatctgtacttacttgaacctaccaaatacttccaaatacaaccgtgttgccttgcattgttctccgtttcggtgtatctatacagagagtaatatgtatatatatatatg

SEQ ID NO: 1974 - DNA, 26580 bp, Xanthophyllomyces dendrorhous
gtatatatatatatgtgtgtgattgaagattattactgaaataaaagggtgagaatggacttttcgttccggcaattgttcccaagcaagtcctcactggttttccaaaccatatacacactacccaggtgtttcagtaagatggattgagaaaccaggaaaacaggaggaaacccgctagaaaatttatagctcctcggaaagagaggctcgggactccgcgcagacggaggtcggaaggtgatgcctcaagagtagatgacaaataacagatgaaatcatgtcaagactgtcgaaatcgcaacagtgatcgtaacttgtcgatgtgacatacgacaacttgtctttattagatgtttaaggtatcaggggaagatatgtccgtcatagtgacagccggaactactattacgtctttggggaataattgagtcgagacttctttacgcagcagagggatgactactaagctgttcgaaacctcaccacacaaacaaacatccatcttcaagtctcaacaaccgattacctttgaagttctttcgaatctagtttctcaccatggcatctccaggttcgttaatgtgttgaatcatttggatatatttcttctcagggacacatgcgagcaagcagcacgcatacggtcattcgctgacactacaacgcactcttcttgattgctgttctcgatccccccttcagctgcccgtaagagactcggaaaagagtatactctgatgcaaaagacgcctccaccgttcgtttgggcggttcctgacgaaaaggtgagcttctttcatggcacaatggttctgacgtatttgctcaattgacacatttctttttcatggctacctgattacagaacatactgaactgtaagtggagtgaccttggtccactcatatccgagaccaggtgataacagatcggcttaaccgacgacttgtttatttacctggaataatccaatatacaacccgtagggcattttattctggtgggtagatttttcgtctttcatgagctagtcgtctcctttggatgcatcgatttaccgagcgtatcgtcttgcctatctcggacaatagagaggacctcctgatacgccctacgctggcggcgagtactatggaatggttatgttccctggggattaccctgtaagtactgaagagagtctctcaagaacatgtttgggtaacgattatgtctgaatcactaattcggtgctcttctcgctctcatgtacctatcagttcaagcctccggacatcaagatgattactccttctggccgatttaaacccgagactaagatctgtacctctatgacgagcttccacccttctacctggaacgtgagtatgatagtcagcgatgatcttcgtcacatatacacgcgatgactgacagaaccttcttttcatttgattgtagcctgcttggagtgttgcaacgatgtgcgtctgtttctggtttctagataacacaataaagcttataaactgatcactgccctaactctgcctgttgaaaccccatgatgacaacaatagtcttaccggactattgtcgttcatgctatcagacgaaattacgacaggctcaatttctactaccaacgcagagagggtgtcactggcagaaaagagtcatgcttggaacctgtccaacaagaagttcaaggtgtgtgttcataaactgacagcctgaccaatattcgactgttgagattgatgattgtcttttggcgttttgttcatcttggcaggatatgtttcctgacgtaagttactgagatttgttccgaattagtataccgaagctgtagtcgctgaaattacgcgtgtttcgttcctttgatgatgtagtactgcactcccaaagccaaggatgttcccgacatgccttcatctgcacctgccccatcagattccacatcgtctacatcagtcagctctcctcctcctgctgctcttgattcttcttttacccctgtttctaccactacttttcattctcctccttctccatcgataccgcactcgacatacacgcctcctacatccgctactgagccgtttcctctggcaacgacgactgactttcccttctctacctctcctgatcccgcaccgctgttgtcggctggtttggatgtccattctgcaggcggcctaaatatcaaagaagaccacggtttggtgagagatggttcagagttggctcctagagatcagacagcaggggagatcaagaagtgtgtagcagttggcagtcaggcgagtgcgagaggaatgaggttcacttggaaatgggtggccgtagtgttatttgctgtgattgtgatgctatggagtaagtctgttctgtctcccttctctctacacatactgaaagatttctagtgtattgacgtccggcggcttctctgattgctttgttctctagcttaatcaatgtgtcccttataagctttgtcttgctttcgttgctgttctcttcaactctaagctttacactagaagaactctctttgcttcctgttattatataagcactctttcggatacaagtagagagttcttatacgagggagacgtggtttgtgcaggtagaaagctttctgtacatgtatgtgacaacaagctagaaacaaaattttaagcaaaataaatgcacctccgcccgccccgaagggagagtgaaggcttgagaaagattacgaatctgaagctggcgaaccaaccacactctatcgatacaagctgatgaggacaatgtgtcgccgtgcagtgtcagcgatcgatacaggacagagaggtttatgacgctctctgtcaactcaaggtaagtatgaaaaacactggaaaagttcatagtcagaaggtgcaacttctgtcgtggagcaatagacgtccgtgtatgttacatacagtaaccatggctacacctgcatctgcaatttgcactcgctcgtcggtgacgcgcaaaggcaatttgagcacaccctttctctttctactcgctctcatcgcaccaaggactatccttgcactcttcattctccttgacctttgaaccctttcacataaacccgacatcccaatagagactgcaacatgcctcccaaaaaggtctcggtcgataaggtcggtgttcctcggtctatgctggaggattctgtttcatgtcttctttttcttttcatttttttccttcttccctttatgctttccctctctttctcctcttctctactcacaatctggccctctgttgcctaattagaaaatgctaatcaagctcggttttattcatgttatcagaccttcggtatgaagaacgtatgtagtatcctcagcttgcttcgaagaacattcactcgaacctctcggttgaccttccgctctggttgcgtgcatggctttcacagaaaaacaagtctgccaaggttcagcagcaagttgctactatcaagcagcaggaagctcgacgaggaaagaaccccgacgaggcaagtccatggattgtttatcagctcaaaatacatttagctaatactggactaacatctcgatcctttcggtttatcttactttttttccttccgcttctatcgactctcttgtctacccttcctgtcgtcatacaaacagctcaagaaagaagaagaaaaagccgcggctgccaaggccaaagccgatgaggcgaagcggctaaaagctcagatggagctcttcaagcctgctcaagctcagaaagttcctttcggtgtcggtatgtggcttttagtttcgtttcgatggaacggcaaagaagtataatcccaatcctgagggttaaatatctgtgtgttttccctgaatagaccctaaaacggtcgtgtgccagtactttgctgctgggttttgtgaaaagggaaagaaggtttgtccttctcagtcttcctcttcctatacgaacgacttcgttttctgaatatgatcaattcttcacatggctctctgtagtgtcgactatcacacgatctcaacgtcggacgaaaggttgagaagcgaaatgtctactctgatgatcgtgcaggagctgccaatccaggggatgtcaaccctgatgacaagacaaaggatactatggatacttgggatgacgagaagctaaagaaggttgtgctgagcaaatacggaaacccgaagaccactacagatgtaagccttctttctcacacacacactctttgtatccaggtgccctggtatctactcagttgatgctcatcccgcattttggacttctgtgttggacaaaagattgtctgcaaattctttatccaggctatcgaggatcagaaatacggatggttctgggaatgcgtcagtcaaaactttcaactctcctccagccgtgcccggtgttctgaacactttccacttctacatctctacagcccaatggagtcaactgtttctatcgacacgctcttccgccaggttatgtgctcaactctgagaagaagaagaaggctgaggctgataaggctaatgtgatcacactagaagagtttttggagagcgaggtaagccgcttctaaatgttcggtactagtgatagtccgcgagtttaaccctaaaaactgaaataaaacccatctatttctctgatagcgacacaaacttggaaagaacctgactccagtgacagcagagacgttcgccatctggaagaaaactcgtctggacaagaagactgctgaagaggatgtaagtttttctttatcttgagttgtctttcatatacatcatctggcgcgtcttctcaccagcgagggatactgccgtttctgtttctcttcttttcttaaccaggctgccaacaagctgaagaacattgctggaaactctggaaagacgaccggaatgtctggtcgagatcttgtacgttcaagcttccgaacgtctgtatgctgtattactctgactgactgctatctatccggttctatagttcacattcaaccccaattggttccaagatgaagaagtggaagaggaagatcaggaggagtgggatttggctcagtaccgacaggaggatagcgaggatgaggatgctgcggcttcagagtcgggtggcaagactgcttctgaggtgacagttggcgtctcggcgcttagcgtgagcgaacagccggaaaacggtcgagagggggctgttgctcaggacggttgagctggatgttgatgtttccatgaaatcttcttagaactggcgatcctttctgaaaagacacatactcgcttcagtatcagtatcagtatcagtaccatgtgtgcgtgaaagaggtgaggagcacagcaaaataaccctaattgtaacgtgagccagctcacgtgatttgttcaagttttcgttaggcgtgacgaaaaaaaatttgggaaaatagtataaaaactttgggcggcctgcgtttcttcttttggaccttcatcaaagaaagtgttcgtccatttcaccccatacattcaatcgtgttgaaagacagcccatcgctaacatgtccgcttgcattattctgtgttctattatttagtcaccgaagactatatttgcggctcagcccctgtatgatccgtagatcatttcgggcccatggttattgagcaagtgaggtttacgtcgggagacggagtgtcccccaggcttaaaagtctttctttttcggaagagaggcttgccctactcggggtttgggcctgtggctggaatttccttctacaaagatcgtggagctcgttttcagacgcttggcgacccgtacggaggatatatcaattttatctcgtttttcttcctattttctatatcatgagtcttttcatagatgttaaaacaccctaacgttaaatgtggttatcaagcacccacggagacactgacaggcaaggcttctgattgaaggaagagctcgttaaagaatgtctggcaaaacatgagagttttattcctggtcagtagttgcacagtgagtgtcaaggattttaactgagtatcacaccccttgtaagcttcttctgcttctcttgcctcacttcttccttaccacccacatttctcgtctggttatgatcttcgtaactccgtcgtcatcacccaatcctgaatcctaacacaatccagacttcttattcagagctgtaatcctataagaaagtgacttcctcgaacaacgccagcagggttgcacaactagagcaggagccaagaatgttgcgtgattctactagtatcattcgatgtgatcatgtctctcgatggaatgagagctctgtacaggaagcccggatgatgttgggattcaggacccacagagtagcgacggggttataacgggagcaaccgcgcgtgaaacaaaactgggctagagaacgaggttgaaactcttgctgtaatggtgtgcgacctagaagacgatgcagggatcattacaaagccaacccatgttatatatcatcctcaagctccaacgataatgcataagaagataatgcatagaaggtgccagaagtatctgcactggaagactcatatactttgcgggtcaatgcctttgtaagagcagaagaaatggaggatgtgctaaagagacgaaacagttgaaggttacagggctgtaacactcatgtcacgttcctgacgaccggacttgaccggcccgcggccgacaccgacggatcattgatttctcaagatctcgtcatttccttctttttcttcttgtcctatcacacaaccatccatccgttcttctcaaccatggctccctcaacgctgtcccacatctttcctacctcgggcacactcaagccgcgtagagccatcaccatcccccagcatgatgtccatatttcgcactctaggttacagattcttgtcgaagaatttggatcccaattaggctctctcgggatcaaaaaaggagatgtcgttagtttgtgcttgacgaacggactcgggtttgtccttgcctttttggccacaggtggtatcaggtaagagtttgttttgttcagtcttcctattaattctccttgcaatcgagcataagctgacaatgaccatcttggaactctcttgtacgatccatcttcgcgtatattcagagctgtatccgctccactgaatcctcattacactcaagcggaggtcgagttttatctccaagatactcagacttcaattcttatccttcctgttctggagtctcttaatgagactgaccgaaaggtgggcttcgaattttcactcaggttcctcccttttgtcttttagaatcacggacgattctcaataccttcttcttcttctctttaactatttctgaacgttctatctacatcatcagggagccgaacaagcgctctccgccgccaaaaagcttcatgtcaaggttgcagtactcaaactggccgaaaagacttgctctcccaagcttaaaatcatctttgagtcttacaaagcccagaaagagtcggccgggcaggcaaagctgtttgctcaggttgatgggaactcaaaggaggctcaggaagacgatgtcgctctggtcttgtaagccttttatatcttaaaggtttcatgagtctaagtctaactggtttacattctttatgtgatcaccttatctattcgcaaatatagacacaccagtggtactacgggaaagcccaagggtaagtgtatagacctgcgccatttgccgatcgagagcggtttactgattgtccatcattggaaccctttcggatcttttagcggtccccttgacccatctaaacttgttgactaccgttcgaaatatcattcgaacctacaagctttctccctcggacactggctacctcgtcatgccgctcttccatgttcacggactgatgtgtggtctcttgtccgctttgtactctggaggtggtgttgtcatccccgctcgattttcacccactacgttctggccagactttacaaaggaaaagtgctcgtggtataccgcggtgccgactattcattctattctcctgtctgcacctttgccttcgccaatcccgaacatccgattcattcggtcatgctcgagctcgctctcacccacggtgttccacaatctggaaaagacattcaaagcaccggtgctggaggcgtatgcgatgactgaggctgctcatcagatgacaagtaaccctctgcccgaagatggacagaggagacctggatgtgttggaaggggacagggtgtcgaggtgaccatccggttggatgatgggaaggaggttaagactggagaggtcggcgaggtctgcattgtacgtctatctcagtttcccttcctccgtgcgctcaggaccaacgcatttcagatagctcaacgtgctaatttgcctctcgctccatctatgcatatttatagagaggaaagaatgtgaccaacggatacgtgaacaatcctaaggccaacagggaaaacttcttcgctgatggctggttccggtaaagctctcgatcgtttgtcttcctctgtctgatcggtgaaacatagactgaatcgagtgttttctttttctatccaatagaacgggagaccaaggaaagttggacaaggatggatacttgtcgctcaccggtcgactcaaggagtacgtggagaaacccctttttctctcgatacctaaaagctggtaaacttatacgtcatgtttgcttcttatggtatgacagattgatcaaccgaggaggtgagaagatctctccgctagagattgactcggcgatcctctctcttgaaggcgttggcgaggccgtttgtttcggagttcccaacgagaaatacggagagattgtctgggctggtgaattctgttcctcatatcgatcccaaattcggattgtccgtcacagttgctgatcgactgttcgttttagctgtggtcccgaagtcgggcgccaagttgagtgttccgcagatccaaaaggatcttggacctaagatcgcaaaatacaagatcccagaacgagttttcattgtaaagagcatccccaagtacggccactcgctctttttccctccttcgctttcgactgcttccaatgattgtgattactaaatcgtgtgttggaaacctaatcttctttatccaggacggctaccggaaagatccaaagaagacacgtctcgactgcgtttgtcgagaaggccaagaaggaggatagtgagaagggcacgagggagagtaagctctagatgggctacatacgaactctatgcccttcttctcttctgcacatcccctctttcggatgtatcctgtcgttgataattcaggatcattagtttcttctccctctctttcccttttctcgagttgttgtatcagactggtcgtttcgtacgttttttcttactcttactcacatgctatccgtgtagatcgtttatctctatgatctagccacactttctgagtacgatgacactggctctgaacgaactgtaaaattctatcttgttcatgtctgatgtatgcatgcggtatttcagccgtttggtcgaagcaactgaacatcatttctagaatgtatctatatctaaggtgtatcgtgatccttatttcttctacacctctagatcgagtctttgtccatctatggactttcactgtagaagggggagaggggagagaaagtgaggaaatcattcttatgaagaacatcaaagagaggaaggaaggaagaaaaggtgataaacacttgagcgagagaatcaggcaaaaagacaggttgaacgtactcaccacgccggaaactgatctatcacaggccgccttttacacatctggcttggcccctgctttcgatcatctctgccatcttgttgccctcttcagaattcatacttttgaaaccatcgacaacaccttgccagtcgccatcggagtcttcttgactcatcttgaaacgaccttcgatccgatcgatttgaatctcgagaccgatgatggcccttttgaggatctcgacatatcgttctggcgcgtctgtcaacttccaggttgattcgtcttctttccctcgtttcctgagagaggcctgctcattgagctcggataggtcgctgacctgtttttgtaagaaagaagaggtagtcggatcgttttggtagtagacccggactctgccataaacttgtacggtcgagtagttccaagtgggaactaccttaccggtactcggctttgtttcgacgtaaaactttggtgtcacataggactgaacgggcgagttgaatatgatcaacacctcatcccccagaaagtcggacccagattgtttgagattgtgaatgattgacttggcctgaggattagctctggcgatatgagctctgaggatgcccttctctgaagacgaatcgttcaggacgaacggaatatgggtcgtctggagctttgcatgttcggaattttcgatcgaagttgtgaactgacccaaagggttttctcgaataaatcgatgaaggactggaatggaacgctcggcgtgttcttgtctgatgtaaaccatgctgggtcaagaatgatgctgtcgtggtttctgcgtctcaagctgagctatgtgtctcgaactttactggcattttttctttattcccaatcctcacccgagtcatattcgatctggtgtttcccagatttctgattgcctcgttgtcatcccttgggttggagacatcctcagatcaatgacaagagacttgttcgtttctttctacttgactgtatatgctggctgccttcaagaatgtctcctgaccgttatagaacatatggttcttgaacctgcaacgaactgacaaagccactgactgatagcgatgtaatctgattaagttatcatcccagttgacattcctgttcctctcctgcttctttcgttcactcttctccttttcttgagttaatcagatagagcaagtgatctgactatcagatagaactcacatagacatgcctccctactacagtcgttccgccgtctttctgtcgtgaatttctataggatgagaattcgttgagctttgttctggcgctcagtcttcactaaacaagcttcagcatgggtcggatcgcttctccttctcttctttttttttaatttttatttcccattctcttcttttttccctatcctttcctttcttcattttctactcatcaccatcttatttctcttctttcgccttcgagctcagatgtgaatagagtttataaccccggcgaagtcgctcgggagtatttggggattgtaaaaaccccgtcaggctcatctgattggctaaccgaagaagaagtctgagcatttctcattcatctttcacgatttttctcaatcagattcaaatttggggccggttgaaacagagtatcagataaactgcaggacgaagtttagtctatttgaacagaggcatctctctggatctatctttcttcccctctttcttctttcttccttgctccgtctttgcttgccttcaccatccattccattagggaggaagaataaaaaaaaggaaggttatagcacacaatatcctcttatgtcttcaccaatctcactcggagcgcctgtcgttcaacgaccgggcttcgaccgcgcggataccgactttgataccaaagaggcaaagagcgttcctctcgactcggagaacccttcgctcgaccagaagaattatctaggcccaggtcagacggcggagaacaccttcgagcttgaacaggacaaggctcctggtgttgccaagattgaggctctgtatatggtgttcggaaggggaccaaagcttcttgttctctgggggtgagttgaccaatgatctactcggaaggcggatagaaaaagatagaataccagaatctgtactgaaagctcttctttgattgtcatcaggtccattgctcttgtctccatcgtgttttgcctgagcagtatgaccacttactactgtaagtttggtactttttgtttccgaaacccactcaaacatgtctagcgatttttacgctgcttcctcaatcgcacctcattcctatagacaccccatttgctacatcttcatacggcgaacataccattctcggcacgattaccgtcatcaccgccatcatggccggtgtggccaagccgttcatcgctaagcttgccgatttattctcccgaccttgggccctcgctttctccgttttgttctacgccatcggttatgcagtcgttgccgcatctaagaacgtcagcactgtcgccggcggagaagtcatctacaccctcggaaacaccggtatcgactttgtgaccggcatcttgctcgctgatatcacctcgctccagtggcgaggattggtcactggtctttactctcttccctacattcccttttgtttcgtcgccggtaatattgccgactcgatcaatgcatactcagtcaacggatggcgatggggatacggtatgttctgtatcatggtcccctgcgccattgcccctgctctcgccaccctcttctgggccggttggcgagccaagaaggtcggctctctctctcttgcttcttccacctatgcccgagacagagtcctctctcggacgatccagccccgaaagtcccacactgctgtattcatcgactacctccgaaagatcgatgcagtcggtctcttgttgcttggcttcgctttcggctgtatccttactcctttcaccctcagcaccaccgttgttggaggttacaagaacgcctcattgattgccctcttggtcgtcggtggcgtcctcttcatcgctaccctcatctgggagtggaagtttgcttcgcatcccatcatgccgctccggatctttaaccgaaccttcatctgtgctgttggtatcgactttatgtactacttctctggttatctttccgatgcctactggtcttcatggctctacatcgtgttcgactacagtgccacggattacacgtacattcttaacatcctaaccgtcggcctctgtctgttctccgtgcctgccggtttgatccagcggtacacccatcgattcaagtatctccagatctctggcctctgtttccgtatcatcggtatgggtcttaactactaccttgtcgcgggtggtatgacgaatgccgtcgtggtcacctcccgagtgttcatctctctcggtggaggtatctctgtgatttcctctcaggttgcctcgcaagcttccgtgccccacgatgaccttgcgcttgccatggcgattctgtccctctggacctctatcggtggtgccatcggctctgcaatctctgcttcggtttggaaccgaagggttcccgaggccttgacaaagtacgttggcgatgtctacaaccagacagagattgctgagatattcggttccatccttgttgcccggactgccgagccccgagagttgatcatcgagggtaagtctataaagaatctattgcgtggttgtaagagagaagaaggagaaaggacttacttgctgatggtctttctcattcattattcgtctgttcagcttacaacgaggccatccgacccctctatctcgccgctttgatcacatcgatggtctcgctcctctttggtatctgcacccaaaactactaccttggcgacacccataacgtcgtcgaagacaccaagattgtcatgcggtccgaaagcgagacggatcctgatgtcattgctgcgaaggcttcagagactgaagctgagctggccgctaagctcaatgttccccgctcttaatatttacaacactatcgtaatttactcaaaaaaaaaaacctcagagataccgttttgatcaacggtgtcggttattctttctttcttctataattatttgggggtttcgtctctttgtgcattcatgtctttgtctgtgcacggtagagccttcaccacgtcgtccatcatgacccacagccagtcgcgccgatcagagagaacccaatcagagagtagagccaatcagcgagaaagccggtcgaagggcggtctcctgcagacaagcagacaagcagacaacgacctcgacctcgacctcgacctcgacctcgacctcgacctcgacaccacacgacacacagacacgtcgggcgggcgaggacgatggtgcgcactgagcactgatcggtggtgctggtgtctgcctctgctgctcttgccgccaaggctcgagtcgaccgatcgtaatgttggtcacttccgaccgaagaaacacttggcgtgagagtcaccgttgcggccgcggttggggtttttgtaaggcaaacgtggctaccacgtgtgacctgcgcaggatctgtggtttcccctccccctcccgaagattcttctagatcactagcattcgaggaacgatctaagattctgcgtgttccttctcttccttgcagcatgatgtggtaaacatgttgtatcctgctttctaatccgcagacgcttcatcggagctggccgagatggtctctttgccccattgatcaattcataagatgggatgcgttatagaccggaaaatctgttctaaagtgcaagataccctcttgagtgactcatctctcttttgttccgtggattctttataaatcagcacacaccagacaaactttccttttctcgttcacacacatccttcacaaatgagcgttctgtcttcacccgtgattatggcgacgatcgcgctcctcgtcactaacgtcgcccatggccttcccatgaacgaccagcccctcgtccgagcctattctgacctcgatccagctccagacgtacctactactgagtctaggtccggatccgacgggggatctaaagtttcatctacaaccatcatcgttgtcgccgtcatcctgggagtgctcgtcacgctcggtgtgggtggaatgatgtccatgctcgtgcgtcgaaaccggcgaagaacggacgtggcaaagttctcttcggtaggatgccagactaaattcggatcgaggagagggttgggaaggagagacgatttgccggggtacgagttgacggagcctttgcccgtctaccaggcgtccaaaggctaagctcaaaacgaaggtcgcccgtctttaacatcatcatctccttctctgaaggatcgaaaccttcaaggtttcatgattcaagaatctcacaatcggtcaactaggtgagtcttccttgttccatttctcttcgaaaccttacgcactcaactactttgcgcgagaaataacatacactccttgttcatctcttcaatcgcaagatcgccatcgagtttcaacggctttctctgttcgaatcaactccgatttcatccttaccctctctttcgaccttgattttagttctcgaatgcgccttctgattctaacccaggagcacccatgctcctgggttagaatcagaaggtagatcaggaggggggttgcgtttccgagtcttgtgatgtctatatattgtcctctctttctgtgcctctatgtccatgttttctcctctcttctcgttctctccatggttctagcgcagcctttgaggcagaaaaatccagatacatacacagtagaagcggaggtgaacaaacaaagagaaacctcggccaagatcagataacctgccccccctttcccctcccctcttcctcgtgctcctgatctggtttgggtagcaccggcgtctctgtcggttccggtatcaagttcaaactcaagagaagatcacgacatccaaatttctggacgtttgtccccttgccaatctcgccatgaagttctgatcggggaatgcgcgatttatctaacattttcgagaatccaggctttcggtctgttttttggacaagatagaagaataaagtcagacaaagaattcattcttgtcgtaagcagaaccattgagcagaacatatcgactatgaatcgaagaagcgaaccaggatgatggatgaacggatgagcttcggtgttaagcacatagtcatctagcgaaagttccgatggatcagagaagagaaggaagtaatatctgaaaacagatagagcctttggtcaatgtccagaaatctatacgccataaggttcatcagaggacaattcaacactcacttgaatgtctcggctaaaacgaaagactccatcttgtccgtcagcccaggtttctctaatttgacgtcgttgacagaggaaaatccgaaaggagcctcagtcttagagatccaatcagtgaacattctccatccttgattctattaggatatttcccccgaagccgcaaattcccttggtcagtccctcaacattcaaggtaattcgtcaatcaggagaacaaaactgacctgatacttttcgtcaccggtaatccggtacatgtaccaaacagtctcaatagcctctggtctcgacatatactgcttatgcatcactcttacccctgggggagatcctcggggaaggaacacctcttcatccgagtcctcatccacgacgatttcatatcgcttagggtcatcttgtttatagaagtcggatcgttcggattgtaagcctgaagggttggcacttccctacaaatatgtcaaagttggggcgcatggatggaaagacaattatcaagaacggagcgcgcaaagctcagggtggagggcacgaaccaggtaatagcaggtttgagagattctccgaccgtgaaagagatctttggatcgataactcaggacacgcgagcccatggctaacatcccgcctacgaaacaagaaagatgttccatggctggctgaaattttccattcttcatttcccctgtagaaataccaagaagatggcagataggtagataagttgtatcagctacatctctaatctagacatttgccagattggacataccgacagtctaaattaagcaaagaaaagaaagtggttcctgtaagtttgcaactcagatatcagcacaagagaattcgccacgtacggtgagtttcttgccatgaaccacccctacctccctgaagattgtttctgacgctttatcaatcgtgttcgagtactgtagaccaaacatgtgagacgcccgtacttaacgttcgatctagaattgagatgacgacactgacaagttgtgcataacgagagatctttcctcggagaagtatatgtctaaacaaaattcacagaatgactaacgagcacaggtacatcggcataagaagtgcagataagcttactgtttgaggagatattcgtagtaactgtcgaatgaaatggttatccagtgagcgttggaagaataatcaaagtgttacatctaaatcctctatccgctattccgtgcgttcgaagatgagcccagacatacctatcagccattcctccaaaactatatgtgccgagaagattgccattgaaaccttcggtagagaatatgactggtagtaagggtttgtatggtgatttggggatcaggacttgatcgatgtagtccatgcctcgttgggccatattgaaataggtctctgtattgttcaatattgggtagtgatttttcaacaaaaccgtcttatgagaaggaagaaagggaggaggaggcaggtggaagtgagacgaacgatttccggtgagttgggaaagtctagtgtattcaagcatcaagcttccggcctcagcaagctgtattccgtgtcccgtgtaaacaggctccggattcttaggcttcaatctagacataggcacaccggaagacgtatcaaagacaggaagaataatctttccaagttcctaaagaaagccgacaatttgcgcagatgtagtatgccatgtgttagaaaaaacctagtcctggtcttgtacatctgcactagggtcacatgttgtagtagtatcctcacttctgctcgctgtaagagtaaagaatctccggactgttatgaaaaaacattcagatggtccgacgttagtcagctacataccaactctcgagtttctcagcaaaggtgctaaccaaatcgtatgctccaagcaatcctcccatatatctgtgagcgccatagataaattagaagcagtcgataggatggtcgtccaacaaatgtcaaatagatttaagcttgacttacctgatgactgtttcgaaagcatgaatggatgcaacatctttccttccaagtgagtctggtcctttgtcccagttaataccttatccatagaactcaagaacaaatcaggctcagcgcagtcaaagatagagaacaaacgtacgaacccgagatgattccaaagtccagctctcgaacgtgctttcgagcatatatgtactcatcttgcaaccccatcagaagcaaagtgtcgagtgagctatcaaggtgatatgcgcagtgagaaagttagtatatagagattcttggcacggtttgaaggaacaagacatgctcgatgatggtagctcccctgttggaatgggcatgggagaccaacagaagatgttaatgatcattcgaaacgaggtaggagagtcaagcctgagcaccaaccattgtaagaactggttggatctacgacgggcacattagcttgtctatcattcgcaacacgcaaatcgtcaagttcatcactcacggctttccggacacaggcccaacttcgtcatgaccccaagcgttcgacttatagccttcccaggcatggctattgatatgacatcacgaggataaatagatcagagagagatcgagatcaaacggaagagctatcagtatatgcaaaaacctcagattacatgtaacgaaaggaggcacattgtagacttacaggaaggcgtttctgacgacatctctccgagatattctcaatgctttagctttattactctctgtacgaccttcaaaatcgaactggattctgttcaaaggaacgtcctcgtctctgtcctgaatatcaaagctctttggagcggtccatgtcgccgcgaacgagccctccgggggggtccactgaccttctcgcggaagaacaccttttgtaccaaccgaagcactttgtgccccatgatatagtgcctctgggaaaaggtcttttaccatctcctcagggaactctaccactctgggagatcgagatatagggggagactgaagcttatccaacgacgtcggattgagcagggacgcttcatcgggaaagtcaggcggtaggatcggaaaaagcgaagctgcattcttcacatggcgaggaggctttggtatgttctttgccggacggaccttggagggcggaggattgcctgggcgagcttcaggaggagtaggacgggtgagaggaacgtactcgtcgtctgaagtgagtgtgttggagtaggcaccagagacgagaaaagtaacgaggacgaaagcgacgaaagcgctcaacttccctcgtcgtctgagctggtaagggattatagattgcatagctagtctgccagtcagagcgatccgacgtgtcttctttccttcctctctttctctaagcaagaagcaagagagagatgatgctgagtgcaacgaggttgtatgtcgtgcatcaggaaggcaaatgccaagcggtgagtaaccggatggtatcgttggtgcatctacggcgacatatggtcttacagtctttcggtttctttgcctctttgcctctttgcctctttgtctctttgtgcattcatgtctttgtctgtgcacggtagagccttcaccacgtcgtccatcatgacccacagccagtcgcgccgatcagagagaacccaatcagagagtagagccaatcagcgagaaagccggtcgaagggcggtctcctgcagacaagcagacaagcagacaacgacctcgacctcgacctcgacctcgacaccacacgacacacagacacgtcgggcgggcgaggacgatggtgcgcactgagcactgatcggtggtgctggtgtctgcctctgctgcctccgctgctcctgctgcctctgctgctcttgccgccgaggctgaccctatcccatagcccatgaccgatggtattttgccggtctgtggtctgaagacaccccagtccaaaagggccatgtatcgaccaccatcggccgaggtaactctcaccatgctttttgcatactatgtattcatcatatttaatctctcattcgagcaggaacaaatctccttacaacaacctctttgatctgatattttgcccaatcatcagggtctcctccgcagaaccagccatctgtcgatccgttcaacgagcaaggcgggatggttacataaaccagaattaatgtctgtgtacggcaagatttgaaggccaatgatgagatatattagcattcaaaatttaactatatcaatgtacgcatgaatgagagcaccagggcacaccttcttgacctgagagtttactctattaagggtggaaagccaagcccaatctattgggtttgaattggtgagttggcccttatgaggtgaattgatttcatccttgggatcagcataaaccggaatggtgaccagcgcaaacctggaatacaagtaaacccaataggaatcgtccagatccggttgaaaataagtcaccagagaccgagacatactcatacgaacaagcaaagacttactctgcatggctgaacaccactccccgcttatacaacaaccagtccacacagaacttaactccgggtttcaccacccaacctagtgatcgatagtgatgataaaccgcgtacgagactaagaacggattgtcaggcctaggaggctcggctgtaagagaaggaattgaatgaagcgcggacagaaaaggtgtcgaagtcgagaccagtaattggaagacagtggagagaggataggagattttctataaggaagcgcatacaaccactcaggtctatcagattctttattctgagcatcacgggcggatgagaccaaaactaaaacagcagagaacgcaccgttatagggtctttcacaatcaaacaattcaagccccaggccaagtaccaaacctcctcaggcatcaactgcatatgctccagattttctacaacaacgttctctgctcgccttctctgctcttcttccgccttatcagcttcctctctggtcatccttgtgggcagcccagcattggaggccggacgcttgggacgttcgagctctcctgttgctgtgctatctgctggagaagcctctccggcaagaaacgcccgctcagctgcctcgacagtcaacacggcatgttttgctcgagcaattttgaagtctttacgttcttgacgtcgaagagcagtaacttcctctgccgaaagagctgtttggaaacaaattgagatcggaactcagccaatattgataagaatagatgaagtggggacacaatgttagcgagagtcacttactgtttcctgctccagtgatttcctttatctttcgtctatgccatgaaggctcacttctactcaggcttcctttcccaaagtttcccctctgccagaagatatcgatagagtcttggtcggtcacccagactgatcctgtcaacgggtcccaaacaccttcgcattttggattcagtattgagttgcttgtcgaggatgataccaataaggaccgtccgagtcgctgaagaattgacgttgttaaaggtgcagcagagggaccaaatacaagtggtaaggggaaccgatagacatgattattattcactctcgggttgaacgatcctttggatgtcatggcgagaaacgaggaattggtggttgctgagttgatgtcaatgagaaaatgaatttagagaatctttaactttcaactttctcaacttctctgattgttgtctctttcgatttccatctcagctggccgtcattcatcttttccctcttcttctacagcatgcaggtagaacagctctctctctcttctgacttggtgctcgtaactgactgactgactggccttatatacgtgaaatttgtatgttctcttggaattatctcaatgtccttgcccaccacaacactcaaagccagatagtcgacgagcagagattgaggccaagaaggcaaagcttctcgagctacgaagaatcagggaggaacggaggacggctttgataatagatcaacagcgaagtcaagctggcgaggtccgttctatatctgttcttctcttctcggtcataacatacaatgtctgacgtatcgatgcgatctcttggttttgtgcgaacacacgcgacttcgttctttttccttccttctgtctagcagcaatcgactgcagcatcagcatcaacgacatcttctcgacgagagattgattcccttgttgcctctcttctgggtccttcctcatccatcaactcaaacaatcaatcaccagctactgcatctgcgttcgatccttcatctccttcatcatcagcaggtccttcttcaccttcccgtcgacccttctcatccacaggtacctcagtagcgcccagtccagtaagaagaatcaactctgcgaccggtggagaccaattgagctcagtgatcagtgggagacctgggcttggcgaatctgacggacaggatatcccaaatcggttcgtatctctgctcaacgggttgagacaagcagtatatttatgcatatagctcatctgacagatatacttatatgcatctgaattcatcggtgttgaacgacagtggaagcttttctacgacaaaagatgcgcctagtcttgtggacgttcagaaggaactctacgaactaccttcaaaagcatgtctttctgattttctgtccttacttctacatggtctaactatcatcatcttctctgttttcagccgaaattgacatacacaaagtcagtccagacatcgtctttcgcaacttcaacatcagatgaagaaggctcctctgaagggatcatatcccaaggcgctagtgggagtggtcgggaaaccgcagaagagatgagaagtcgaatcatcaaggagcttgaggaagagaaaagaaagctcgaccaagaaattgcagaggagaaggcagaaatggctcgagtcgaagaacttgagcgcgtcagaggttagtatactcttgaaggtcatgattcgatacactactttcgctaaactcatgtttgctccatttatttgattggatgggtgtttttctcaatagatctgacggaggatcagcgaaaccagatctatctggcgcctgaatttctagaattcgtagagaatagctcaaaaatcgtccaacgagctttgagcgatggatatgactatatcaaagattataccagtggaggggcgggtgatatgtaagcctccaatgccatcaatacctcctttatcttctcatgatgaattcagaggttgtgaacaaaagctaacctgatcgcgtcttgtatgctaatggtagagatgacgaggaaggcaagaacataaaacttatctgcacgtttaccgatgatagatggaccaaaggacggtcggttacagacatagattggtcaccaaaggttcatcatgacattatcttcccatatgaacgcccacttactttcattttatatacccatgatatcttgaatggccgtttaacagttccccgagctcagtgtagcatcgtacaacaagagcgtatcacaagtgaacgatccggatgggttagtggccgtatggaatttacaccttctcgaccgaccagagtttgtgtttcactctcaggtaatctttttctgaatcagctgactgctaaatggtccaaggatcaattcaaaacgagaacgatacagtttctgatcccggtctatccttgaatgttttgacatgctactgtaaatttcagacggatgttctctccacactgttttccccttttcatgccaacttaatctttggaggaacctattctggtcagatccttctctgggatactcgggcaaaacatcttcctgtgctcaaaaccccgctctcagccgccggacatacatatccggtatacgatatgaaaatggttgggacgcagaacgcacacaacctcatcacaagtagtacggatggaatggtctgcagttggttggcggatatgctagcccagcctcatgtgagtgacctcaaaagttgcttcagtcgaatcttaaggagagatcaaagcttcatcgaatttgaacggaccttttcctgactattggaacgtgtgcgcttgtggtcgatcacatcttcaggaatctctcgaccttcgacattccgcgcacaaaaagacagatgaggtatccatcacctcccttgattttccgtcaaatgagactacaacattctgggtcggaaccgaagaagggaatgtgtaccaagcactgcgatacgatcgggctggtgccaaagctggtctgaagcagcaagatatataccgaggtcacgctggaccggtgacagggcttcacttccatcctttacatgggagtgttgactttggagatctctttttgacgagctcggtcgattggacagtgaaactttggaggacccgacaggatggaagaccaggaggttcaggtgctggagatggcaccagttcagcgaataggccgaattcatcaaaagatataactagcactggattaggcggtgttcaagcgacgaatatttcaccgattcattcgttcgaggagaatacagattatgtgtatgacgtacggtggcatccagttcatccttcggtttttggaacagtcgacggcactggccgattcgatctttgggatctcaatcgtgatatcgaagttcgttcctttctcttctaatgtattcttcttttggtttctgtccgaactaactcttcactcactctaaattctggacttcattgttcatacaaaactggatcttgttgtctacaactaggttccaacattgtctactcagaccccttcatctcgcgccctcaacaaggtcgcctgggacaaaaaggaaggtcgccgggtcgctctgggatcatcggatggatcagtctatgtctacgaagttggagaggcggccatgcccagtgaatcagagtgggcagacttccagaagacgttgaatgggatgagaacgggtggacaggatcgaggagaacctctgaatggaagatagaccttgttttacgcttatcaattgtaatttctattcaacttatcatggtttcctcgttttgctgctttccttctctcttgcattatcagtcccctatacttcatggttcctttttatatcgcgtgccttcgaagtttcaattccatcggaatattgtgatctctgttttctcagctggtgcacgccatgcagttctctcattctatatcagggtatccttcctctagttccacaatgtttgcttcattttcatctatgagatcttggatctccgctcgcttcgtcaagccatgatatgaatacgtccgttattcttcatatcttctgtcatctctggtacctctctgagaatttcacacataaattagctttcactttaggcgatcaaccagtcaatctccattctaatcttgtctctgcctcttccctcctctctcttcttctgaatgatctcccccaccactcatcccagctccattggcaccacccgctcctcccataggagccgtcgatcgacctccagaatacattccccggttcggcatattctggcctggtacgttcatcatgtgaggatggttgtgcatcatcggcggcatacctgtttcagttatttaacagggacataaccggtagaagaagaagaaaaagaagagagttaacaagtgataggaacaactaggatcaatctatgctatcatccctgagtgtggatcaggtcattggaagatggacagccttcggtacacccaaaatggaagacgcatccaactctctccttcttgttcctattccatagtcttctttgcgagaacccctcaactccatctgcatgctcttgacaatgcatcgtcctgctctcccgtcaaacttcttcagcgcgaaaaagtgaaccagcatcgtatgcctcataagcctaggcacaggcacagacttaaatgtatattaagatccaactacgttttgagcaacaacttctagagagagaggaatcggattatcatcgacaacgctcaccgtgaaggttcgctacaagatatgaggaatggatggtcgaaaaagggtatcccgagatacagcatataaggaggacacacgcgcgcgcgtacacttaaccgacacatagcgctacaagcgttatagcccaaggacgcaagataaacacaagagaaaagcagcagatgcgaggacaaatacatgactcttcaggcctcgggaatggttgtcttccctctcttcgaatatgaagaagcggaaggagaaagatgacaacaacagacataatt

SEQ ID NO: 1975 - DNA, 16311 bp, Xanthophyllomyces dendrorhous
atcccacccattcccatcatacctccctgctgaacctgccctaggttcatacccatgcccatgcccatgcccatacccattgcccctgctcccctacctcctagcatttgtccatacccacctctttgcatcccgcctctctgcatgcccccacctctgtttccgccccggaatgctcctccggctccaacaactccccctcctcgagcaaatccacctcgaccacctgcaattccgttagattgactaggtggatctttgggcagcgttctgaatggattgccttgtgaagttgaggcataagttgctgaagctcgtttggattgaaagtcactacaaacgagagacagtgtaaacgatttgacaggccaggacatatgattagcgaagcgcaagtgacagcaactcacttgttgtcaaagtaatacttcagcgcggtcgagttttccggagattgagtctcgataaaagcaatcctgaagaaacgaaagaaacgcgtaagttaacgagcgggataaatagatgatggaggaaatccgttagtacactgacccttttgatttcccgttcactttgtgttccgagaatgtgatatgtttaagttgaatatcttgaacaccggcatgtacgcatgctcgacggacgtcttcgtccgtagtccactagaataaagtatatcaattcgatgagtccggacgaaactgtcagtggaaggtttatgtaataaacggtctcctgtttttgaaaagattgcacatacccaactgagttcgcctagatagagagcatccatcccaggcccagcctgtccaccgccagctaccttggccattgaattatgaggaatgactggcccgggaattgttgatgtatatgtaccgattacggacccaggaggtggtacaacgccattatatgacctagcagatgacaaagagttgcttggcaatgacgttgaagatggactatggctagagttaggttgtgacgttgattgttgggacgggaaaggcagacttgaagcagttgcagctgagggattgacatatgattttggcgaaagagcatgtgcagtatttgtgtcaatcggaacggtagatgccggtggcggagtgagttctttgggcaaggtatcatagacggtctatgggacgaatgaagagagacagtggtaagccaggcacagacaagtatttactgatgtgcagcgacgaaagtcagggcgacgagggtgtgagaagaaaagcaaggacagcttacgttgtcaacgtcatagaggtcatctccgtagatatcaaactagacgggtcatcgtggtagtggacgagatgtagatgaaggtgaccatcagaccaaatacctgacaggttcgtttcaggaaccagaatcggtgacgggtacttacctcttcgtcggccattttggaaggagagaagcttggttgaatgagttgatacgacctgggaaagcaagtggattgtcttgaaagtagtcagaagagcttcaaaggatgctgaatcgagacaacttggtgtcgaacaagagatctcactgtcgctttccctcttgataatgatggtagactgacaagagttgagcgtacacgtcctagatggaattgaggtgagatcattagggatggctttacctaaggtattcagatattcaaatatattaccttaacagcctcccgcttactcgcccatctcgtctttctctccatctcagcctttatcacacacgccctgatctcgaaccccattccatcctatccctgactttcttcggccagctcatcacatacctagcgtgtagatatcacaatcaggatgagtcgtcttgctcctctcgttatcgataatggtacagttttttctcttctgtcctcgttcatttcttgagcctcgatcgaatcgaatgcagctcgtctgtatgattgatcggtatcaacttatatctcgacttctcgataacttactctccaattgcttctgtcttctatctgatgtaggaaccggttataccaagatggggtttgccggaaactctgagccttcctttacgttccctactatcatcgccactagagaaggaggaggatcgtccagcggtggttcgtcctcagttctcttttctggatacatcttgcaacaaggtccaggctgacggacgtcatttttttccctcttgatttggttgaacatggctgaaaccccgtccctacctctcgatattcgttcaaaccaatccaatgattattcacacgaaattattcctgctctgacagctcgaggacctcctgtggcttccaaaccatctcacttggcttcaaagcgaggaatcgaagatcttgacttctatatcggagacgaggccattgctaactcaaagtaagcttgtttgtttcgtgtatcgattctcttttttgatctattgttgggagtatctcaatgtctcttctttctttcctcttcttcgctttcctcggcttcgcctatttctaatgacgcgtcccttttcactgcagaacttactccttgcacaacccaatcaagcatggaatgatcgacaactgggatcacatggagcgtttttgggagcagagtatcttcaaatatctgagagctgaaccagaagatcatcatgttctacttgtcagtttatctcaccttatttcgaatctttcatcgttgtcatcggcgttaggaaggtgctgagagtatagctgacatttttgacctattatatcaacatttatgtctactgattgatcacactgcatccgcttcgactacgcgtgtaaactttacaaacagacggagcctcctctcaaccctcctgagaatcgagagaatactgccgagatcatgttcgaatcctttaatgttcaggtatgcgctccttctcccattgcaccgaatgattgtctgctcacgtgttactgtgtcttacccctccttctataaaatagggtctctacatcgctgttcaagcggtcttggccttagcagctagttggactcacagtaactctgagcgaactttgactggagttgttatcgattcgggagatggagtgactcgtatgtattcgtttttgctcctttcgaagcggtcaaaaactgatgaccttttgtttgacatacattcatctagataccatccctgttgcggagggatatgttatcggatcatcaatcaagcatgtgcctatcgccggaaaggacatcacatcgttcgtgcagcagctattgagggaccgaggggagaatgccaacatcccgcctgaggatcagatgagagtgtaagtgatttcggttctcgatattattccgtgtgcgagtttggtctatttggtgctaattatcatttgtgtttacacggttgggatcgtgttgaaataacagcgcgcagcgaatcaaggaggattactcgtatgtttgccaggacatggtcaaggagttcaagaagtatgatagcgatccgtacaaatggtttgcccgatatgagggcgaacacagtgtgactggtagggtatgtccttattcttttttcaacgagctgtcaccaaagcgttgggacccacgactaatcaaacatgttctatcctttcaaaattgattgttttcgaacgtgtggggtgtaatctagcaatatggggttgatgttggatgggaacgattccttgctccggaaattttcttcaacccagaaatcatgtcaagcgacttcttgacccccttaccagaggtggttgataatgttatccagacctcgccgatcgatgtgagaaggggtctctacaaggtgcgatttttcttcttatgaaaagatggttctttgggattctgtggtggttgtatcaagacgtgatgtcaactaacattctgcctccaatccgatcctgccggcatgatagaacattgtgctctccggaggatcgaccatgttcaagtacttttctcagagacttaggcaggatctgaaaaaattggtggacaaccgggtggcgagcagtgaattcgcagcgggagggtccatgagggtatgcttcaatctgttaacctcgattgcccactcttctgacgattgacgttgatgattacccctaaaatttctcgttgtgatatagtcatcgggagtagaggtcaacgtgatttcgcattcgaaacaacgttatgccgtctggtatggaggatccatgatggcctccttggtgagttctttcgccttgcaccccttaaaaacaacttgttctcaaaagtcgagtcatgctgatctggccgttttcttatcatctcctgccatccttttcagcccgagttttacacttattgccacaccaaagctgactacgaggagtacggaccgtctatcgtcagacgatacgctatctttggaagtgccgtctgagagaccatcaatcttgttgtttgacaatggacaaatcttccccttctttcttgatcttttcttctctgcctctttttttagtgtcccaacgttttcttgtttgatgattgatgatcccttcttcctatgccatatcagtcattagccggtcttgtagcaaactcatttgttttctatgcgcatatgcaatgttcgtttctgagaaaagtcatgatacatgatacgacgagagaaggtgaaaggcagagaagagtaggtagggttcagaaaaccattaagaggcaactggcgatgacgaactccatggatcctacccaaagggatattccttgtctagatgaatcagctccgttcgttcctgcgttagatccagagctcgaagctgagggagaggtagctcctgaggttttagaggcagagatggatgaggaggaggaagtggtagtagtagatgtggaactttggatgacgataggtggataaattgacggctgagtgattactatcctgtccatatctgtttatcaaggacagatatacagagatcaaataagaaacagagacaacaaggaacataagtctaacatcaacaaatcgactggccgaacggatcagaacagaaagagagggggaagaacgacggaccaaagtaagactgcctcgaaccaccgttgttgactaattttaaccgatgggtgccctgtcccaaatttcctttgaagtaagccaatgttcccaatttctcacacgttttggcaaaaccgccaccacagccggattcgttgttgagtgtctcggcggacgtttcgttgattgttacgctttttcaatcgtatttaatagacccgagaggagagggaaaagaaggatttagaaaagaaaacttgattatcaaaggaggaaacgcaggagatgggaacagacgtgaagaaaccatgatcgttgacttgatctccaaatatatagatcgccgttcctatgtggtagaatttccaatccgtcccgttctgtagtcagcgggatgtgttgcgtgttgtccatcttggaaagaagaagaagaagaagagttgtgtaccgaccttgaaagtcgatgttgaatgacgcgccgtcttgattagtgtaggtcgtagtgtttccccagaaatagggcccggtgttgctcccccaagtgccgttgaagacgatctgagaggatgtttcatccagggtgacattcgttgccgttccactatgagcacgatgggaaaccccgtgaagcagctcagtacatcaatcaatattcagtcgaggtagagatgaacagtaagaacttaccctgctcctgcaaaagcgactgctacttctaccagatctaacagaagctctcctccactttgcccatccaggtctcccaagttttggagagtcaattcgtgtgcgctgtatgatagattgctcgcgccgtatagcaagaaacgatcggtcccgttgacggtgttgtatgctgtgtgattggacacgttaccgtcgagagtgatctgataggaaccgcaggtcggtccagtcgctccccatacgtagagggatgagcctaagtaaaacatggcaaaggacacaagccaagaaagtaggcgaatggaaagatcgaagcatgagacgagcgagcaagcaagcaaacaaacatgttcatacatggtcagcgtgccaagactttattttctttctcctttcctcggtcaaaaagcatttggcgggagagatgaaacgaatggaccagatatttctctccaaacctaagagaacgttgtccactctggacccatccggatacgaaaacagaaagaaagagcgatggaaggcatggaggccgtcgagaaagaactgtgcagaccaacccgtaaagttgaaagcgacgctcgctcctgggacgtttgtcttgtgccaagtcgcctcgtgccaaaccgcgtcggcacctgcttgagaagtatcgttgaaccacccaggattgagttgtgggtttggagttgaccactgagtctgatctgcataactcagcagagaatcaaagtcatcgaccgtcaaatttcctacgagaagagccatgttgtttgatgtatcaaccggatggatgatcaagagataagaaatagaggttagattactcgctccgaatctttctttagggtggccttttggttacttgagctttgctcccagtggcctcggcagaggtgagctggctggatgaagggattcttaactgttcttctctcgagcgtggatgctggatttatggaagatgatgatgtatccaagagatcgacagacgatgagaaaccgaacggaaacagtccttgtaccacagagaacggccaacagagcagagtgtcacacaagaacatcccagagaacatcgcacagaggcaagactggatgatgacgaggctggaaaaggaaaaaaaaatgagaaatcagtaaaaaaaagtctcactcgcacacgagtgatcccgttctttcgttctcttcctctccatcatccatccagtgggaaagccctcgattcagctcttcagcatagagtgttcccttgtccgcccagtcgtctcatacagtatctcttgtcgttatgccgccaaagtcggctcagactccaaagaggaagtcctcttctaacaacgtagcaccaccacccgctactaacaaggctactcccgcttctacttcatcaaccgcaaacagtaaaggatcgcaagccaaatctcctactttctacgtgagtgtccggccttggtttagatggtttttttttggtagtctctgtctctctttctgtttgtgtgactaatatcggatcgtcggtcgttcttacttttcccttttcgtggctcttgaatcttctacgttctctgtttcgatgtgatgtcatcgatagaacggaccaacagaatctaccgcttccaaggcagcggcagccaaaggtgttgtcgtcgaccctaaaaaggctgaagagaaggtcaaggctcatgttaaggcactcaaggtcagtattttatctcaatagatcgtctgtcgctgctgtcctcggctgaggtccttctactcgcctcccgttccatctcttctcctctcgatcaccagggatccgcgcctagcagcttccttggtcgatggctctaccgatccgtcatctcctacactttgctcgccttgttcttctgtcctcccaacgtgtcttcatcaaactccgccatctgttcccccgccacaaagtaccactccatcgttcagccttacgtccaacctcatttggatcatgtccgatcctctgttatctccgccgctcagccttactacgcaccttattcgccctatgtacactctgttcaggccaccgtcgtgccctacgttcagaaggtcatcgacttggctactccccacgtggccgccggtcgaacgcttggcgtgaacaactacaagcgacaccttgcaccgagggttcactacgcccagctcagactttccaacgccatcaggccttacgttcacgagcttcagcttcgatggaagatcttgatccagccctacatcgatctcgctcaccgaaaaatcagcgcgacatacaatgcggtcgagcaggatccaagggtcaagttagtcagaaagcgaacgggagagttgatcgttagtggttgggaaaacggaaagccgttggctatccggggagcccaggctggaaaacaccattggtacaacaccatcattccggtttctcagaagagctttgatgctgggaagaagcatgggtatgcgggaggtgtcgcgtccgccaggtaagacctatctcttgacgcgtcaagctttcactccggccttgatgctaaccgcactcctcgctttcttctctctacctctctcttttcagattcgcctcttttgtcgagcgacatcacgttcgacctcaactcatcaagctcagcaacctctacctgactcgtgtctaccgaccttacctcgccgtttacctggatcctatcatcgacactttgactccctacgtgtccacctcgtacaacctgaccgccactactcttcaccgagctgccgtcgtcgttcagaagaacgttcttaaaactcctcctcctccaccggcgccaacgacgttgttcggaaagatcaaggaggcagttcacccggcccctgtggttgaagagcctgcttctttttttgagcaagcccgggataaggtagagagcgcgttcgagcgggtgtcggacggcgcggcttctatcctgggcgaacaaaccgaggaggtgagagaaagcgtgaacaagttgacgaagaaggagaacgaggaggtccagaagttgaagacgaatgatgaaggcaatgataaagttcaggagacagtcgtggtcgaggcagagaaaacaaaagaacaagagcagccggcggaaccgatcttttcgatcctgcccattgaggttccggagcagaacatagaagaggagttggcggccgttgagagggaagagtcgaccaacgaacaagccgaaacgcatgttgcgtcgaactttatggtatccgctacccacgtccctctttatacccctgaggaagaagccgacgaagaccttgctttcttagccgagttggaggcggccgaagatccatctaccgttattgtaccgacgatcgaggagccggagcttgtgcctttgccagatgagcaagagacggacgaccagagggttgaaagagaggccgagaagaagaaagcgatcaggctcgtcagagaagagatcgagagaaaacataaggattttgaagagaagatcaaaaaagttggagagtttgaggaagacaagttggtgaaaaccgtgagttataaattcaatcataccatcgtcttgacatcgacggctaaacaaaccctgtttatacattcatttcgaaccttacagctgtttgacgtccgatccagagctgtagccgcatttgggccgttgtctgaatcttggattgtcacactcgagaaatctgcttccaagctatccacgtcgttggaaaagtatctcgctcgacccaatctcaagcaagacgatatcaacaacgtatgtttgggcttaattctctcttctttcttctcgtttctgaatgacaatttcctgagcttacctggtcatcgtctatgtctcaaatacaccatcaggctttggagaaggctaaggaacgacttaacgccaaggttgataccgtcggcgagaatgtagtgcagtggttagcagaggtcgaaggaaaggaaaccgaggcggccgatgctgcaggagagaaagttgatgctgtagcttccgaggcggcttctgccttggggatcatctatgcctggctggaggatgtgactcgacacgattggacgcgatatcacaatttgaccagaacggctgaactctggaacgagctgttcgtacaacatgcaacccaggatggtacccacccacttctctcttcttcaaactcgagcatggcctctgtagttcagacgttccgagaatctcttgaggacgtccaaggtggattttccgcccgagttgggatcatcaagacgaatgctatgcttcgcgccgatgcggccgaaaggaaagccaaagggttgaccgaggctgatgagccaacgttctcgggattacccatctgggatatcatcagtggcggaggtgaagcgataggaggagcggcagaggcggtcgcaagctcgggaatcattggaaagagcaaggagcagattgttgaggttctcagagccgctggctcagttctacccgcgggcagttctcaaacagaaacggtcgaggaagaaggcgaaatcgtgaaagaatcagcgggacgtttagcgggtgcgttggggactgttggcgagaccttgtccggtctagcgagcggggtggcgtcaaaagaggccgacaagaaggatgagctgtagaaacgaacaagatgcattgtttctgcgagttgttcttctacaaaacagttgttcttctatataacagtttttatctttccatgtttttttcttttttttcttctccactttgctcacagtgcattcgattattatacatgatgttgcgctcttcgtgtgtgtttgctctcgttcgtcatactatttcagaatcattccagatacaagttggcaatctacgactctttgcttccccgcggctaatttgagatgagcctagtcatatcattcatcatctttaatatcccttgagtcttcctcaccctcttctcttcaacatcacctatcatctgcttttcccgacaatgattcctctcagatccgtcttgctcggcagatcttccttgttgagttcacagagagcttactctgctgcttctcccacggctgcgcttgacaaatcccgatttgtccttgcctacgacgctggttcgttccccaaaggttatctttgctcctccgttcacacagggatcaaaaagaaccctcaagccctcgacctcggtctgttcgtgtccaagtctgcatcccctacctcggcagccgcttgtttcacccgaaatgtgttcaaggcagctcctgtcaatgtcagcagagatgtcctgctcgaccagggaggaagggcaagagctctgatcgtaaactctggttgtgcgaacgctgtgacgggcaaacagggaactgaggatgcgctcgccatggttcgatctgttgatagtctcatcagctcggatgcggagaacgcggtccgagggactttggtggtctctactggtgtgatcggtcaaaatcttccaatgacaaaaatcctgccggccatcccatctcttcatgatagcttatcttcaaaccctgaagcttggatgtctcttgcgaaagcattcatgacgacagatacattccccaagcttcgtactcggactttccagctaggaggtcaagaagttcggctagccggtgtagacaaaggcgcagggatgatccacccctctatgggccctcctcagcccgctaagcctctacacgggacgcttcttgggatgatcgcgaccgatgcggctatctcgcctgccgctcttcagtccgctttgacgttcgcagtagaacgaagtttcaactcgatcactgtcgacggagacatgtcaacgaacgatacggtcgttgctttcgccaacggagcttctggaatgacatctgagattgacgaaagtcaccctgaatacaaagtgttcagagatgaactcactagctttgcggaagaacttgctaaattggtcgtcagagatggagagggtgctactaagtttgttaccatcaccgtcaaggtatgttgttcgtcttcgctctgcgaccctttcgggccaagctgctctattctgacgtccaacttcgacccaaaccaactcgaatagggcgcaccatcgtacgagcaagcgaagacggttgcatcgaccatcgcgacctcttctcttgtcaagacggctttgtacggccaagatgctaactggggtcgaattctctgcgccatgtttgtcctatttctctataaggatctcatttgtgcctctatcttccattcgctgatcattcctcttgtttgatcttcatttgactcatagtggatatgcccctctgggaagcccaaaccccatagaacctacgaagacccgagtatcgttccttccaaccgatggttcttcagaactcgtcctactcgataaaggggaacctgtagagtttagtgaagatagagctagtgagattctgaaggcagaggatctcgaggttgtcgttgaccttggaggagatgcaggatcagcggaggcgaagtactggacttgtgatttcagtcatgtatgtgtttcccttgctcgtttttgtcttctcgtcatgatgattattcaccttcttgcaatttgatcaccggtaaaacacaaacaggaatacgtgaccatcaacggatcggtgagtttgaacaggattcaataaccttttgtccatcttcaaagttaaacccgtgactggcactttgcttactgtcttgttttgttcttggatgatctagtaccgttcatgagctgggccatgattcataaacctcacacgaggttcacgacactcttcgtttttctctattctttctctttgggcttcaactcttctacaaaaccaaagtttgatgttttccttaaatcaacctcgagattgtcatggattattcccaactgtttgtgtcactcctcgccgccttttcgttagaacgcatcgtctgttcaggatgaacctatctgattcatattcgctgttggagaaaaccacaccaagacgtggtttgagagttcggcaccatttgattcatatcatcgataaaagaagactccttcctccccataacccctcttcccgtttcaatccttttcattcgtgtgaatgaaggaaccccaaaagagagtaacacacatgatttgctcctttgtgtcggctcgtgctcccttctttcacatgggaggatgtttatgcctcaaggccagacgacgattaatatttgactctaagcccagctcatcttcccatccggacccacagaggccgtcattccgtttccgactttccctcccttcttgtaaagctccgcgatccgggctctacagtcagatgagttcagaagagaccatcagtctcagactccatatcctcagtcggttttcaaagtgagcacgcttacttttccagggtcttcctgtgggcagccaaagtctttagccgttcctcctcagcagcttgcttgagttctttctgggccgcagccctgttcgcgttctgtctggccttcttctcagcagacgcagagggcgacgaaagcgcggcgaatgatgatttgtgggcgatagagataggagagttgaaggaggccgcttgaggctctacacgtatacgtccatatcggatgagaagattagatccaaagttagcatccagttcgtctcctcatctttgatgcgcacgagttcaaacaagacatacttcgctttgacttgatcgggatcttctcccacttctcctcctccacggctggctcatcctcccagacatttgtagacttgtaagactcttgttccggctgcttcgtctgctcggatgactctttttcttgcgcctcctcggagtcctccgactcggattcagactcatacgttggctccgcaggcttgggggcgatcttcatcacccgggcaggcttctgcagaggaggaagcatgctgattgaattcaaatcaatcaagatgagttgaataaaggcaaacagatgttgagaattgtcagatacgcgctcgtttcttgtgatcaaaacgtatgagtcggaagagagatggatcaggaaaagacgtactcttccaccccggtgacggccgtctttgcgtttcttcgatcttccaactgttgcgcaagatggtcacccgacccaggagaaggaaccttctttcctgccttcttgttcttcttttttccggaagaaggatcggcgatatccgcgaacgagggagttgacgagctagaggcgtcgattggaggaggagataccgaggagttcgtagaggagatggcggctttagcttctgtctcgtttgaagaaccggcctgactggatttggccgatgcttttttgttcttctttcttgacttttgctttgtactcgccgacgaagaaagcgatgcagaagaagaagcagaagaggcatcggttttgttgggtttggtgctggtgtcgtttgagacgggcgaggtgaccttccagagcagataccctgctggcaacatacacaaaaacatgagaagcgacgacatatccggcatcacagacgacatgtttctccaacaaagactgagcagagaagatggcccagagaaagagatccaaagagaacggagagatgatggtttgctgttgatgggaaagagagaaacagagagatcggccgtatggcgctcgctggtgattacgtaatgttgtcaactggttacaagacgtggttacagttatacttacgtaagctctctcctcaatcgtcatctctttctctccgccttgctctttccatcaactacagcgacctcgacaaccacgatgatgagtgcttcagactcggaagatgataacccaccgtgactacagtcttgcgtttggtctgctgtctgtgactattcttgatgctgacgttttgagatttcgcttgtttaaacagagttctcgtaggatccaaagttccgttgacgttgcttaccggatacctcggagctggtaagagcaccctgatccagtatgtcgtttcgtttactcgtctgctccgtcgtggatctttgctgaacgttactcggcatacacctcttgacatcatcttctagacacattctctccgccgatcatgggcttcgtatagccgtaatcatgaacgagttctcggacactgccgacatcgaatctcgttcaatttccattcagtctgccacaggcgcgaccagctctcctttgctcactttaccgaacggctgcctttgttgtgccgctagagacgacggatttgcagccattcaagagatggttgcccaaagaggaagctttgattatattctgctggagaccactggacttgctgatccgggaccaattgctgaaagtttttggagaaacgaggaatgggatgcagacgtcaggctggacggggtcgtttgcgtggtggacgctatgtggggactcaaggtaagacaacacgtcagattcaattcaaaattcaggattgtgtccaattggcttaccagtcttccgcgttgttagcaacaacttgagaagccagaggtcgagggcgaagccaccgaatgggagaagtatggccttgtgttacatctcgattcgagcttccggataaagttttgctcgaacatgtacttatcattgtctttcatcaaaacgtattcttagacagatcgcatgcgccgatgttatcttgctcaacaaagtggctgatgtacctttgtctcaagtggaagaagtcgaggaagcaatcaggtatcactgggtttttttttatctctttacttataattcatccaacatacgtcccgaaacttgagctcacactgttttctattctcggtctcgttcgttttgccaacaaaggcgtattaatttaacagctcagatccacagaacgacccgctcgattctcccactttctaacattctcgatctcaaagcctactctcctaaccccaacgaacaacccgtcgttccctccttcctctcgtcccgctcggaccccacatcggagtctcgtgcccatgctcatcctcatccttcagcgcatactcattcgtctcagattgcctcgacggtgatccctcttccggccctgtcaatcgaacagatagattcggtgaaacgatggattcaatccttactctgggacccagaatcacttcagcaatcggaatcatctccaccggaggttcttcgtttgaagggtatcttctggacggacgcggagagagagccgcaggggtgggtgcttcaaggtgtcagaggagtgtatgagttggaggaaattacgacaggtgaaagagggaaaggagaaggaaagatcgttgtcatcggaagatacgttgatctgttaggtgacagcttgaaggaagtcctttggaaggaagactcctgaaattagatgaaacgctgtgtactaccaagaagtaaaaaagctgtaaacgatcgagtagcatattaaaatcaagttatctaatagtcttatcaggtggttctcttgaaagagacaagctagatcaatattttacaccccgaacgtcatccaacaccttgcccacggcaaacatcaacctttctccacccc

SEQ ID NO: 1976 - DNA, 1047 bp, Xanthophyllomyces dendrorhous
ccagccaccagcccaacccccaccggccacccatcctcgcccctctgtcttgctggaacactcattgccgggaacccagtaagcgaagctggaacagtcaacacatcctgtgcatacccagatgatgacgaagtgtttagaccgccgggagaaaggacaggagcggtcgagatcgaggaagtttggaggatgaggtcaatgcctgagggattggacgaatcagcatgaaaggcggatggggttcggaacagtgataggtaagtctgtgtgagacgcgcccgaagctggagcgacggaaggtagaacgaattgtatgctctgatcgggagtcaagaagaaatgtcatcgggttgtttcagtcaaacagtcacaaagtagacaaaaggcgagggatatagagagacctactcggcagaaagtgaatacgccccgacgataatcctcttcttgacttccggtcctaatagtgctcgcgctttctccaaaccttcctgatagctctcgtcggcgttcggatcatcaaaacggtcttctcctctcgcaccgtatctcaaaccatcgaatcgagcgagattactccccgcttcggcagtggcgatggtgtagtacgctgagagcgcgtaaggagcgagaggtgtagaaaccgagtgtacagtggcacccagagatctgagcgctcggatcgtctctcggaaaggagccagagtatcttgtgaaagctcagtgggaaaagcctcctgagatgtccggcaggatcggtgtgtcgaaaaagaaaagagagtgggtgcagaaagagatacagaaaaaaactcagcttccgtgtttttcagtgtgtgtgtgccagctagcaaaaaaaactcaacgaacgataggtatcccaatacgaagaccagccaattcaccattcctcagaccagggatgcggcatattgactcttctgaaatctccatcattcgagaacgaaccgactcagaaacacacgtcgagtctttcgagtctggctgagagatgacgtctaaagttgttttcacgagataggaaggaga

SEQ ID NO: 1977 - DNA, 5525 bp, Xanthophyllomyces dendrorhous
agataggaaggagaagagatgacgaatttaagtttagtattgaatagtaaccaggagaacaagaagcaaagaagatcagagtcaatgaattcaggtcgatacgacatgattatctgaggatcaaattgggtagacacataccaaacactctctgggccgaagtcacatcgtttgctaaaacgcctacggtatctaatgtgtcagcatacgagatcaagccccatcttgattaagcaagtatgatccgcatagatgagtggtagaagtggtttttgacatgaacacgatcaggaaaaagccttggaaataggtttatgacagtcttgaaagtgagaatggactaaccggctaacgagtccgtacgaaggttttaaaccaacaatcccacaatatgaggcaggcagcctgatcgagccccccgtgtccgttcccaatgctctatattccgtttatcccaacacaatccaatgttcgtcagcatactattctagaagctcaagcagagcgaaaagatcttctcacgcccaagccaaaccaccactaacggccgctgcgctccctcctgaacttcctccacatgatctcttctctctccttctccacttatccgatccaatctcatccgttccttcgacagtgaacggattgatgggtatattcccgatggagctatgaagattggtattgaacgatcccatgccaaattcatcctgagacgccttccccatcaaaacggcaccagcttgagaaagaagggttgtcgcggtggatgaataaggcgaagagaatcctagagagcgtcggtgtgtcgttaatcatccgaagaagcaacagagcaaacacatccttgtcaatagagagaagaagaagagcaccgctgagagaggacgacaagaaagagagttttaagttgtattcaccttgaagtactcttgaacatgccgctgatggcatacccttgatgcagaatgcatctttgatagctattggtagaccttctagtggaaggtctttcttcgaggaatcacctttcgatgtcgagcttgtcggatcgtccgctacaatatgtacagaacgaagcaagatcaaatcgcaatttattaatatgtttgatcttttcggtccttcaaggatgcaaaaccattgatttaacgtggaaatacaggtaaagactctctgacgtttgaagaacaagattatatacgtttcaaagtcgaaggcaaaaaagaaaaagaaaagatgaagagtcgattgaaagaaggcgtgaacgaacatgttggtggtactaaatgaacatatgcatgtatcccgccttctccagaatccctctcaagaatatacttgtaagcctcttgagcagtgctcggtacggtcacaagagttctcacagacggacgagacaagttgagacaacgggatggtcttgacttgagcatagtgtgttggtcgtcaagatgatcaacaaattcatttgtgggctgagcaacaagttttgtgtgaagcggccatctccggcgcatcattgaaatgccactcagcatctatctgggaaacgcgaaccgtttgagagcaagctattgagatacatgcataagattctattcatgatcatcgagaagcaagaaaagaaagagatacatgacgagaaagaagacagcacagctgatcttcaaacttatgagaacaacaggcaaagtggaagagatttatgatagagacgatgtatatcaagaactcgcccacgagcctgaaatctatctatttcgagaacgcaaacggagcatgtgttgacgacgagagaaaaggtgggtatcgcaagacaagacaaggaagattgaaacataggaagaaaaaagaattcactcgagaccgggagtgattcttcaggtagctaacaaatgtgatgagagcataaacagatcccctcaaaagagaaaagtgaagaagaaaaatggaaaagagagaggagcggcatgaaagagaaagcacctgctcattgacaaactagcagacagccaagttctgaatcgagcccatgctgtaaccattctttccctggaggaatccgttggtgaagctgtatagatagtcaaggttgttctggcatcggcagcacgaagaccatcgagcagcagtggcgctagaataggtcaacccgctgtaccatccgttgtaggtaccgatagcgagcaagacgttcccaccgtttccgttgagcgtgctggcaaagtagctgacactggtatgaatgttgtaccaaggatcctggcagtttccgccgggtgcgttggcgcacttgtctttggagatttgcatcaagccctgctctccgccctgtccaaccactccgggctgacaagtagactcctgcatagcaaaggctgcaatcatgatgggaggaatattgaattcctcaccaacgctgtacatgatgtccacgtaaggagcacagggagcaaagacagaaccagattgaccaatggctgtcttgaggtcgacagtcttgagctctccgacagcgacgactgtttgagatcattcacaagggatacttagcttctgaaccatgcactcaaaacggtctcaacaaaccatgtgacttacaaggaggggtccatccagctccgttaacaccacaattgagccattcctagtttgtcaaggcagacatccgagcaagatcagaacatgatatctcgttagttggtcgtcattcgagacttgaactctcgaatcggtggctcacctgggatccattggggctatcttcggtagcacccgaccagccgcacgtcaagtcattgatgttcaagatgttcccggacccgccgatagaaacagaaacagagacttgagctggggcttgccaggctgaggtagtggtggcagcgctgcgcacatgatgtttacataacaaaacaaaagtcaatcgagacgaaaacgacaggtgaaagggaggccggaaggattgatcggtgagatacttacgccctccaagctccggacgaagttgaaggctgctcttgccagacggaagtcgtcgaagcctcctgccaagcggaggaagtggtggtggcagaagcctcttgccagacagaagaggtggccgtgggcttagcgatagcgttcacggcagggatcgaggtttgcgcctgggcctgggtttgggtggaggacggggtttcactatatgagaaaacagtgaagccattgatgatgtgaccatcatacgaggatcaatgggtttcccgaggatacgcaaagaacaagtccaaacaacatcagtgactgatcgtgtgaacaacaaacttgtttaaaacacaggggtgtacccgaaaacacaggcaccagcccgccacgccaagccgagacgaccaacactcttcctctcacttcacaccaaaccggaactagcatatctagatagattcgagaaggaataccaaagaaactcacacaaaggcactgctgctgctgctgctgttatcgttgctgttactgctaatcttggtcttgcatctgccgccgtctcgctttcggatagacttgggggtagcgaggttttcctccaagattctagcttgatgagcctcaaagccggccttccgggcgacgttcgccaacaccttgttatgattcagatggatagaagatccgtggctgccagcagccgacacaagcgaggtggtagagagagaaagagcgagagcaaaaaggacggtagaagggtaaaccatgatggatggatgcgtgagggaaataaggtcttttgccttcctatttcttgcttttctatgaggaactgaaacgagcgagcgcggctgccgagcggtgggaggaaaggggaacgacaaggggatatgcaaggaacagggaaggggatgatgggagagggcaggaagaccaagggcaagaggagaaaaagaaaacaacaacgactcggaagagatgagagtgaactgaaagctggaaggagaagaaaatgggaaatgttgtccccgccaagaaattaagccttggcatggtgagagtaaccctaaccgatgatggttgaaacatggcctttctggactgggatattctcagaccacagacttccaacactcattgggttgggtctgcgttcgtcgatggagcagtatcagcttcagtgtcagcagtcagagcagcagaagcggtagtcatatcagacgcactcatgggtttcttcgctctcccctttctatcacacaggaggatggcgcgtgttctttcacagtgttctcatactactgcgttcttctctataggaaacaacttgcctttttcttttctttcttcctttccccccctctttcgatcattccctttgatgtcgtagaagagcaaactcatcagatcgtcgtgtcataatcaaccccttctcttcctttacttctcaaccagcctctgtgtttcttgtgatatctccgactttcttctctcggtcgcatctcttaaccaatcaactccttcttctgctttatttcctagaactctcagttttcccttaagcgtatcctcagtcgattgccaatgatcactctttgttttcgtcatgagagaacgcgcgcgtacaagcgaatcttctggctgttgagaagtcgaagtcgtattcgagcccgtacttgatatcgaatgcaggcttgctagcgtcgatgatcgcctaagtggaggaggtggaagaacccttgaggtagtttctggagattctgggcgagcggctttaagtgtgggtgatattgatctgagtggcttgattccatacggggcagatgagccgctgaccttggacgttcgcccactgtttttaggtcccgaggtcgctatggctgacgacgatgtagacgacgacgatgacgacatttgggaaggcgcaggtggaggcggaggtttcatcaacgcctggaatgacgagatcgaagaccgaggcagatgcttcgaatgataatggtgataatgatgaccacctttcgagctggattctctgttcaacccggtatgcgcgcttactgtagcccatttgcttcctccctcactctctctctgcccgagccctgcggtcatgccatctctagatctcgaccggtgaatttctccacgagacatgctcgacgacccgataacttctaccctacgctctcgctcggccttcgtctgctccttcttacgtgcatcctcggctgcgagaaggctttgctgaatgagtgtagtcgtgtggaacccagtagagctactaatcaagctcgatggccgagtctgcagtttggacggtttcgctgggacctttggcccacttgaccttgtctctctcggaatcgagaccttctgaccggtcggagacaggagaggctctgattcaatagccgatcgagcgacaagcggtgatgaggaccaaggaggtaacaatgactctcgcggggggagaggcggggccgagtggggtttattgacaaggccgggacgaggaggaagcggaggagacacgatggagagtatcggccggt

SEQ ID NO: 1978 - DNA, 26528 bp, Xanthophyllomyces dendrorhous
tctgggacctcaccgaaaactcaggtggcggaagcatagaagctgaatgaagccttgctcgaaaaggattcgatgaagacaccgtaggcataccggtcacatttgaaacagaggtatcatctatcagcacaagacttgaattcggtgaagccacttgtggagggtccagatcgttgagcaacagctcgacttttgcctgtccgtcatcctcagtaaaactttctgcagacgatccgtcgtcgctcatcggggttttgtatcgcatacgatcaaatccagaccgacggccttcatcagagtcttcagatgatgacgacgaggatctggaagaagcgattaacggaggggacaacggagaagcagatgacagatgtatcaattgctcggttgtcttacgaacagtctccaagctggaattttcagaaacaaccctagagggtctctgcggcggtggtagtggtggaggcggaggtgggaggaaaactgaagcagtcggaagatccgagacagaagatgaggtagaccttcttctgacgaatagactaggcttggcataaatcgaaggaaacgccatgggagaggtagctttaccctcggtagtcgacggtagcgttcgagtagatactgaagtttttcgagcttggtgttgaggaggtggaggaagtttcgaaagattgttgatagagaaacgagagcttgagatggacgatggagacgagaccaacgagcctacagaagactgagaaggcaccgagggaggggtggctggggtttgattcaagatatgaaagcaagatgtactttcaacgtctggaaaactagagaagacttgactgcgaacagtatgaggaactgaccctgcctgaaaatcaagctttgaccctctgaaccaaggtgcttcccacctaaagcgtgccaagccaaccggaggaccacaaacacctcttcgctacttaacgggctgagcgatctcagatgactttgagaaatagaatgtctgggctgtagagaccgatgagctggatgaaagatggccaggatctagaaccaaggaaaaaaaaagataaaaggcacagatgatgagatctccacagccccaagcatcatcaacagcagatcaacagaaggaatggaaacagaagaacatgcttgcctcctcccaatgagactcttgtagcgagatagattccaacaagaatcttcctacatcgtccactctgatatcacgacaggcgaggtcatctttgtatccttcattttggtcggtggccttagaaattcctgcagggagacgaagatcatgaacccatgacaaaaaggttggatactcctctggcgagagctatcagaatgagaagatgttaaggcctgttcaacgagacagtttagagagaagacacatgatgatacactcacagctgaggaatgtagaaacactggacgattcggatacatcgatatgctacgattctactgctttaagcatggtgagagtaatctcaaccgatggcagtcgatacatggtccttttggacttgggtgccctgagaccacaaaccacctagatccccatgggttatgggctacgggtctaatctgccctgacgacgagcagtgtcagtctcggtgtcagcctcagtgtcaacttcagcctcagcagccagcgcagtagtggcagtgtcaaacaccagcatcctcgctccctctttcttatctaatcaagaattacccctgtcgatccgtcgtagcgctggctggtcgctcactcactcgctcaacgtcttgtttgaacgaggtggcaaatctgtctggagaacatcacacatacatatatagtcacatatatatatgcatactgggtttggtgttgacatccacgatccacaccctcgctcaagtcaccatcatgccagtgaccccattcgcttcttcggtatcgacccctcgatctgccatttcaaaagctagtgtcgatcgcgatacacatccgtcctctgatcgtttgacggctgattctcgcctacgtcgtccgtttcagaccaagacaaacatcccaagctccggagcagctcctcggctttctactgtttctatcaaatcggtcagacgcgaacgtcggccgagagcctcatcagtcgtcaggaacggtgtcttggcaaccgagatgctgcaaatcgcccgagccaatgttcagtccagccagacgagaagatcgagtgagaggagtgagacgctaaagtccatgtcagtaaatggagagagaaacgctaacttggccagatggacgagaagtgttgagccagagatgaatgggacggatgcgatcaggagacagcagtcatctagcttgctactgtctagcccgatagaacgaaagatcgcgaaaccagttttgcacctagatgggttcgctgaagagttcgagaacgatcagttcggatttgggcaagtgcattaatttcttctctcccttctttgtgtgcgatgtattgcttacggcagaaagaatcttcttgggctgacgatcgataggttggcagaacatttgttcaagtgtaagtgtatcttcctgtcattagttgccccgagggatatatgcactcaacaatagactctcatctttgtccgtattctctcaaagcacaacctgccaataaacccatacgctcgtccggctcgaacccaagcgttatagacgatcaggccttaatccttgatcttccttctacaccgtccagtcaggcgagtccgccggaagacccgctttccgatccagaagttatccaaaagattgcggagagcagtcggaagcgaagaccgtcctctgggagggtcaagactccgatttcaaaacgagtcagacgaggtggggaaagtacggtagctagtaaagaggtcgaggctgtctcaaacgatcatttacagaaggaggctagtgaagagccgtcaagtttcaagacggacgatactaggcttttgaaagttcaaggcccagataatgggtcagaagaaggagacatcatcattataccgagacgcagaccaaagcctcggacagttccaactagggcttcagctcgcctggcgtcaggccatcaggtgatcgtaggggagacagagattgtggaagattccgatcggacacccacacgaccgaagcatcgtgctcgagtgaaggctaccaatcaggcgccctcgtcgcggcttctgtccagatcaagtctggatccggaagcccgtactacgggtgaaaaagctcagagtgttcagagcttagattctgatgatctgtatagttaatagtatggtgagcatcgtccagtcatcatgactgccgggtcctcgaatgaaatatggataaccctaacgtcggtgatatccgcttggatgaacggacggcgttgtaagcctagcatacactgtcgtcatttgtggctagtatcagatgcacgatatcaccatcttctcgttcgagaacctaccgggtggttcttctgaccgtgcctaccgggcgggttctctttatcctttcttgatcctgtcgtttaatgttatccttgggtgttgagatcagggtcttccttatcttctttccttttttaccttctctttgtcgtttcgacaaacatcccttcttcggaacactcttgccattgccagttgcctcactccgcgctatatctgcacattatatttcatacatacacattataactgctgacaagctatcatggactaccctctatcaatcaacgaggtcaatgctgtcacgacatcctcgacgatgacactggaccagcttcctttcgtcgtaagctttcatttccgggatagagttgatatcgaagctgtcgttggcaaggacacgttctaacctagtatctcggtttgatgtctgggttgataaaatgtataggtcctggaccgtttgatcagcgtgattgatctctcatcccaggcctcgggttcaagttcaagttcagaccctaacggcaagaaccgggagagtttgtcatatcggcgaccgagaaaggtgtcgaagagcatttctgaactagccatgacgtcccggacattcgcttctcttacttcgttcgttgtccatcttttctctttgttcctgtcgggatcgaatgaacagaccagttgaggtgctgaaggctcctttctcttgttcggatcgtttggttcagtcgactaagattccggtcgatctcgttgtgctcatgtccacacggaaagaagttttggacctggctgatggatcatcaggaggtatggggtatgatccaagagatcaccgtgacagctggctgtgatgttcgtcttgctttcctacgaagtgatcttgtaccgaggaccgcaaatctaacatgaatcttgtggtttactttcctttgtggaatactctcattttataggtcaccagccttgttggtcctcaggtagaaatgttctttggagcattaccttcgctcgaactggtttactacgagccattcgaacgtctgtctgactggctggctgggatgatctcccagctaccatccttacagagcgttgtgctcattaacagcggcatcacttccagtcctcagctagggctgtttcaaggtctcgagcagctcactatctatcccgggtttgtctcaccttggtccgagacgacgtaccggatcgaacagagtcagccggccgttgtacttgcctctgccggtagacgggaagaagaagagtcggtagagaccgaagagactactgggggtacactcgtgaagaggaccccagaaagaaggactctggactctgatgcgatcaaccgagctttggccaagagcgcgcgcactctgaagctgcttcatctgatctgtccgagggacgcacctaggttgacagctgagacgatatttacggatccttctctgcctacaaaaacggcactgaagcttccaatgttagaaaggttatttatccgtccggctgatctatcgaccgatctatttccggatcttctactaggttgtcctcgattaagactgttatcgatcacgcacatgccaatgggtccgaaatcgacgttgtgtatcccagaaaacagtctgccgaagctcgaggtgctgaacttgatcgtcccagaggattcatatacagattcacctggtttgtacgcctcagccgtcaatttgatcaagggaaagacccagctctggaagctcgaattggatgtgccgtttggtctgatggaacgattgttccagcggctggaagtgccgaacggagtgaaggaactgacaatcgggcagtgggtggatcaaaagttattgggtctgattgatgagaagtttccaggattggaacgattgacgtttgagagtggacgttggggtctggacatggaggatagtgtgagtgattcttttttgactcttgaccgagctgtgccctgcgcgcatttgtgtatgtatgttggtgtctgtgaaatttgttctgtgagcgttgacgtgttggtgttcttgatatcatctagatccacctacctttataccttgcccacctacgctcgctccgatcacttcacctggactttccgctctctccgaccgtacttcctctggcaaccatcaactttttcgacgaggccgcaccattcttccacatcttaccgttgatcaagtcgacgtccgaagagatccaaaaacagattctcccgaggatggttccggttgtgcttggtctgtttgagaactcggctgagctagaagagatcgtgtggtcgttcggaaacacggactggttctggcgtatgggaacgtatgatcagttggagatggacttggggttctgtctgggtagaggcaggagggtgatgggaggttcggccatcaagacaaaaaccgaatgggcagatggtatacgtcattaattgaacgctgtttgtataagcttgctctgatggccgtatgaacgattgtatatatgtgctctctgtctgaggtcgagcggaccgaatcgatcgtcatcatgaaacacgatctgcaagtgcaaaattaagggcgaaggaacagaatcgacagggcagatagaattttggagggaacgataatcaaatactcggataaactcgatcgaccgtgttctccgagacagatccctgatcgtccctcgctttcacaatctcgcgctgggcttctcctgtccactctctcctcgcagacctcacatgttccgggtacctactattcggaacttttctgccgacgatgcctgttcccggtgcctgaacgctgcttctcgagtgctgccggccaacaaattcacgctcttcttcggcgttcgcctgcctgtcccgatccgaccataagaacatgtgtccgcgatcgcgaaggcaccccggatcatccattcatttccgctcggagaggctggtattccaatgtgtaaaatgttctgtagtttccatttgtagtgagcatcgtccaaattcctgatctcaacactgagagtttgtttatctggttctcctgttgtctttttctctgtcttcttccctatttattccttttatctgtgtgtgggtgggtgtgtctctctctctcgcgccctcctatctacttctctctctgtgtatcttttccgttctgactctgcactgacctggggattcaatgctttgtgtgcttcgctctattttgtgcacgcgcttgcactctctttctctgccttcctcaccgtcccttcctcaaccttgtttgtggtctagagctcttcttttttatctgccttctccaactttcttctggttcctggcctcaagtcaatcatccctttgacccgagatgccctctataaaccaagagttttttttttggttcatcacctttctttcctcttcttttgtcacccacttttcgatttggaactacggacttgggcaaccttccgttttggtgctctcactctcactttccgtcttcagcatatcggaaaatcctgatgcgctcgtcttcgactatgtcgatcctcatcgtcacttccgtctgcttattcttcatcgtctggggttcgttctttcagcgacagagttcaccacaggcggctacgttcagagatgaactcgttcagaacatgaacgaacgcggactcggttcaacctggagtagtatctatgtgatcaacatggcctctcgtacaggtgagctctcatcttacctcgtttgatagtccttccgctctcatacagatcgtttgcgatatacagatcgtagggagcacatggaacttgttgcgcaagccctacaactcaactttacctacgtcgaggccgtcctaaaagattcacccgcggtcgacttcataatggaacgactctgggaagagttcgtcctgcaagatcgaatcaggaacggcgaaacatcagcaatcagggaaagtgagcacccgaaattgtacggggagcagacttggtgaggtttttttgtccaaagaaaaaaagttacctttcttttcatctgaaacgtcctctacgtgaatgtgcgcatttttcctttcttgcgctccgcgaacatcaccacaggagagaacatgttctttcatcgtttgacaagcccaacaccgtattccctctgaacggtacatacgaaaacatatacttcgactttcccgcctggccaccccgtgagttggtctctctccctctctttttcgtcatcgtttccagacaatttcataattgaatggggttggaatctttctcctgtttctggaccacagaagcaccgctcgcttgctatctctcacatctgaagacttggaacctcgccctccaaaacgatgacgacagtgtcctcatcctcgtaagtgaccatgcctcgttgcgcttatttctttgatgtcttcatcgacgctcacccgaacgatcacctgataaacccacaggaggatgacattgatgccgaattttcattggtcaatcgatggcaggaaatgacccgctcactagccgatacggaggacggttgggatatcgtgtaagtctttcaaacaaagtcaaccccgtaaagagccgtgcatctcactacctgatgatcgctttcttcttgcttgccttgcagctacctcggctggattcttggagaagaaagagttcacaaacccacttttcaccctggtcttcgcaagtccaaccgaccgatgggcacccatgcgtactctctcagcagaaaaggtctccgccgattgaatggccatgtccacaacttgcctgacctgttcaccagcccgatcgaccatgatctccccacaaagtacatcagaataaacgatagtatgggcgcactacagagttattcggctactccgccaattatcattccttttgtcgctctaggatcggatattggaggagatgcttccgaaagatggggaggaatgtcagtacttgcctatatagtctcttccagatagcctgatgtcttattctgcctctttctctgttcttctcctttttccttcattcttcagtctggccgactcgacagtcgaaaggatacgagcattccaaggtcacccggttcctaagaaggatccaaagctcatttgggaaatgtggagtacggaagatatgtgatctgaattccgttcttatagactcatctttccccttcttccagcttttctttcctcttcgatcaaatagatttctccttcatttagtatcaattcttccatcttcttctgtagagctcctctcccagtcatacacactgtagagatagcatagctcaatcttgatctcgattaacagactgtttgtatctatgtcttgttgatgaacccaatttctctctctttctgttcttattgacttggtcacatgatatgatgcggtgatcttcaatgaaagaacaataaatcatctcaaccgcgcataaagggatgagttgtaagatcgttgtgaagcgttgagttccagttcgcacttcgtactcttagggccgaacggatttcggtctgacacgcgtcgacggtagtaatgaaggtaatgatttcgggtgtgaccgaccggaaagacgcgtcgtaaacttggtcgtttacttcttctctctctccttcatccacttgttcagtcacttactggctcacgcacgccctcaagcacccacccagcagctcatcaggagcacaaaggaccgatatggaattcttcaagacgacgaccaccgtgaccgatgacccgacagaattccgtcaaaccgaaattcaagtcctagacggtcagtttccaactcgtacctcgtcctctcacatgtctctgtcgatgtctgttctatccctctcttttccagatccaattctgacgcgtcatttatcttgcttctttggggatcagcatcgccttagcctgtcttcgttgtccgatatgtcgagaattttatgtcaatccggtgatcactacttgtttccattcgttctgtagtcgggttcgtatttatccgttcattcaatctaattgatcgggatgatagagaacagtctttgacacaagggtctatcaacttacatctgggttggaaaacttctgtattcctactctttctttcttttcaaaaaacgattaaaaaaactatactcaaaaacgatcatcgagttccgatagtgtatcagagaagcgatcgatactgatgtaagagatcgtcgttcatgtcccatatgtggagagaaaatctcgagcgaggggaatcttcggatgaataccgccttggaggttagtgtggacgcttataagaatgctcggtaagtcagatctatcgtcccttctttgtcttctctcctttttagggggttttcttgtactggctgttgactaaaagcacacgcgcacgcgcaacggctacctggattggttcggtttcatgaatacagtcccttgattctatcgttatcgaaacgtccggaacgtacggcatcttcaaataatagctcagaccctgactcgcgctcgacaaaacggaaacgaaacatagaagttatcgacctgtctgacgatgaagtcgaggaaaagggagattctggagttgccaaatcagagctaagcctcggaaagcagggctctattgggggaacagaaggatcaagtgtccctctggtttcatgcccaatctgtcaaaaagatatcccagagctcacaagtcagtccactgccgatctctcgtctctttcttctctgaatgtgtatggccctttactcaagtgattgtttccttgtcttattcttatatttgcacttgaagtcaacgaacacatcgactctctctgcaaaaacttcttggagccgatgacatcctccagaaatctaacggttccgtctgcgaacaacaacaacaacaacaacaacaacaacaataacaataataataaaatatcaggttcaagatcagaagatcgaccaagcggatctctcaatctgggatctaggtcccgaaggtacgtttcgttcgaatgttcatatctgattgagatgaagtgaaccgtatcggcggcctctgtttctgttggctgtgaacgctaaacggagtgtctctcattctgatcagtccaactggaagttcgagtgcacctcctgcaaagaggctggcaaagctgaattatcatacgatgactgagaaacaattacgtacgctcctggcggtaagtccttgttcgctcttttgtctcaatagaccaaaaccgtctcatgatctttacctttctgccttccttttattgtttcctttaaaggaacactcactcccaacggtcggaacgaaaccagtgatcactgccagacatcaacgttgggtccttcttttcaacgccaatctagatggcgctcatccccggaagacttctgtgcgcaaaattcttgtttactcgacttcttcagcacgatgcccgtctttgccgaacctttcgttctcacagtcttgcccttctttttctcctttttactcttctttctttgtttctttgtttctttccctctcataggatctcaggactgatttgaggaaatgggaagaagcaagagaacgagaatccaaagctaaagaaagaaaagagaaagcaggacctgttgatgatgatgcctatcaggttcgtcaacatatctcttcttcgctcttcgttctcttccctaatctcttttattgaattgaccttctgttttaatattttcttgaaaaaaaaatgacgcttggcctgtgcgacaggaacttcacaagtcggatttcaaagctttggaagaagaaatacgggtgagaatgaaggcggcaaaagagagaagagagaaggagaacgcggatactatctcagaatgaatatgtgtcttttcaagagtgacccacgcaatgccactggacatgacgcgtttgtgaagactttcatcttactgtgtcttgttatgtattgttgataaattatatatcgatcaagaatcattcagaatcaagcagcagtagtcgtaccctctgcaccttctcgcactgcctgaagagacctcttgagcgactctcgaagcttcgtcaccatggcctgttcgtccttgtcaggtgcaggctgaaggaagatagacccatcgattagttcattcatcacaaaccccagcgttgcacgaacaatggtcaaaagccacattccggggcattcaaggtatcgaacgtgagaaagaaagagagagcatacaatttgatcaagtaagtactcaatctcatcaatcgtcaatacgataggtgttctatatattccaagataatatccaaaagtttcagtcggcagagaggtacgaactaggtcagatgatcaggtgatggacaaccaacgatgaaggcgatgatgatgatgatgatagtgtttgatacaagatcgaacgaccaaaagagccttctcctcaaggagagagaccagtcaccgccaaatgagacgtgttaatggcttagaataaaggacataccggttcatgttttggcttggaaagatgtaaactcgtgagagaggcaagctcgacgtgaaaagggaaggagatgcggaagattcgggagttgcagaccaaatgtcttctttggaataagcaaatgacgttcgcacaggagccaacccttatcatcctacaatgcaagaggagaccacaagatcaagacaaagacgacgtggcattatatctggaatgtagcccgagggtatagtgtaccgtcatgatgatgatggtggtaatgataaagaggttgaaaaaagagaacgtatagagtggagactgcatcacattaacgaggggaagaaacatgtactataactaacggtcctcacagatgggcagagagggtaaatcggaacattgctcaacaaggagagtaagcgcagaagctagagatagaaatctatgctgctttcactggccaaaggtgtgaactgatttggaatgtcgaagcataggagccttgaaagaaaccgcactgggtgctcttctcagatccgttgcctgcctgtccctcaaagatctaggagcgtcatcactcagatctgtctgagacgtctctgttcggtgtaatcctggtcgaccttggagaaatgaggggaactcctcctgaggagaaggggtcgagctccgggtcgctgtggtagcagcccgtcggagggccggactggcaggcgtggtcagctctctgagcgcagagttcctagtttccagctgacgaatcttgttttgcacagaaggtgaagacgcttgcttgtgaagtgtcttcgatcgagaaggcagcgcgtcaaggtcgacaggaatgaatagatgatcgtccattgaaggaacaggtgggatttcgatcggtcgttcaactgacttatctatcgagaacgtctgggacaaatgcttcgccgtccacgcaagcttgacaggcgcggacggatgaagaatggcgatgtcttcgtttgtcatccggtcttgagaaaccagcggaggcgtggtttcagaaacagagcccgaatcggaggaagagcttgccaaaccaggcaggtcattcatcaagtcaccaccggcgttctggacggggaacgcagactggcttctcctagaagcaacggcaggactcaatttgtaagatctactgctcggaacgaaacccgtccgagcttcagggtccttttcaactcgagacgaactaggagccaaggtagctgcggtagaaagcagagttgccgttggggttcgaaccttgataggagaatgccgactcttcagatctgatagcgaagcagaaggccggattcgagcggtagtcgctggttttatcgtagagttgaccttgatccgaacgggcgcggccggactggcaaacgtgaacgaagccttcttggatactgatttgatcggggaagacggtcgagccgaagaagatgtagcagaagagaacgactttgctggcgacactgaacgatcagagggcggtcctgccaacagtgacgatcgaggtctggtctccctcgatatgatattcagtggctcggtcggaacagacaaggctgatcgaagtcgatctgatcgggaggtggtaggtgttgttggtgctgacccaggagcatgcagggccttaggggtagttgactctcgccgagaatgcatcgcttgcctaacctcctcatacgaaggagaatatgatgacatgggtctcgctggcggtctcgttgggactaaaggagaactggccgccgttatcaccgagggagacgatatatgagagctccttggtggggaactaccataggttcgatcgctttcttctccgctgttcagaagtcgggtagccgacgagattcggttttggacgacttgatggggagaagaagggccgatcggatatcgaggtgttattctcaacacctcgtcatcatcatcactatcatcctcagtcttgctgacatggttaattttgtctgcatcttggtccaaacctagcccggggctttcaaaatcagaatcatcagactgatccaacataatgttctgcatggcgagaccaatatctgaggacgtgatcatctcgctcattgggacggcctcgaattcatcgtcgattggatcacgaatttcgtcgtatccaaagggttccatcaaggacgagtcctcttttccttctggcacaagatccgatacttctggaccgggagaattgtaggcggaggttgagaaatcgaaataaccgtcatcgtattcgtcgccgtctccatcaacctcttctgtctcatcttcgttgcttgtctcgttctgatcagcggcggcggcggcttcaactcgtccttgaatgaaagctatgcttgccctgtgtgacagcacaggcggagcaggataaggctgagcgccacggagagtggaggcttcagaaggcgcggaagggttaacaacccgaagtggtcgccctatcggctgaatagattgaagagacccgatggattttgccttgtttgggatcatagcttcagcgggagcgagttgagcgtgaatctcaggccgaacaacaggctgggcggaaagaacaggaggcggttgattctcggcggtcgggatcgcgtttgacggctgcgaaccgatagatgacatagttcgcgttgaaaccggtcgttgattgagagggggaggtggatcgatcgacaaaaagttgataatcttgattgggagctcgataacatgattgttattgatagtgattcggacgacgtaggagacttcaatcagacgcgcccgaggaatggagagcgcatcaggctagacgggtgagggaacaacgttgaggataaatcaatacacctctcacagaggagtgcgtacacctgacaataagaaagccgagatagaagaacgtactggtaattgaacagagcagccccaagagcctgattggccaggctcgcaccctttccaccaacctttgccagtgatcagtcccctaccaccactttgaccaacctcgagaacagactcgctgacaatcttcctgcgagaagccgtctgaacggcgtcttggtctgcagtggcagagatagcgagattaggagctgggtgaaaaaacgtgacaatctggagaacactcaaggtgaggttttttatctacagaacgtgccgtacaaacggaacggaaaaaagatggagaagagatggagacgcataagcactgatatcgttgagtagcatgaagccagttcaagaacaaacgaacctttttggaagattcatttctgatgcctacatccagccaacactgttggccagccacccatgttgtcctagccgctttgaccgagagtctgacagccttgccggaccccgcctggaagtcctttctagcctcgattggaggttgaaaattcctcaggacaatccccatatccaagaacgggtacacggtgagctgtctgtagaagtgagcgattgatttcttgccagtagccggaaagaaaagcttgacagaagcgatgagaatgtatttgatgaaaccgtgggatgttcggaacggaccccgaggaaagtttgttatcggtaagggaaggacgaaggaaatgtcatgcgaaccggcgagggcctgcctatagccttcgtctggagtgactacgggagagtcgagcgcaggcgctgtattgtcaaataaggtggttatttgactcgagcccggagtgaaaatgggtagtgtgtgggaatgatgaaagaagatatgtcgagagctgtgtgaaggaatatctgagggaagagcgaaggatagccatccgtcagctatatgtcgacaaatcaattgcaaaggggaaaggccactagctcaccttcaaacccaacgactcttactttgccaccgccaacataactttaggcgaaaggagagaagcacagaattgagacctgaaatgcaaacatatcagacgcgcgacaacgagaacttacacatctccttccttcttattccagtctccaaccttgacttccattctgccctggacatcactgccctcgacgatgatatctctctcaagcagcacactgccggaagaactatattcagcatgccgtctattctctgctttgctacaatatcgtttcttgagacagaaaacttactcgatctggactctggcttttcgttttcctgctttcagccggacgtctacatctccaccttttcctttcgcaccaccgacaacttttctgccagagtctccctttcccaagattctggaaagctcgtgagtgtttctgactgggccgacaccatgactcaacaacgtgcccgctcgttccagtccacctgtactaagagacctggggcgtgcggctgaaccactgagtgaagacctgctcaatctagattcttcaactgttttaggcggtgggagagacgattctctcatccttccaagaacagggccggcaggtgtgaaaggtgtgcttggaaaatggccaatgggactaccattgacaatgtggttgccggaaggagtgaaagctaaatgatgagacccagattcctgaagtcgaagcattggatttgacggaataagagagctaggatgatgcatctggactagcgatcgagatcgcggtggaggacccgggtgagaaaatacaggttgagagaacgagccactcgagtcggacgaccggaaattgggtccttgaggagggacgacgggctgagggttgtaagcatcctgatgcgcagacagcggcctggacctcgggccgggtgctgtcgaggctagcggttgatgattagaactagggacatcattcggacgagactggtgagagctggctagtggttgatgagacagatgaggatgatgagctatcttctcgtcatccgaccgctcaaaatcgacgtcgtagtcgtagttgtctgggtcggcaacatgctcgaacgactcggccatgctgtgtctcctagggagaagttccttgcgaggagagtgcatgtctgattgtctaggacggctgaatatgatgcctaggccgtgatgaagatgagggagagggataggatgttgtgagaaagacgaagctgaatctggttggcattcgttgaagtcagtcttgttaaagactttgccggagattgtcggtagattcatcttccaacaaagctaacgcgtcatcaaccagacgcgtctcaagaaagataaatggaaaggagaagaatgaaaagactgatgcctatccctctttatacattctgtttcactagtcatgacaagggaaaacttccttatacgcttacacatgtgcgcttcccatgtatgtcattctgatcaacgaggttccttgtgtacataggaacagatggacagccagggggaagctaagaagttaggcgaacgcgtgtgttgttcgtcgaacgcgtcgcgtcgtctgctctcatttacgacgcgtcatttataatatgctcctccttctggtggctcatcttgactgtttgctccgttcatcttcatccattctgttgcctactctttgtgtgtgcgcgcgctctctctctctctctccctctcgttcacattcttagactctccgagccttgatggactttacagacgtctatccgtcgtcatccattccggtgttctcgccaggttaattgtttcgtgatattcatgcttccctcgttcgcgtatccctggagctagatccacttacacttgtatctttctctcaatcaggctcaaacttcatagccaatgcagtctcatccagaatcatcatccgaacgtcccatactcttcaaatcgtcaagacgttccttattcctgtgattcctccgtcaattccctcgtcttcttcctcgtcgcccacgtcatcactcgtatccaaaaactctcaattgtcacgtagaccaggaattggatggtcctcttcctcttcatcctcccccgcacttagctctccccgaccgaaagggcctccagaggtcacgcatctatcattctctcccttcggtgacaaaatacttgccttttgcgcccgaccgggcgtcgcctttgtttttgatctgaaggatccggggatgagcgaagaagacggtgtggaagccatgttggaaggtggagtcgagaaactgactagggtcgagtggataaaaagcggaaacggcaagggactccttgcttggtccgattttggggtgagtttgtctgctgagtttcgaatttgaagaagctttcgagattaggagggcttacatgttgtcaactggaccaagcttcgactcacaatctggaatttggatgacccagaaagtcgatcattcattcagaatttccagtttatagctcaaggttagctcagtctccttcttcctttttaagtgtctttctcacgtcattgactctccttcatttacaccctatgctcttcatggtgacaaataggacatgcctggtcggctgataatcgtctgttctatctggctgaaagatacaactctagagactctgtgggagtctatgacacgctcaacgattggaaacttgtctttgtaagtctatttcattgtcttgactggcgatatgtggggtttgcgtgagattgtctcacgctgtgttatccatcaacgtttcgtagcgtgtacctacacaaacagcttcccttcagggcatctcaatcgcaccccgaggtggttacatagccgtttgggatcatgctcttcaagtttgtttcatcctccttctgttctcgtctcatttggcctcatgaactcatcgttcttgctaattcctcgataccatgccactctctcaaagtataaacttcaactgtttcttccgcctctcaagacagcccttcaaacgcttcctcctccgcctcttccagcccaggtagagaacattggactcaactatcagccttcttggccagatttagggatgggtgtgcgctgtgtcgcatggagaccaggaggtgaatggctcgctgtgggtggatgggacggtcgaataaggatcttgcagaagagcgattggggcgttatttgggttggtcctcctgtgagaatagctccagctggctcggttcgtcctataaattctcgttttactctattcagaagatggcgcaacggctgaacatcttagcacattacaattatcttttgcgtatacggtgatacaggttgtttggcatgaaccgatagattggtataaccagacgggtggtcgagggattgttcaatgtacgactgttttgtattttcttcttctctttttgatcggtgaaaccagtttatactgaatcaaggccgaatgtcctactatcattctttcctttgcgcgtagatcatctgatgaatacgccggcgacaatctcgttcataaagccggacccgaagcagcatccgccaaaaatgggtgtatcccaactagagtggaatcaggacggcagtcttttaatgagtcgcctaggttcgtcctcttgaatatcctaatcacttcccaagaatctgtgctaatttatatatcttcggcgcatatatcatcttgcatgggattcttagaaaactctccggactgtctgatactctatcccttcccaacagctgatccagacttcgatccatcctcgctcgagtcctcttccgacctcccgttttctgttctcctccagacccggccaatattacatgcgacattccatcctacagattcgaaaaagcttgcgctttgcaccggttcaaacgggatttatatttggaacggggactggatcaccgacggagctgagggcgagggtgtagcggagtgcataggaatcccttccagtacgtgtcgtcggcctcgtttggccacttctacttgaacttaacatcgtgtgagtctttgttgtttgtgtgtcgtgtctgaacaggtccattttcggctacgtctctcaaatgggcaccagacggtgagacgttaattgtgatggataactcccgcggatcgcaaggggaattcactttggtgttcgaagctaaggaggatgccggaggcatgggtcaagacaatgtcgaaaacagcccagtggaggaaatgagtctaatcacggaggaggaggaggggaacgaagccatctcggaggtcagcttgaagatgcatgacctgttgtaatcttaattcaaaagagaacttgatgttttatcaaaagaaccttagggagattcaacatctttcagcggcggagtccgagattttttcgctagtcgacataagagatgatttcaatagtaaactcagccgggtgatgttacataaagtaatatgtgaatatatacgaaacccttcgatgataacacaaatgacaaaacggatacaaatacagggagccagggtaaccagagcttgatcttatgcaaccagtgagaagagaaacgctgaagacaaacaacaaccaagaagaaatgaagtcaaatgcatcaaagtcgagcacctttgggaatttttttctgggcttgacggacaccgagatcaccgagcacatcctctgctcctccacttcagaaagtcgcgcgcaaacagttaatcaacaatgtctcctattagaatcatatacagtttcagagaaaaagagatgaaaaggaaggacatacagaattgcatcaaacttctgtgtgcgggaagccatttcgatgaatttacccattccggtctttgtcaatgatcgaccaccaaagatttggacggcgtcgtccataatctcatttgcaacacctatcggattcggagtaaacgttgacagatcagtctgatgatgagcagagatgggcgcataacatgacacaacaattgagagccgtacgagttgagtacatcttcaactgatgttggaaaacggccagtgatgattgataagttttcatatctcacattcttgatctctcgagtaggctcttgggcaaggaaatggcgacttacgaaagcgatttgaccagccaagtggttgctttgctccttgtagctcattttggtcatctgatacgttacattctgccggaaagcagaaaacaagcaaaacgtgttcagcatggaaatcctcttattaaatagacaacgtggagaagatatcactaacttcaagccaggattgtacagcttctaccttagcaatcatcgatgcaagcttgtatcgaatgacaggttgggcgatcaatggttttccaaagacctagatccacaagaccctcatcttagttgggtgtgtccaacctgttaaaaaaagtgtatgaagctcacgaacctttcgttggttggcccagacaagacactattagcaaaacaaatcagttgatcgtcagcgacaatccaaatatttatagcctttgcaaatgtacgcccgtacttcttcaacgactgctctggaacttctagcagatgaacagcacatcacccaacctaaaaacagggcgaagccattgatgcatgttttctttaatatgtgctttggtcaagacaggaagcaagtagagatggaacagacgcacgctcatggttgaaattcgaaagcaccacataaatccctgcgtcctcgcctccaagtcggtactcatctgaaacagtgacattgtcaaacgtcacataggctgtgccggcagcagaagagtatctggtcttgattggcttcgtttccacacctggtcctcgaggaaccagtaggacggtcagtccaccagatgtctatagatgtaattacgagacaaacagggcgtcaaagttagcatgtacttggatttaggaggtcaacacaactttgtcagacctacccgacaggcaaccgtgaagtaatcggcaaaaacacctcctgtgatccacttcttcgtgccgttgattacccaggacttgccgtcttccgacttgacggccgaacaccgaagcccggttacatcactaccagcgaacgcctccgatacggccaaacagatgaactatgtgcatatgcgcgatcaaaaggtgccttgtcagtgtgcttgtgtgggacgtcttgagtatgtttacatccaatagaccatcaaagcaagattcagagtatccaccttttcccctttgaggatttcaggcacaacctgttcttaaacattatgatcagcgatatcttcttgaaattacgtgccggatcgcgaaagccatgcaatgtaccttttctttcaaagcctatatagtcagtagtagaaagaagtatgtatcagctctcacatccctaggtatctgaatacatatcgactcgaagtctaccttagatccaaaattgatgactggcggcagaccaattacatttcctccaccgagaccatctccgtagcctcgagcgccgcacattacaatttcttgagtgattacgagctcatggaagtctgttgacgaccacctagtaagattatgattcaatgtaatttttgaaggcgtcaaccaagcgcttacaatcaaagttcttgggctcaacaattcctcccatgagctcaagcccatggagatgcttgccaggctaccaagatcaagtggggaaaggacaagcgtgttgagctgactagccaaattgtttccgaaagaagaatgtgccactgtgacgtaccccgaaacgcatcgcatgaacattcttgtctgccatgattttgataacctctttactaggatgttttccgttatcctcacatgcttgtgcatcggctaggtgataaatttggaatatattaaggtcagttggaaagatctgaagtgcatgtgtccgacatacacacttacggtagatgtgttcgtcctatcaatacagcaggtcaaatagggatcgggttaagcctcctcattatttcgatgcagctgaacaaggataaactatacatacgaccatctttcgcatttctgctcgtaagatcaacgcaaaaaaagaggttcagctacaagtgagtggaatcaatgtagagaaaaacatacctttctgtaacgcccgatgagtatcattgtagtaaggggtatgatacgccttgctgagccatgtctaagttcccaatcgaaattcaatcgatttttatcagctatgtttaagtaggcatgtccagctcagctgccacgagtagtgacgtgcatgcataccggttcggcgtatgggacttctctcagtcctccaacttctctagggtgaatcttcttcttctgcccctgaatctttccaatttgaagtctttgataggcaggtttgagaagaacctcatgtcgatgaagtgaaaagaatgcctcggtggcatcttgtccggctatagatcggcaagcagcaagtaccacaaatcagttgatcagcgatgaagaaaatcttatcggagcttggtcctcaaacagcgagttgacggacctatctcctcatcaaacagaactgatttccctcctgggtgaaacttggaaaaaacagacagattgtatactatagaatcgctggattcccacaaagaacaaggcaacaggatgagtttcggttggtaggatttcctatcataatcatcgtaatgctcacaccactacccaaagatccccctccttgttatgttttgcaacttcctcaaaggtgtactcctgaagctctgcttgggatttagacattgtgataatgttccttgtgtatgattatgtgtacgtgatcgagcgaatatcaggaaggatgagatctggtttgaaagagaatgatgttgattcgttgagccttctaagtgtattctctggtcgactcgaacaactcggctatttatgtttgccgaacccgaccgcgtctcgaggtcactccattcacgcgaccagatctttctcatgctcttgtatctgttcggctttgtacaacgtatctcttggagaaaccagcatattatcatatctcaagttacctttgtataaccggtcctgtacatagacatactcttctacgtcaacacagccaaaccgtcgttactctggaatggtaaggatgatctatgatggattaaggcatccatgcatatatgaaagaggcatagagttatcagtgaagcgaagaagaatctaacaaagatgtacgagatgtggttgactaaatgagaacgtacctttccaatgttctggttggcatccaacatctcatgagcctcaatgactttgctccaatccaactctttgttgacgatcgattgaagttcgccatcaggcacgaaatgggacatacaatccttgttgaatcgggcaacaaggttcgattgataggacggatctcgagatcgcagcgctgttgatgaagtgaacagtctgatcagcatgagatataccatgttgttagagaccaataagaaggaggtactcgatccctggatccggaggcgcttgtagataatctttccgatagagacgttggcctcggcgctgcaggatcaaacacagtagttagtcaaacgattccaaaagtagtaaagaaagggctgtatggacttgcccactcatggcacctaggcagatcattcgaccatccttggccagcgagttgatgtttttctccaaataatcctacaaagttcactcttggtcaagtcaagacacatgttagacggagataaattagattgggatggcctaccttcccgatgaaatcgatgatctaacattttgttcaaaccataatcctcagtcagcactccctcgaggctggagatgagagatggaaacacacaccaagtttacaccctgattattcgtctccttcaacacgatctcctcaaagttctccgtcttgtaattgattcctctcgtaggaggacttttgagatgcagtaaagcatctaacttctcctgagacccagcagtagtaaacaccttagtggctcctaagataggtgccagctggtttgcagcgatgcccactgaactagcaccggcgtgaattagaacagattcctctggctttagctcaccaaggacttcgagcgcttggtatgcttgaagcatcaatgtcaatgagatagaacagttaggctcatcgttccaaactatggcgtggtgtgagatcaagaaagaagatggctggatagttcgtcgtaccggtaagaaagacctctaaaatacctgccgcctgagaatgtgacaagtactcaggcttctgaaggaccatatctcccgatatcgcgatgaactccgcataggctccctatgtcgttgatggaccaacttcgagggtgaatacttgcgatacggacaagatctggctataaataagctgagaaagacaatcaaacgtacgccgtatgccagaccgaaaacctcctggccctttgtccatttgtcactcttagattgttctacatgaccagagaactcgactcccaggatcggtccagcttgaggaggaagcgggtactgtaaaattcagacgaacaatagatcacctcggttaaagcaactatttccaaggctccgaaccggatacacaaaccgactcactttgcccattcgttgcagactgtccattcggttcaccccaatcgctctgatctgcaagtcatacatcgttcattgaccgagaagagtatagaccaggtgagatttcacagcatgtatcgtctatcaaacacgagcaagtgcctacataccttaaccaatatctggccttctttgggtgatggtttctcatactctccaatgtataacgccgagggcggtccggcctcgcccttgattcgaacggctcgcatagtctctgaggaggcagacatagatttcttataactgtttggactgaagatgagaggagcagtagctgaacaaagtgcaggcaagataatcaaaagatccaaatgatgaatcatgtttttcatgttaaatacgaatgccagatttggctgcgtcatcaatcataaatcccggaataatcgatagccgatgacaaattcaaatttagcactgtcgcttttaataccctactactcgcttatagatgttggtttggtacttttcacacagagagagacataacatggctggctacactattacacgagagcgtactgatgagcaacctgacagaagatatagaggtaagaactggaaggaagggatgaaaggagatgttaaccgagaaacggcgttccagtattcaagacatttaatacccctgtccaccgtagggctgttgctgctgcggctgaccgtctggatgagaagagaacagaaaatggtgtcagaaaatgctccttatatggaaagaaaaaggttggaggtatgattacactcacatcctccctgcccaccgtacccggtctgaccatatccctggtcaccataacctgttcgatggaattgagaataagaattttggtatgcagaggaaggatttagacgacagatacaaaggaagatcacttacctccagcctgctgaccaaactgctgctgaccgaactgtggctggccgtatccgccctgtcctccgtatccaccctgtcctccgtaccctcctccaccatatccgccaccaccatatcctcctcctcctcc

SEQ ID NO: 1979 - DNA, 35388 bp, Xanthophyllomyces dendrorhous
cctccgtatcctccccctcctcctccaccatatcctccccctcctcctcctagttcaagataatttggttgatcagtcaagaccatgaatagcactagcgatcgatggtagatactactcacctccaggcttagagttggccaagttcacctattaagttaaaaatagatatcttttaggataactctgcgatgaatatgataattcagggactaacccgaatacgtcgtccgtcaagatcctggtcattcaagccgttgatagcagcttgagcttcaccatcagtttggtaagtctaaattcattcccatcgggcacacacacgaggttagccaagaaaggtaacatcgctatgcacccaaagagtgtacgttcagacgcgacgaaagaaaactcacaacaaacccgaatcctcgggacttgcccgtctctcgatccttcatgacaatgcactttaagttttgtgaacgtgaggaccagaattgtaattgaaggcagcacaatggccaaacggatgaaccacaacagtaacacagaacatgccatgtagatgcgaacgagccatacaaagtatgagacggagagcatgtacggccgagtcaaacggaagatatgtcataggacacaagtaaatcgcaaaagaagaaatcagacgatgaatcagacggagaacgaaacacttttcagagagactatgcgaacatcgatgactgttccaaagttggagaaggcctgtagatacaaccagagggaaacgaccatagaaaaaatggggagcacgcaagcgagatcagtaccaaagcctacttaaatagggaaggattccgcgagatcatgagactggtgatactgacctggctcagaatatcctccgaggtgttccagcttaggtttcctatgagtgtcaaaggacaatgcgcaaatcgacaaaaacgtcagcgtttgtattccactaccatcgatctaatcggatacatcaacagtcccatctcagctccatccgccctcaagcatcttcatcctggtatccatgttagcggccgtatttgaatatattaatgaagacgcgatcgagagagtaaatgaaggtggctagatgtcgttcttcgtcaataagctgactaccgccatctcttcattcatcaccgtgggtcacttcatctaagccaaaaagagcgaaagcaaagaagagaagaaagaaaaggacgtatatggtatctatattcgcctgtagataatagagaactgaccgacgtagattttgctcatgttgttatggatatcaagatacaaaagtgaggaatggggtgattgtgaagaggaagaggggagaggagaagagaaaaagagatggcactcgatctcttggggccaaaatgcgcagcaggcggttttgtttcttctgtagcctttctctcttccatttccatcttttgacgacagacgacaccatcagcatacaagacttctcgtgaatatgttcaatacttatcaactagctcatctggcctatctcaagattgttcttcatgcagcaaaggtgaggtcgctcctttgattctcatgaaatcagatctaatcgaatcaatccttctttcacgtcagtatccgtcatctctcgtcaacggtgttctcttaggttctgcatctggatcagaagtcaacatcacggatagtgtgcctctacttcaccattggacctctctcagtccctcgatggaggttggattagaaatggtttgctggttcatccatatgtatctatctttgttggccgtgttgacctaccttgttaccggaacgattgatattgtgggcgtgttaaacgttttaggcagagtaccatgcttcatcaaagggactccgtattgtcggattttatcagggtaacgagcgtctccaagatggagagctctcgacagtaggagttaaagtagccaattcaatcaaatcgcggtttccgcaagcggtcgttttgatggtcagtctggccctgtcttcattcggcacgcagacatatgctcaggatctattccatggttatggtttataaatttcaaaaattcagattgacaacgaaaagttgaatggatctgaaaataccctcaaggtgcggcgctctcctctttaccgttcattccataaagaaacaaactgatagtgttctgtacgtttaaaaccgcacgccgtgcttaacgctctaaatggatcgatacaggccttggtctccgcatcaaactctacatggtcggtgacagggtcaccagaaattctaatcctccaacgtccaacaagcccttcggacgcaaagaaagctgttcaagagggagcgttcaaaacattcggtgactttgacgcacatctagaagacgtgtatgtccattcatcaaatccttctcccaagcggatgctttctgatcaaattgagcggcatgttgacttatggaatatgattcaccttaatatctgttggctcgctcataatcgtagcactgttgactggctcacaaactcgaaagccatcacaggctgggcatgatcaatgatgcttcgttgtataaattattatgatgtattgaataaaaatacacagtatagtcttccgcacatcatcgaagacgtaaggcgagttatcggagaacccgggtgagacgacttgagtggactatttagtcgaacaagcaagttagggttatctcagactgacgtcagactgacttcggctgacatcagcaaacccctatctttgcgactacgccaacgcacaatcgccagattgaaccgccgttttcgcttggtttggtgccacatcctacgtcgtccgtcgactcattcgtccacccagccagcattaacacatcttcttttccaaagagctcatctacaaccggtcctgagcaccatttaaattcaaaaagaccagtttttgtcatcggattcacataatatattctcttcgccatgtcggatcaatcacctccagatcctcctagtcctacaattccttcaccttcgattgattctccacaggcttcggcctcgtcgcttgctgccggagaacaggaacgtcctcgcgtaccggcatcaactgagtcctctaatgttcgtaatatgatgatgtctcaggatgatataagtgagggtcgagctcgatttatgcaggccctgcttcaaatgggtctcgcacccccaacgggcgccccatcgacatcacctctgcagctacccgagttcaacaccaaccaacctaggcggccaggagatcccgaaatccctcaaaacggaaatcagcaatcctctgagttcacattcgagttcattttcgagagtggcccggaggaggacatggctgttgacgatgaaggagcacctggaagcgaggcagatatgatgcgcatggcaaatatgatgtttgtaagttatcttcgtcgatgcatcattgagttttgactcatctgtccggttcaggacttgatcaagtattgacatcctgaaatcctctgaacagggttcctgggagaactcatcgccacaagctactcctggttcgaccgctccatcaaccgagcctgcactgagcgcaaacccgtccaacccaccttccggctcttctttggcttcaacacaaccagccgcgaatgtcgaccctccctctcattctggtcctacttctactccagctccaggctctcgtccccaaccatctcgtttgccgagttttggaggaatgctctcgtttctgcctcccagtttctttgccaatcagccgacaggtagggagctggaacgggcaccttcaaacagcccttctaatggatatgaacgaccagctaaccccccagttagtcgtttcttcattctttcgcttttcccctcttgaatccgtgattcgtttgcttacggcgatcactttgactgacaggaagacgcactggcgcctccatcatccattaatatgcttccacccatattcctcggaggtttcaatggctctgcggttcctcgaccctttacttctgaaacagatagttcaaattccgtaagagttcttctcaattatgaatgaacagtcatatctgtttcggcttgctcatctctttgcttcatcatctgtctgggaacagatcccggccgcagcacctggagcaaatccggatcaacaaccgatagtacctacactacaagacgacgtgatgcgggccacatctcagatgttcggcgggctaaatccacctgtgattccaccgtctacatctgctcctaatacgtcacgaaattctaatgctggttccaaccctgtcggagagaacgcaaccccatcagtacaccctatgcctttcttaacacaaccccttctatcatcgatattccaatcgatagggtcttccggatcacctcagcccaccgcggatgagtcaaccgccaatccgaacgccgaaggtccaacggtaaactccgctcctgacgatcctacccaaccatctcttcaaggtcgaccacctatgccgccaaacctgaatcttttcctcagtcgattattctctcggcttccctttccttcctcgccagggtccgttgaacgatcagacccgatagatccatctcaacctaacagaggtcaacctagtttcatcatcgccgtttcctttggcggcccgccgccgatggaagacaaggctcctgatccggttcgagcggccgagttggtaaatgcgttggacaaaccctcgaaggcgttgctcaagaggctagatagggtgcacaggctagatgagggaaccgatggtgtcgctgaagtggacaggcagggagcaagatgcgcggtctgcatggaaagcttgttagacgacgaggaaggagatgtcagatctctggtgagtctttgttttcgtcttcaaatacataaaaataaaactgtttatccatgaaacctgatcaccacgctcttccctcttttggatttcttacagccttgctctcatgcgtatcacgaaaattgtcttttaccatggttatcaacacatacaaattgtccatcatgccggtaagtgtcggagttttgcgcctcctttccaataagctcctattattcagcttgtgacctcaaactgtcctgtccctcctgtgtagattcgacctcgatcctctttctaccactttgaacaccagtcgaatcaatcatcggaaccccttccttcgtagaggagcattcggcactcggacacctactacctctactgcacagattccttctgctgggtctttggtcaggcctcatccgtattctcgaaattctacaccaagttcttcaagaccaggcacaccgtctgagtcaaatcctagcacgaccatcaccgcatccactcctgatacatctacacatccatctcctcgttctcttctaagtattgccaacccgtttgcgttgtctgccgaatcagaaactccaaccccaacaaatccttcttcagagttgacatatgtcccacctccggctcggttgactctgcttgagcacttgctgtctctggagagacgccatcacctccgctgttccatgccttcttgtatctttggacccagtgaagaggatccaacacccgatccgagactgatgttttctctgtctaaaccgggggatagagatgctattcttaaaacgtgcgagcacgagtttcatgaagaatgcttccgaccccaagttgagactgtaggcgatcggcttcaagtaaatgaagaggaaggtagagttgacatttcctgtctgatcacgggctgtaaagcgctcggatccatcgataagaagatttggaagtctagtatcaatgaggcaggaccaatgacggtggaccaaaattctcctaagcattgttgatgatattccggtacgttctcattgtacaaggctctcagccaaagagcggatattgcaccctgcttatttctctgatggccttcctctccttttgtgaatgtttagtttttggctaggtttgagatgtcttcaatcagtctttcccacagagcgccatgtttgaatcacttgatccttctaattcattcttatggtgttcattgcacacgtttggggaatgctttctctttcttatatgcctctttctcgttcctcattttttgtttccttatcttgttcttctgatcatccatcatactctcttactcttgcggtctacttttttatggcctttgcattcgttttgctataacatgtatcaatttttgttctctattatctggttgttgtctttctgtcgtcatctgatgactggccgggtcaactattcctctcacaagcgcagtcgagtccgtcacaagggcggcgataatacatccgatcagacgcttgctcccgaacctagacaaaaattattgttctgatttgtttccatttggctcgcctgtctttcttttcttttcccttcccttttccaccacccacctcctttctcttctactttcccttccggtccccttcccttctctttttttcagatctctttcaagatggccgccaagctttacgtcggtgagtgttttcttgttcactggtttctggatatgtgatgtgtatatgtgtggctttttctctatcaaagaagaaaagagatggctcttgtggaacgaggatcgagaagaaaaaactttcgattcaagaacaaaagctctcagattccatgtgactagatcattactaattcgttcctattgttcttttctttcttttctaggaaaccttgtatgcattccttttacaaagctgttacaaactatttgacatccttgatctttgaaaatcctaatgaatgacttgtttgaaccgaatcttggtatattcgatttttcttagtcctggtctttcactgatgactcccttgctcagattttccagccctacggaagcatccaggacgtgggttcttgtctctgcttgtcttttctctctcattgtcatcacgtgcctcgacctgtcgttgcttggtcatggtcgacgctgttttgcttgtgcatgcttcgctggcggctttctgatacacgctctctttgttaccttttaccttgctttccatcttcccctactactcgttacgctcatggctgtcatcgacctgctcgcttcgtctttggctatcaaatgctgctcaattttcaacttggatcacttggtttgctctctcgaacgtttttgatcttgcgtccttggaaacaattcactgtcatcttggcttgcatataaccatcgtgttgaaaaaaattcttcaatcttcttggccgtcatgtcgactcgaaatctaaaacgactcatcatatctcatcaatatgggttcatgcaaaactttgttacttcttcacgttgtacacatgctgtctcaatagtgcattgtcatgaaggatcgagagaccggtcgatcccgaggtttcggtttcgttgtaagtcgtcacacctggaggcaatcgcccttctccgggcttctgttttttcctcatctctaaggtttcatacatattttctttcccatcagaccttctcccaggagagcgaggcccaggctgccattcaggctcttaacgagcaggagatcgagggccgacagctccgagtacgtcacagtattcccctgaggcgttacagtgcatacacccatgttaaacattcttgcccttgcccttaattaattttcagatcaacctcgccaacggtgaccgaaacggaggtggttagtagtttctgctcaaagctggcttaattctgatgctcttccatgttaacatgatgatttctattcagccggcggtttcggaggtgcttcccagggataccagcagcagcagtctggtggttaccagagtggttacaactccgccccccgaggtggatacaacgccggtggtgacgccggcaccaagctttacgtcggaaacctctcgtggtcttccgatgagcagtccctctcccagaccttctctcagttcggacaggttacctctgtctctgttgccaaggaccgagagactggtcgatcccgaggattcgctttcatcaccttctcttcccagcaggaggctgacgccgccatcaacggcctcaacgaccaggaggttgagggacgacgactccgagtgagtaagaatgatcgttcttgacaactggtgtagatcactgacctgagatgttttggtttccaaggtcaacatgtccaaccctccccagtcttcctacggaggaggaggaggaggaggatacggaggacagcagtcctacggtcagcagcagtcttacggacagcagcagtcctacggtggacagtactaagcgctgtctgctttttcccgcttctgtttcctcgagtttttttcccgctgtgtttctttttcccttccctagcttgttgaattgattgtttcctatgtgactctcccttaatcatgtctttggaaagaaatgttctccttaaaaaaaaactgttatactatactgcggtgtttgtcaatctgcctgtgtgtctgtgtgtttgttcccgtatgtgtgtcaaatgtgaaagcaagaatacatggagagtgaggggcaagcgatggacgtggaacgacgacaagtaggcgcagcaggtccccacaatccgctcgaaattagagtgtgaactcaaggagacagatgtaataacaggtcatatatgacggatagagatgccttctttcgtgtatccgtgcatgtgtgtgcatctccctgtctctctagctttcatttttctccatctcactgagacggagtggcggaatggatcctatgtaaaaccttgatgtaattttgatgtaatcacttgtttaggtcggtcggatgtggagcttactaggtgaatagtgacagaacaggggacagaagaaacagagatcaacgaatgaaggaggctaaacgacgatcgtcacacagcatccgggtagccccgcggaataatctgatattttaacggggctaccagctgacgatcctccaagccatttaatcttttttccgtttctccgatccctctttgccctttgctctttgctctttgctctttgcttcttttttctctctctcacttgtgtatctatttatttgccaaatcaagccggaagaccaaccacttaacgaggaagaaaagagaagagaaaaagagtaaagaaaaaagcgaagagacgaacaaaatcgaaaagagaattgaacagaaaacgacacgcttgaaaatcacaacaggcaagaaacacgaaaaacagttagcaagccgggacgaatcttcagttcattcaactcgctcacccgttggtctgttgacacctaccgcaagggatccattcagccatccactcatatcgctccttactccattgtctagttggaacgccaggacctttcagttcttgagcaagtaaacgctttggaaaactctcttctcaaccggacctgacgttgttcaatcgtctcataacacacactcacacacatacccggtctaccgatctttcgcttataggtaatatctcagatcctgtcatcacccaagactcgagatccctttgattcttaatcttttccacgaatcttctcgactctagctcgacgaattctccaattccgtcgtcttgcatacacacccacgcacatacacatacacatacacacaccacacccgactcgttcaaatacttgtctctcttcgcctcaagaacaaccatttgacggaccttccttatctatcttccatccccggatgccgttcaagtttcctagctcattccatgcacgttcaccttcgggctcgtccccatcaacgttgatctgtcagagtccattcagattcacttcgtctccaccaaacgagactctttcttcaagtccacagtcccagccttcctcgacggcagcgagcagcaattggcagaaacaaccatttgcgctctccgccaccaccaccaacaacaacagggagactacctcaacttcccctccttcatcccagattcagtcagactccgtcacttcatccgcttcttcatcctatgcatctctgccttcgtttacgtcttctgtagatacaggaacggattcttcgagtctgcatacagccgattgggaacatgaccggaagctttctctcggttggccagagtacaaaggatccgatcttgggccgagagaggagaaaacaccaaagaatgaacatcctccatcgatgacccaggggaccaataagggatatgcaaaccatccttttgttatctcaccagaagtagagaatacaatccctctagggtgagtcttgtcctttctagcagtaccctgtttaatttgcttcttatatttgtcgtcatcatcatgactgattatatggaattttttgtctttccttttgctaggtcatctctgtcctcttcctactttccttcatcagcagtattgcccataccctcaaacgtctgcccaccatcaggctcgatcaatagtaatcttgtctcgaccaacctagccgataatgtgtccagcccatctttgtctcagcttcactcacctacctgtgcggcctctacggtttcctctaatggttcccctgatctttcgtcgtctcttggttggcgttcgtccgtttactcggatgtttcctcggcatcatcgacccactcggctagctcaagttgctcgatctcaatgccagtagtaccgagaccgtatttgttaggagcggatgggaaaggcgaggacgagctggatctgatgtcggatccgggaaacatcgtgatcgaaacgacggatgacgcttatgtggttgtggcctgccttccaggattctcgtaagatttccttactttcttttctatctctatttcaaggtatgtgtgttggctcgttgcctaattcaagtcgatatttttgcgaatctcagcttggactgtatcacattgacgagcaagtccagacgaacgcttcatattcttgccgatcgatggggcgaaggcagtggtatgttctcttctcatgaattgcccatcctcttgcttaccattcgttgacaataatacttatccttctattcttctttcctcctggacagctcactttgagcgcaaggtctcatttggcccagacgtcagtatgtctgggatccgtgcccagttagttcactcctttcgtggtagaagtgcagcatgtgcacacggtatctgacagatttgatctcactttgctacatcttgacaggtttgatggatcataccttcgagtgaccgttcaacgaagaaggcacgtctcttccggatcacttcacgagcgatcgttcacttcgctcttcaatcgagccagctcgcccaccttcgaggatgaccgacagattcctcctgccggattctatcggtctgccgctccggacttgactctcaataagaatgcggccgccggctcgtccctgagctcaggcttgttccagccgaccggccgatctgcgtctagtccaccggggcatttccagtaccctgttcgggcgcctctgcaatcacttcgattagatgaaggattggaggtcgaacctaccgatgtcggcggcttccttcgagcgaacgataaagggggtacgctgtctgaatcaaagatggaacaagaactgaaggagaaggatcgtttgattgagaacgaagtcagccggttgacattcgctggattctgcccggatttggtcgaccagatcaagcgagcgagggacagggcagaccgattccagttctgagcgattacacctggtgcaggtgtttctctgattctctcttgtcgtctcttttttccctttagctctctctctcttgtcctgcccctttacttcttctgttcaacccttctgtctttcaattcgctacttggctagatatgggtaaagttcactcctttacttgcctgcatacactgctatactgggtggaacacacagatgaacgacaatctgtacatccccttctttcctctgcttcgtctcttgtctgctttgttggatcaccttaaccttttccgttcatatctatatacattcttggataccaactaaagtttttttttttccgctttgctaactcaattgccttacaatcatcttcaaccttctgcatactgttctagtcgttccatctttcttgattcatctaagctcgtcgctctcttcattcgtcttgctcttatcccctacctctctctcgttctttatccctccgggtttctactgtatcaattctttccatcatacagtttcgacctagtcctccaggcacactctgtcgtccgtttacatttcctctatgcgctgtacaactctttacagttcttgctttcatactgcttttcgtatcctgccaactcttccccttgtgatttctttgctggatcatcttttcatcttcttctcgggtgtctgtgtgtgataaaccaccttggtggactaaacatacaagggcctcctccatatgcatttaacttgacaacgtcgccacaaaacaaagaagaagaaaccggttagagtgggttcatcaaaagacagtttgttctttgtgtcggcttggaaagatgtagctgatggtaagattagaaagcaaaaaacgagaatagtctctatcgagctaagaaataaccgatggtttctgttcctgtcgctctcatcccaatgacactacctcgattattacccaactgttcaatcttggcctgttctcatatatcgatgcgtattattaacagatggacgacgaaaagacaaaagacagagagtgatgatcaggaataaagagaaggacatcggccagattcaagtcaggtggttggctagccgcctcttgaggattatatgcctttttggttcctttcgttctctcctccctccttttctcaccttctccatctcttccagtcgattctctggtgtccttttctttttctcctctttcttgatcagattagaaacagcaaggaggataccctctgtgagattctctctcggccatactgtgtttcattacgcttctgtcctgcctcccgtgctttccttccctccacgtaggtaatcaagccagccacccttctcattcactcattcgctcgcttgagttgaaggaaagggaaaagctatggatccgtttggttcctaccttgcccacccgactaggccagacgaggacgatgctcgtagagcatcttctccgtcttcgtcttcgttccgttcgtgttctccaaatagtcagcaaccgtattatcttcatcaacaacaacaacgacgacaacaacagcagcagcagcagcagttacaccagatgcatctgcagcaacactcggaaggtcatcgccaacgatcttcactctccgtccaatcatctctaccctcaccttcagctccgttatcgccctcaacattgacatcaacatcgaccgcccgaccttcgttcagctcgactcgttcggctgaggaatacaatcccccttctccctcgtcctcacaataccacacacaccctgattatcatcctcaaaaccatgctcctcagtcgaaccatcaccaacaacagcaacagcatacagactatgcatccaacctcaagacgggcaggcaatcaccctcgaacgtgccgctagctaaaagtcagagatacgatcattcaccgtctgggagaccttcgccctcgccttcgccttcgttgacctcctatcgacttgagcagcaacaacaacagcagagccaccagcaaaaccaccagcagcaacaacaacaacaacagttcatgtatcattatcatcatcagcagcaacctgtgttcaatattcagacctcttcgcctcctccacctctaccatcgaccggcggttctgcatcgttctttgatagctccctttctgcccctcgttctctaatgactgttcaaactcggtcatcaaccagtccgactccaggctcacactctaggatctcatcggcagatgttctacctatccgagcgagcacaagtaacgttccttcccggcatcagccaactttttcttcccgagacccctactttgatcacttcagtggtggcggtgatggaggtagaactggtagggacggccatagaaacaagcacagagacgacaatgatgatgaagagggaaacgaaagtgacgatggattagcttatttgggttcaggttcgagaaaggtggagtcggtcgaagagatgagcacaaacggcagtagtctcctctcgtcctcgtatcctggtcaaacattcattgggcttgatgaagattatgatcgtgacgagcatggcgtcaagaagaatgggcgaccagcgggacaaccgtccatgtaccaccaacgatcgagctcccatcaggtctattcacagaattcaaatgagggatcgaagcctcctcgtcgtgtcggcgcaggagcaggagggccaccaggggaatcgatgtcttcctcgtcatcttccaatctgtctcaactgcctccactcttctcgaattccatctctcggtcagacactccgctctccaatccgtccgatatacccagtggccctcaacctgcccagtcaccctctgcgaccccttgttctccccccagctttcacagatcgatctctcagcagtctcgaacgacaatatctcattctcacggcggaggtggagcacaaagctcaaactcccagtggaccagttacaagctcgggccggttgattcgtcatccgccttgtcatacacgagcagcgggaatacccactcgggctcgaccgttcctatcaaagaaagtagatcaggccagaataccccaggggcccagccgacaccttgtggaaattgtggacaatctgtcactggtccatttgtcagagcattgaacatggtctatcacttggattgcttcagatgccaggtgagtcttggagcttgaacatctcgtcctttcgctctatattttatcatacctaactatctctgctttttcttatctccttttacgtctctcttcggtcggttttctatctcgcaggattgcaaagtcgttgtggctgccaagttctttccagtggaggccaaagacggaaagcagtacccgttatgcgaaacagactatttccgacggctcgatctgatttgcaacacgtgtgggacggcacttagaggaagctatatcactgcttgtcgtaagtttcaaagcaacataatctgacagactggtttcgcgtccgtgtatctgaaccgaaccaacctcattttggtgtatttgcgcgtgctcctgcgttgtcatgtattgttgacttctgggacacgtatatagagaaaaagtttcatgtcgaacactttacctgttcggtttgcccaaccgtgtttggatctcaagactcatattatgagtacgatggaaacgtctgtgagtccttttcacttgctctagtttattcggtcaaaatttcgaggcgcgagccgattcgttccgtcgaatctgataccgcgtctttcctttcaatttcgaacatgccgttctatagactgccatttccactacagcacgcggtttgctacgaaatgtgttggttgcggagtggcaatcttgaagcaatttgtggaagtcaacaggaatcaaaaggacgagtgctggcaccctgagtgttatatgatccaaaaagtaagtagttgtgtatatcagatagtgagaagttgatatgtaaagaaatccacactttgtcaaactcaacattccatcttgaatctttgtatttgtctagttttggaacgtcaaacttcagtcccgctttgccgatacaccctcaagtttctcatcgtctgatcgagacgaaagtgagacggccgagtcactcaaggtgaagcaacaagagatggaacatcaggtcaatcgagtctggaccgtgctttccgcctttgaagaaagctcagctgcgtgcatctctgagatgcttaccagggtcagcaactgtctatacatggaggccgtggcgatggcggagatgttcattttccatgtcgaggttctcttcgcgagtatcgacgagctcgagagacattttctgacagctgatgcgaagggtacgtggcttgatatattcatctgtctatcattctcttcacatctctcgcctgaggagaaagtcaatctgaccctaggtcggtccaaaattcgattgaaacaaacacaggtatgtctcatgtcagggaagcgaaacttctttgtcggacgaccgtgaatttcttttcgcttcttgctcatacccatgagactgagagctggagagcgactggaattacagacgacctgttggcgttagtgactcggctggcgcactacttgaagattctcatccggatagctctcactggagcactgaaactcgaacgagaatacgccaaccgagcggcgctcgttgggttcctcgatcgactggcgcgactcgctcatgatgggggagatcctgctgctagacgtcgacggctgctcaaacgccggaactctgaaaagaaaccgaccgcccaagacgcgggtacgaccaacgaccagactggtacatattctgtttcaaccgaccctcctggaccagctcagatcgacaagtacaattatgggtacagcagtctgttcgtatttgacggcggagagtccctcattagggcagatccaggagtaggagatgtcccactagatctctgcgtgatgtgcaggaagccggtcgaggaggattgtgttcggctagggattttcccccattggcacggatcatgtataaagtgttcgacctgtggcaaagtagccgctctcccacccgtcaaagaaagcaaagtcgacaaagacggcaacacgtcttcatctgtggtcaaaagctccagtagcgtgtatagaccaccacccgatctttcggccttcgtgttctcgtcgacgaaaccgctggcgaagtcctcgcctctgttcttgccggacaagattttttgcgtcgatcatggcgatcaaagttgcttgagaggatttgaggcagtcaccaggttggagcaatttgctttccttctgaacgcggcgttgagaaggctgttcttgtatctcagatcaaaaggagttgccccgctttcaccatgtacgtaattccttattcgcaccttagtttgcactttatttctttgaacgttatcctttgttctgatgtgttgatcctctttgcttgtttttatttgatcgatagctgctatcaaattctcgacttctcaaggtccgcgtcgaacatctttgggtacaactgaggctcacctggactcggatgtcaaattggtcaagtcgggtagcttggaccgaaaaatctcttctacagcagctatggtacctaaacgatcgaaagtggtcgaaagtcctgcgggcaaggtggcaaaatcgaatgttcccatacctccgatctcgacaacctcttctaaggcctcaaacaacaatagtctgattgaaggtctgcctgcgccgagcacaccatactccccgtcggttgatgtccaagcccctcgtccaactcgttcacagatctcgactgcacatttagattctcagcctacatctcgttcttcctcacgcccgttgaaccaacaaagggacctatctcctggtttctccaactcgagagaaggatctcgagcgtcctcttcgctttctgtcatcagaccttcgttcgcgaggaacaacacctcagttcgaatcatcaatgagccatccccggaccttgggcaggcaacgtatccttacccttcggctgtagaagagacgctacagaagttcgacgaccacctgacgttaggagatgtctcccagctggttgaagcagaacatgcgagagtcgaacaacgaccagtctatcagagtgaccagaaacttgttgcagaattgtctcctgtcaaggcgctcatcatcaagtacttcgcgctactgcaaattcaaaaatctgcgctaaacgaggtgctggtactagatgacgtactcgaactgatgtcaaagaagaacaccttttggaacaagctgtttaaaggtgggaagaagaaagaagaggtcaaaaagactggtaagcgattctatgttccatcaaaatacgagttgagctttctttcctgttaagatttatcaaacatgtcttacaattcttgtcgttctctcgatattggtccaggtgtctttggtgtacctctcgaccaactcgccgaacgtgtcggttccgattctgtattgggtgccacgtcggctcacctaaaagtgcctagtatagtagaagataccatcgcagctatgaaacaaatgggtacgttgttcttgtcaggttgagtttgctacctctaaacgctcacatctattcatcttatcatcatcatccgatctccttgtcaacacagatatgtcggtggagggtattttccgaaagaatggaaatatcagacgtctgaatgagattaccgaagctctcgaccgagacccaactagcgtaaactttgcggatgagaacccggttcagctagcggcactcttgaagaagttcctccgtcaactcccggaacctctgctcacatatcgacttcagcgtttgttctgtcaatctcaatgttcgtatttctcacaatcatatatgtcagaaccagatacgttttgtttgtttactttttcgaccttctttccaactttttctcagctctttctaccgacgctgaacgcaagcgctacttgcatcttatcgtatgcctcctcccgcggtacaatcgagacactatggagatcttgtttgtctttctcaaatgggtcgcttccttctctcacgtggatgaagagacgggtagcaagatggatcttcacaatctggccaccgttatcacgcctagtattctttactcgaagggcggaaaccctctgaaggatgaaagcttcgtcgccatccgagctgtgacaacactgctgcagatgcaagacgaattctacaccgtaccagacgagttggatcggtatctggatgataacctggtagacttcttcgagaaaaatctggaattaccacctaaagagatgctgaagatatgctcgaaagtacgtttgggtctctattgtggtcttggtttgatggtgtgcgtgcctaatattctgttttcatcttgcctgtcacctcgtcagatacatgttcagatccaagagcatcgtagacaggcaagtcgtccaccgccacttcctccaaaaacagaatccacgcttccaggaactcggttggcttcctaccaatcggatactaacctgtccgagatggcgaacaccctatcgagtcaaccagttccctcagtgttcactggagttgaaggccgccaatctcctgctgaaagcattcaacctcggccaactagttgggcttccccgggtcaagaccatgcttccctcctgcgtctgggttcaaatcatcagtcgggttctcaacaatcttacgcctctcaacatactcaatcgatcgatcctccgccttcgcctcgtcgagcgacgggaaacgcgtcgccaatgtcatcgtctgcttctggcgacgacggccgaagggcgtacctacctccttcttctcttacgccttccaacaccggtcatggacgatcttctacaagtcgatcataattccgtgatatcttcctccccctcgcttcctctttatacgccttggtatcttccccttttttttcctccttctttctcttcctttcatgtacgctcctcgttgcccatgtacatgccgcgtccggatatcatctgcgctccaatcatctatccttcttttctcttccttctatcatatctatttcaacctttcaacgatcggtcagaccgatatgcacatcttcgtaactacctcactctttgaaaatccacacatcaaacttatacccctcctttctagcctattttcgagcttcttcgaggcttttgtcttttcgtcttccttcgattgccatatctcatttaaagttctttcaatgtgcttttgactgaagaatcactgatatcaaaagaaaaacggttccaagaagaaaagagaaacagggactacgattgagatcatatcacacattacattgcggaatctagctctctctgaatcaagcgttggaaagaattatcttcaaaggtccaaccccattcagaggtgacgcaaacaagcaaagccgagcatgagatacgttttcaaccgagctgatcgaatttgattcgaaggaaagaagagaagacaagggcaagagcttacctttccaatcagcttcaccttcaagcaacatcccgaataacctatcttcctcgatcccatacttcttcccacctccggtgatcagactatcgagacggttcacctgaattgccactttcccacgtccgcttccatccgtttttgaagtctgaccagggttggaggctataggaagccgtaagatatttctggtcccagaggggtgcacaggaagggtgggaggtgggagaacgacggattggccggacagaaccgctcgaagttcgcttggatctgggtcatacaatctgtgttcgagcgtgcggatgatagcgatgcctatgatacaaagaagtaaaacgacgacagacaaagatcagggttggtatgacatgaggtgcagggtagatggaatggctggggtgattcgaaatgcgaccgacatgttttgaacaagaaactgtccccttcgaggactacacggaagaacttggaaagtaagtaacccattcataaacaaccttagaaaacaggcattagaaacaggaacacgaaccaaattggtcccaaactctacaaaccacatcgaagcttagctgctcaacaaacaacgtttggaacccttgtccccaaacgggcaaagacaatccagatttacttcagctttttattctttttcaaagggaaaagcttgatagttgaaggaagaggaagaggagggagaaggcctacaggtgctaggtatcttgatttcattcgacattagattataataaactgttgcataaagaagaaaccggccattacgtgagaaagataggttccataccgatataaaagatcatctgtagatatggttgttaggtcatacttcttggtaatgcgtcggcatctacgaccgcaccaaaccagacgatcgatcagtcaaaacttttccagaaggccaggtgacaaagggagacaattaacttactaagtgtgttcagtaccctgtagtaagcctccttctcgtcagccctgcctggatctagtaaagcccttaaacaactcgagcttgccaacaagttgagtaacgacttccaagctatatcgattgaacaagaagacaacatgataccacagttatgagcttgatgataaatccccaacaaacaggtgaagggaggaaacacggaccgatctcgggtgtcatcactaataaaaacgtagcagctatcagatggacaccggacacatatggaagaccttcatccgatcgagccttcgtatcaccaaaagatgcgcgcgcgccaattaggtatgatttacttgtcttcaggagggcgaacctaaccaaaatagaactaaccacgacccaagcgcccaggaattctcgtagtttaggatacattgtcccctcgttcggtttgaagactgttaatccagggtaagcttctgatgcgtcttgttcgagttgttgaagaatccgtgttggaaaagcttgtttttccatcgagataataaatcgttggacatgggtggtataagaagctataattgcgtttcaatacccaacatgatcagtcaagggtccttactttggtcaggcttggtcgtgattggaatgtgagggttatgtgcgcgcttacaggcagagattcccaatccatttcctatacatttctcccagacttgctctctgaaactagctggcacaccctcccaccagactgctcttaatttcggatccttcatcgttgcttgttgaggggaaggaagaatgttggtttcccatatcgggataagggaagccgcgtgttgagcgtggagttcttgttgatgaagaagcgcttgttgtttttgtttctctagatataccgcaggatgtacgcgtagcgaaaggtggttcagctttctgttcctcacagagattcagaaatggagacgaaatagatagtttacctgcgagcagactctccttcatcattttttcccagtctcgcgagtgcttctgatcctcctctttgttttttggaggaagatgccttggtctagttttgctcatcactttgtccaacattgatagtttcttgtttgctgctcctgatcctgatgaaggcgcgtgaaatccgttggatgtcaacgttgccgtcggtttcgagttggttgctgatgatgtcgtaggattatcttgaccgtcgataggggcggaagtagaagctgtcgtctttgtggattcatatccgttgtcatgttgttcggttgaaacatctttcgtcgcataggttgatgagctttgtctcccaccaaacgatgcggccgttaacgaagaactcgaccccgtctttctatgcgtcttggccgttgcttgaagaaaccctgcgggactcaacgatcttgttctgtcatgaccaccaccgtcaccaacgccgataccaaaacctccgtcacccaatttgggtgatttcaaactagagccccaagacattctgttcttcttcttgttcaagttgatcgttccgtcgtccgagccaccatgtgttttgtcaacatgccatgttgggatctgatcttcgttggattcaatgttgacattctcgaacgctgcttctagatctctatcttgatcgctgtcggtgaggacggtcgccgggatatcggagagggactgagagattactgatgaagaatgagagccagagtaagacggaatccgaacaggggaggatgaagtcgattctagataatccccacgaggatcgcctgctctttcatcggatggaccggatgaccaggaaggaagaggcggtggtgtgaccgcgaactccggactaaccatcccggtctggatccgggttgacgttggtgtggatggcgaggacatatccaagctgggagacctggaacaacgagttgaagagacaaagagcttggaaagacgaagaatggttgatagatcgtatgaaaagagaaaataaacaaaatcgacccgaaccggaccgaaagaagattaatgtttcattgtcgatgctgcaccttgttgactatcaagcacgaccgagatcttatcttttctcttccagtttccatgtcgatctcatgatgtgtttgagagaatcttttgtagacaaggcgatgcagaatgccagcttgcaagaaccattcgatatcgtgtttctttcatcgctgctgctggctggctggcaatcatatcagagcatgtgttctgaaccaactcctagatctgtccctctcactatgtcggaggagaagcagaaagagtcaagtatagagaaacgtatcatgaatcttcggttaacgattcctcattaacctccaagaagtggtaccctacgatgagaaccatcattgctgagcccagcgtgttctattttcacccatattccgttccccagtcgaatacgtggttccgaaccaaatcaaccaaacgaaagaacacagaaacgatgaggccaagatgagacaagaaaatgtcagaaaaatgcctatgctggtcgaaccctgtacccaaaggaacagagatggaagtatggaagataacgaacggcgattgtagtaagcgtgtcgtcagaaatcattgtgccgtctctttgccttctttttcttctgctgctgcttgataatcaggggtgttggcgttcttccttcggcttctgtgtatgctctgagagatccgtccggcgaatgatgacgatgatggtgatggtgatgatgttggggatgaagactagatcagcttggaggagagattacaagctgcgagagacgcgatgtcacgtgaccttctctcatcgcctttctttagcccagactcgcttctctgaccgaacgacatgatctgatacaacaacatacggacacaatgatgagaagagcagaacaaggcgatgcaaagaaatgtggttgtgattatagcgtagcggtttcagaaactggaattatagttatataatctataaagacgaggctatgatcgaaataaggtgaaagaaccctgagggatttctatgcaacgatacaccaggatatctggattcatccggtcaatcggtcggatggacattattgatggggcgattcaatcggagatggcaagagatccctatttttcgccgaacgggcgcgcattttgttggtcactataactcagacactttgatacatacccacggtggacttgaaaagaggagggcaaaagaagactcactcaacctcggcgacgcctaactcgaccaaccgagcctctcctagagtctcccagtcggtttccattaattttctcaccctttggtccatctggtaagacttcatctcctcgggaacgaatgacccgatcgggttctcttttgctgctagcagagctcgttcgagcgcgaccgtgtcgtcgtatggtacattgtacacatatctaatagtacattcaaaagccccgagtgatcaagttagactctgatcaaacaaagaaaaagaagagaaaaacagcaggataaatgagaaacgaacggagctgagtatgcggcgagaggaccgtgctggtaggattgccatctaaagatactgtttgtcttgtgccattccgactggggtggggcatctacttgatgagggttgataaaagggactcctttacacagggctgaacggaaggaagtaagcgcagaactgtcactatcagagttcgatttcaaagggagttataaaggaaaaagaagaaacgtgaagacagaccataatatggagagggtgagcatctaaggatgtcacatcaagaacacctttcggatcagtctactggataaagatcgaaaagagagaaacagaagataaaacaaacccagggaagccaaggccgaccatgactgtactcttagccaccaagctttcgtaggcctttctctccaaagtctcccgtcccttttcaagtggatacaataccacaccctctggaactggatgctgatctccaattcctgcgctcgtgtcaggcgcgactaatgtgaaatccaaaccagtcttctgggagagatcagtgtaatgatctctaggataagcggattctccagctagattgggatcatacgatgatatcgaattcaggcaattgaaggcaatatggatgaaaaagggcaaagaaagtgaaagacaacgaacgagagcccactccaccgtaaaaataagatgcttgcttggcaaggaataatgctcgggggtctctctcctctggtggcacaacctctccatcacactgttctcaatccagattatgcgaacatgtcgacctagtcagacttgcgcgcgagttgattcacaggcaagacagacgatacgtactgtgactgtgtaacccaagtaaaaatgatcgccaaactcgtaaggtgtcatgatccattttccacctagcggatggacgttgcttgtgagggaagccaacgtcggtggataatcgggtacactcgggtcaggcgtggtctcccaccaattctgaacgagaacctttccaagaggaatcccttttggaaaggtaggtcggcgaatacactcgttcgaaagaagacaatgatagaatccttttgtaccggtattcgggatggtttccacaactgcgttcgaacgaagcgcgcggaggatggatgaaggtggttagcccgaggtcatctgtcttgatgcgaaagcaaagacacatactgtacacagcgacataatcttcaaacactctatgccagttcatcaaatcagttgcgtattcgttcaccatgatggatgtatagccgagcctgtccaacgaatctaagaccgagatcgcccacagatcctctcctctagtgctcgagccatcagcgaacttgtctggagaaattcagaaggacagggaagttggagcaaggcatgatagtcagcaagactccaacacggaacattcagaagcagagaaggacgaacagtatgaatattgaagcaagacaatccttgtggtttcgtgtgggcaggttgcgttgcgcaaacaggcctctagatgagtgatcgccaaacgattatggtcatacatgaacggtcttagagagaagcggaaagaggtgtcaaagaagaagagaggaagttaaaatcagtttactcaccgattggtatgtgtatcaagtagaagaaagaatgagagaaacctacgtgaatcgataatcgttctccagagtcgtccaagcgtctggtaggcgatctactagtttagattgaacccgaggaggatcgggaggaaatactgggagatgagcagtcgcaggaaccgtagtcgaaggatctactagtatcaaaccctgagatagtgtggacaggtggctattggcaatgagaaagaagaagagaagagagagcgagagggcgggaaagatgaagcgcgtcttttgcctggacatcagtaggggtttgtggtacttcatcgtacgttagcagaggcgagtgaaagtcaatcagtgccgatatacagggagtgttataccataaaatagatcgagagaaaccaaatcccaagatgtttgtcattaaagaggaatacacaaccagctcatagagaaggaagaatgatcagtcgagcaaggatgcacgatctgtatgatgatgtatggatgtgtcactcttgcatctgcatgcattcttccaattttatcttccatccttcttcttccatccttgtcttcgccggagtctcgactatatcatccgagccgcagagaagagagatggcaagagtaagtgcgtgtcaggatgagaccatgggtattttagttgatgaatattcatgtgtgggtgtatgtaccgctcgctcgtgccaagtagcatgctttatgatcttcatacccgattcacttaccctctgcactcgatttcctctgcccttttgattctcccaaccaggatcatacatatgatagataatagtagcaacaatggattcacacgctcatcagcctaccagcctccgttcgtcgtcaaatctaaaaactaaacccgccgccgagcgagttcttcgtcgtcgtcgtcgtccaggaaatcatcacccacagaacgccttattgacctaggcttctcttccgatctcctcaaagcggtcaacggaagatgctcctcatcatccccaccatgtagagacgtcgaggatgggtacctgccgataccatttgcgctagacagctcagagtgatcgccgtgttcgcttggctcgtgtatcgacttttgatatttgtggtgcgtaaacaccgcgattcctattttttgcacagccaacagagttcagatgagggagatacgccactctttgcgatggagacgacgctcggcaaacgaggaaaaaaaggaatacgaaccggtcacagtgacaaacaaaccggccaagttgataggcgtgagctcgtcaccaaacgcccaggaagctatactgattgtggtaacttctttgaagacccctgccacgctcaatggaacaacacctgctctttgaatgatgctgttggtatcatattcgatgtagtcaggaacaaaggaacaactgctcaggagcgagggcggaagagtgatctcactagtattcgcttgccaccatggcaaacgccaagaaaccagggaagatgatgaccaagattgtgaagagcactctgcccggttcaaagaactcgctaccaaacacttcgccccagccgtcttggatgagactgacgaaacccagggcgatagccatgacgggtgaaatccaaaagatagttgcaaatgggttggacattccaagttctttcttgatcatcaatgtgtgcgtcaatgcccatcgaagacctcccagaactgaagcggtcagcaccatcaagatacctggtagggagacagcggtagtattgaaagccattaggataactccggtggtgatcaacgtgatgaccaagatgagcttccaggagaatcgctcgagatggaagaggaacgcaaagaagaggacaaagatcaagctctagggaagattgttaagaggggaacacagaccgtcgcgcgttagatcgaaacaatgcgctaaaatctgaacagacatattcagaacgatcctatgcgtaccgaggatttgcacatggctagatggattgaaaagaatacacctcagaacgtgtataatgaagatgcacaacactgatgaaaagcctcctaggcttactatatagtgagagagagattgtcttgagactgagatttgaaagtccaatgtcaccagccgtactgattcccgtgggaaccaaccgataccttgtatagatagatgttgtgaattgtttccgaaagcccgaccgatcagtacgaacgcacaagtgttttgatatgagagacacgaagcagaggagaccgactcacccgtaatcccggacggacggattatagggaggtttaaatttttgaggcatcgtgaacctcacgattgatgctaacacaaactggacgatcctaagaagtaaggaacggacgtaaaaagtcggtcaattctggcgcgaagacatacccgaacactctcctacgaacgaagcgagaaaaggaaattgggaagctttcttacatctgacagaacgtcatgaacatcgggaagggaaacgcaaagtatttgacgccaaacacccatttgttgtaaagctttggtggaaagaatcaaaatcagtttatgatgatttctttcctacgaagaggtgacttggcacgtaccgacaacagagtcgagaacccatacctatcaaaattcatcatacgattgacatcagcttcagtccatcgttgggtatcaaaacttgagggcaacctgatcaatgctcaccatagcaagacaaagaatgcggtaatcgcggtttccctccagtacatcttctttctcctctcgatctctagattatctccgagcccgtctttctcgagctgctcatcgaacgcctttagttctctctccaaatgcaaatcaccttcctcggcatcttcactgtagcgtctggttgatattccgttgggttgactggactctgcttttgtgctcgaacgagcgtccgtgccatccccccaatcatcccacgcgtcctcgtcctcgtcatcatcatcattattgccaggactcttcctaccgtccagactgtcatcatatggtatacgtgacgacgaggctgcacccgaaccagatgctgaggctgaggggtaaggaggcagagagcctatagagtttcttggcgagcctaaggggccattcaagtctgcgggatcataagacgagagagaacgaacaggaccgatatgatgggatggtaattgttccttcgggacgcctgcggtcgtgttggttgatcttggcgattgctggcgtgcggaagaagacggatcttctagagctaccagaggagagtaagacgatgaagcctgctccatcctgagcgggcgtgggtgtaggtgcagagctgtgggaggagtatgctgagaacgatgtctgatggataggatggtcgatgtttggtctgatatctcccaagggaatttaaaataacgaaaataattcccgagataaatctaatcggtcacgattttcgacgaccctcagttcaccttctaccgacacaccttcttgccactctttatctacaaatatacacacaatgactaccagggcctctgaagcaaagaacatttggatcgcagccggtgacggtgatctcgaacgagtcaaggtgcgtctttatctttcgatgagaaagccaaggcaagaggcttgataccaacgttgcttccctcatttattcttctttaggatttaatcgagaatcagagtatgtctgagccttttgacgagttcttcttctcttctacccaagaacgactggctagcttactgaccaacctcgtccatacgcttacatcaacagatctctcaccgaatgtccctgacgagaacacatacaccccactccacgcagccgcgtcatactctcaactcgatgtgcttacctacctgctttcaaaaggaggaaacatcaacttgacggatgaagatggggaaactccgctgttcacggtggaaagcgtggacaccgctaggttcttgattgagaatggagctgatgtcgcatggaagaataaggagggtctgaacgtttgtcctactcgcttttcttcccttttttcttcctcttcttttggtctttgtttcatgaagtttccctctatcttacttttcaatcttctattttcattcccataacaatctatcactcaactgattgtgattccgtcctttcgccgtcgaacgccgtatataaggccgcggagaacttggaagaagaattcccagaagtctcgacgtacctccgaacactactcctactaacgatcccttctaccgccgtccctcgttcaaacccaccgaccgacgcgtcttctcctctgaactcatctcaggcacctcatgatgaagatgaggacgaagaggacgaagatggggatgtgtcgaaccagttgacgtccgctcatttgtctcaactcatggctgatcgactgacggacgaacaaacgacggatatgatgagacggttcgaggaagtcatgaagaagaccgaagaggatggagtcaacagggatgaagaacttgccgaaggtttgttcccctcgttcttcttcttctccttttctctctttctcttctcttactgaatacgtctgttttcttttgatccgatcctctcatctcatctttcgtttttccggatccactcaacaccttgacttgccgaaatgatgttggaacgcaatcataaagtcgtccagtcggtcctgttcaacacgatgaacgcaggtcgaaacatggccaccgggaccggttctggttcgaccacaaccatgacgataccagaggagagcgaggagcaggagcaggaggagaatgtaaagaggacgaggacggagcctgaacctgagcgataagaaatgaataaaatccgagtaaactacataaagagacagagaaagaggagaacaacggaactggcaccaaaggagtctgtctgtgcatttggcgatcatcttggatgctgggtttgaccttgaatttacacataagccctaggaaggagatttgagcgaaagaccatccgacatgcttgaaagtgacagaaaccatgaaaatcatcccacggaattagatgacttataatcggacccatagatcgcgatcgacagactcgccagtatggaagaagagacatctgggaaagagcgaatagagggcccaaggcgccaagaagaagaggactggtcttcagagaaagaaaatctatttgttcattcattctggtttttttttggcaagtaatgagatcaagatcgaagagatggtcaaggatccgcttctattaggcttcggaatctctacaccacatgactttctccaacaatggggagaagaataatgggagtccaaggatgagaaccgttacggaaagagaaggagggtgaagaaagagacaaaacttgtttgtcgagagaatgagaaagcgacatgaaagaaagcgccgaaaacgaagaagtagaaaaggcacttgagacaacactttggacttgaaacatttagttaaacttaggattcaaaatagagaaacaaaagagaaagtcaattcgaggatcagatataatgtttatttaaaggatggagggagtacccggaatagggagaggaggaaaagaaacagccccaagataggtagggctagacgtgaagaatcaaaggaagatcacaaagaaaacaaatatagaagtataacaagcgattttttcgccaaggaggaagaaagagagaagaacaaatatttggaaagatagagaacaaagaacaacagaacatctttaattttatttcgttcctatgaacaatgaacaaagggggagaaaagaagaaaaacatcaagtcgacaagccgttcatccgtcctacccaggatgcgccggagcctccgaacggagaagcaggggacgagcccgcgcctggcccgcctacaccgcccgcagacatttgagccggtgcagatattgacgagttagaagcagaggcggaaacgggtgtgaacgattcggaagcaggggtaaggacgacggcgccaaccgaggtgatcgatcctttgtagtgtccgtgattggaattaatagatcgtctgaacaagtaagaaaagtagtatttatcagtatgttgacttggaagtggtgatcccaagaaagagagagaaaagaaggaagaagacatactgaagatggtctaaagagagtggaaccgaaaagagtcaaaagattcattgcatccatcagtcaatcaaagggttcttgacacattgagatgtctgaaggggaagacctacatttcagtccgttctgttgcttgtaaacctttccgcagccctctaccggacatctgaacctcttttcgccaccaccagcagccgcactgagatccatgacaaccgaggtctccgagatgaccggggtcgaccttccggagcctgttaagccgagtccgagagattctcctggagtgtttgggctgttgaaattgttgctattgctgttgacgttattactgttgaaccctccaagatgaacatttgtgctctctgtctcgtctgatcgatctttaacggctgacgtgctcgccgtccgtctcttttccgttcggttaacgccgccgccggtattgttaccaccaccaactaatagacctgaggacgacaaggatcctgggagggagccgagagaaccgagggacgaagcgggcgaggtgacggctgaggtagccggagtactgttactcctggatggcaatgcgtacgtcaacaatgagggaggtacacattgaggcacaggcgttgccggatgggaagaaagagccgaagctgaggaccaaggagaagggaaggatgagatcccggtgggaatattaacagtcgctgatctaggaggacgagagaacggggagggcagggtgatggtatcttccatctcgaggtccattaggccgggcgtgtggggtgaatccgaatcggtcgtgggcgacggggtggtcggatgaccaggagcagagaacgattgcatcaaaggaggggtcgaggaagacaagtgggagatcacgttggcacccgacccagagctcgtcctagagatcatcgacggcttctggaaaggaagcagaccggccggcgtagagtttccgccgttgatattaccgtttccgatgagaacgtgagattcctcgtaactgacgaagcagaacgagagcacccaagggcaaccaggggagaaagcaagataaagagaagaaaagagaaacgtaatcaacaagtgctttcttgtgttgctcttgcttcatcttacggccagagaacttccttccctgggtacaaacacaacggatatggtgcaagaaggaggaacgaaagaaagaagaaagctcactgctcgagtaaatcgtgaaggcctttgagttgtaaaccacaacacgtaaagttgctagtgaagttttgctcaagcttgcttaatcgttccacgcttgatggtccagcgaactggccagaaccatagccagatccgaacggaccaccggttgagctagcttgatgtgaaccggagttaccgtagtaagcatttccaccagaaccggaaccggcgcccatcagtctgtttccacccaacgaacttgtgacataggcttcgtgaccggcggtcgagaaggaacatctgtgagcggcgagggagcctacgtccgactgggatcggtgaggaagggacgactgggtcgaatcgaccgacatcgatagatcacccatcctggacaacgccggggacgacggtaggtatgacccagactggagcggagacagaaaggtgagtgacgacgagaggggaatgtttggggacgagggcggtacagtaaggctgaggggaatcggaaagatatgagcacatgcaggagaaggagcgaggtggagataaaacagggcagaagaaacccaggcagacacgaggcagtgttaatcggttgttgaacccagaaagaggaacacgacagagagaaagagagagagagtagagaactcaccctcgccagccttcacctcgccaacttccgctaggcgcccagagacctgtgccttctgttgtatgcccagacgaatacaacccatccagttcgtccggtgagccgatgccgataccaccacttgcgacttgcctgtttggcgttatatcgagtgggatccctaaaccggacccaccatccgatggactggaacccatgcccatgcccatgccgatacaacccatgcccatcgagccggaccaaccggccgagggctgctgctgttgactcccaccggacaactctttcgaccaggactgttgtctaggaaatgaattgatggcttcgacgtggtgataatctgttcggttgatggccgaatggtaggacgatgcgataggcaccggcgtcgggatcggctgcatagcgcgtagcgagagtgaaaggtagagagtctagacgaaagagagcggatctaacgatgaacgatagaacacgacactcggtccgggagatttttgaagaagatagaatcaaccgactggaaaaggttgtcggtagataggaagaatcgaatgcccagacgagagagagtatgtatggatgtgtttgatatgggatgtggctgtatgctaggtatgtgtctggctgtatgactgttgaacacgagtgataccgaacgaggatatgaacgctgaggcgtcggacgtgaccttcgacgaaaggggaaggagttcagcgatcaaacatggatcttgttcggagagaagagaacatgaacgggtccatacctgtatcggtttgctatctacgtcagatcgagatcaatgtatgaatcccaagaacagacgagtgactgaacgaaggagacttggtctttggtagggagggacgacttctcgaacgcacaccacacaaacacaaccgaccgcataacggcgcacggaagatttgctagggcgggggactgtaaccctgaggcgtaacccggc

SEQ ID NO: 1980 - DNA, 9287 bp, Xanthophyllomyces dendrorhous
aaaaaaaaaaaaaaaaaggtaaatcagggggcaagtcctcgggcttgtgagctgtgtgagccgacgcgatcggttgtgttttcatcctgccaagcctctctttcgcgctgattgttctctttcttagtgatctctgtgtctgttggtacatctgaagttcatacatcgttgtcagagtagggaaagagtgaaggcagagacagaggtacaaatagacaagtcgaaaggagacaaattaagcaagaatcctgtgagggggggacgtaaggaaagagtgtatcgtcatcgagtagccggtcaatttatcgggtgatgttttaatcaactattcaaatttaatcaactatttaatcaaatattcgtccacagcaatcaacatcctcgtaaccaccgcacaataaactctgcgtacatcggggaaagatcctggagagatcagggaccggagcgaaaatttgatacggcagggttcggtcgagggcaaccgtatgtggcgggggggctgtgctggcgtcatcatcatgaccaaggccatgatccatgtccaacttgagggcttagctgcgacaaagctccgggctgcgcataatacatgaatcccttatctctcattcattccgaattaagccgggcgctctgttgttatcaatttaccttggggttgaattgggtatcaaatgaagcatgaagtatgaagtgattgatattaagattgaatgcatagagcaaccgttccatctcctgttcaacgctgcttgccttattcggtagatcttggtctttcaagccgttatactcttggggcaccagcgtatattaaagaatctcagtaaaaggtttggttgctcttaacgatgattttttccattcgcaatggcatatagatcaacaaaacaaggagcgatagtgatcgagattaaagaaagagaatagtatagagaaagccaaagaaagatggattgaagaaatccaaacaaaaaacccaagacatgcctgcgcacacgtagaccgaaacaactgcatactctaatcctcccttttctcgggaatacggagctctttgagcaactctgagagctgctggtccgggtcgagcttggagaatgaggtctgtcgcttgacggacgccctggttggatcgaccgcgcctatctctgccacctcctcctccgtcggtgtgcccgcaagcgaaggtggcagtcttgagacgtgcaagttgtgcaaccgaccggtttccaaatggtagattagcccatggacctgaactccctcccctgtaccgtcggacttggcccaattattctgcacggtctctgtcatggagatctttcggacagcctccgacacgttctcctcgaccaatgtctggaatgtcggactcggttttctatccgtaagttcgtgtctaagcttaatcaacggagagataaaccgggagagcgccgtcgacttgttatctgcgtcttccttggcagagttccaggccgctttgcatcctccacagatggtgtgtcccacgaccagaactagacagaccagaccaaatgataagccgatgaatctccagatgagtcatttgacagtcgaaagaagaagtgttattcactcactgtgttggacgccggcttcctcaacagcaaagcagagagccgcgtttgcagaatcatcatctagatgaaactggttagcgatatttctctgtcgagccgcgaaacagaagaaagagccgtgtcagtcatggctgccatattttgttgttcattacagatcgaacagggtatagcatggtttttttttttttttttaagtaagaaactaatgacgaacgtgcacaaagatatctccaggtcgggcagcgaccaaggtcgtctcaggcacactgtgttgacaaccgaatgggaactagataagctatttcctaacctcatcatttcttctccttcttcttcctcgtcctcctttttttcactccatagaaaagcacagactcaagaagaaaaagacaaaccgactgtcagagcatccgatccagagcacttttggtcgttggcccaaggcggaagtggggaagaactcaggatcgactgagtagatgtcttgacttggttgtttcaagtttcagacgttttcgcaagaacaatacacaagaaaagaagagaggacaaccccaatgaaaatacgttggttagcgagacccgaaaagatggacaacccggaacaaaccacacaatcaaacgtacctccattgctcgtttcgctggagtagagattccaaaagcggccgagagtacttggtcggagtcaatggttcctgaagatgagagttgggcatcttgataagaattctatatgtatgcagaaaggaaaggaaaggaaagaaaagggctaggagagatgttgttggagaggtaagaataaaatgcaattgaaaaactctctgtttgagaaggatgagcaattgatcaatctcgttggggcacgacagaatgacaacttgattgggacggctttgtaaacgccgaagtcttccgtcgtgacagcacagcacagcttttgcacattttcagtttgctcttgcttttggtcagtcggtcagaacctcttcattttaacggcaaggaaaggaggaaaagaaacagagagacagagaggtttgatcggtcaagcaacacgaaggagggcaaagaaagaagaaggttcggtcagactcttggtttatatatgtttttttcttcctctttcctgagtcccgggtcgcttataggctaggttagaagtatttgtagtgagcatatcggcgcgatcggatccactacaaataattatttgtagtgatactgtctgatctaatccgagcttccagttgtgccttcctcatagtctctcttgcccaaagttaagcgtccttgatctcacaaagacacacacacacactctctctatctatctatatatatacacaaaatacatggatctgtatctcaaaatacaactagatgaacgcctatcgactcagtgcaaccgaccgaatccttccaagatcccacagacctcggaatacggaacgtcaatcttctcatactgatttcggccatctagaatccgtctgatcaagtcttgatctttgatctgaaggaacgactggacatagtctccgtcgattacaccaacacttggcgaagtcgcgttgtcaagttggacctgacgatagctactcgcgtgttttattatcgatattaccatatccgtcagatgaatgtggatcttggtagaaattagtcccaaggcagacaggacttactctgacagagagacatttccgaaccccttcaacacaacagtcatatttcgctgaaggtcaaacaggaacctggaagactccacgtttagatcaagcacagcagagattcgaccagatgatgtgccaaaaaccaagttgggtgtcgctcccatatctgcaggttcgtttggaagaagcgcgcctatcaaacaatcgtcaaaaatataaacatgcgcgtcgttccgtcccgtatagtcatatatgaagccggagacgacgagagctcgtacccttagcaaatttgttaatgagctcgccgacatgatagcctgctttagagaccagtgtgtgatcctcaggttgcattgtcaagatattgcagttactctgaggatagttgtagttcacagatcaataaaagaattccggtcagttttctctcgagatttttctggtgatcaaaacctctttgggagactaacatccgcggcgatcagcgtgtcatcggttccttggccgagacgttcggctgtcgtgagccacaatggtttgagatccttcataaaggaaaaagattcaggagagaaagccatgagttataatctataccaaacgctctttcagacagccccagatacttgagactattcaccttgatcacagtcctaaactgacgagaggactgatcgatctcaaccacagatagagaactcatcgcgtccccaatcgccaaccttgacttaccatccacactagacagattgatcaaggtcgagggtagataggatgattcccaggacgaaacctttttgaaactgtacatcgttcctgtgtccccgttaagatctctcccaaacagcagtacctacagaacgcgatcgttcaaaggaggaaaaacacgtcagtttcatactcttgtcaaacatcacgagtctgaaagagtgaaaggatacatgacccatccttgaattgacactagcgacaaaacccagttcgcccacaccttcaatcgcatagaccgcccctgccaccgtggtctccatcaacttgctcacaggcctcccattcctatcctggccaaatacgatgactcgtcctttgtgaacctcagatagagtttcgtctagataacccgtgccgaggacgaacacccatcgggtttctgatccagaggtaaaacagatggctctgagcgcggtggctcgctcagatgggtcgagatcaaacacaaatatggctatcgaaatacattttaaatcgactctgtcgtgtctcctcaaagaagcagaaaacgaggcaactcacgttcaaacgtgtctttatcaagtactttgaagcttgagctcatggtctcctgacccttcgttctgtccaacaccgttttgatgaatgccacaccgtacgctcgaatattggggtgatacacgatcctataaggattatcagtcccaaaaggaatctagtttgacatcaaacaaagtcccgattgtaagtttcaggtcaagaacccagtactatggtttgagaaggaaaaaagctctgaaacaaaacaaaaaaatccgaaccgtctgaagattttgccgttttgtcccatcgatctttccgaaaagcacgccggttggtgtcgccaagagcatggaattcgttccagagaacgtgccgatgaaggttgaagcgctcacgtcctgttttaacagggggaaacatcatgccaggcaacaagactagggtttcagcactgagctgtaaacaaattgtgttcgaagagtaagaaaggcgagagcgtataccttgatgctgatcatgtcccaactaagtcttcctgtgtcttcccatcgaataatcgcgctcctctccccgaacgcgaatatttcttctccacctccttcttcctccgaggcgatttgtcgggtcaacccaacctccacttgaccgagcttgatcgtctttacgtccaccttttctccgttcgaagtcggtaaattatggccagtacctcttgtgagcagctcgactgaatgcacgacgagctctccatcggccagaccggcgagcagcgagggcggggttcttggagaagacgtgaagagaagagagcgaacgagagagggtgtgaatgcgaatgcatcaggtacagtcgataagtgaaggcttaggtcccagagggcgacggcatatgaaggaggagacgtcgtaaacctcgaggtaatcgcaacagaagagatctcggaagaaaagggtgtttctctaatgtatattcccaggagattatagtcgatagtcgatcagtctaagtttttcacgagatctatctccagagcatatcaagttaacttacatccgtacacagaactgggtgggttcgacctgaagcatgaccaaaaggccccctctgagagcgatcacaacccactcaggagtctcgccatcggtcacagcaccagctacaatctctgcttgatcaactgatctccaactggccttcaaagttccgtctttggcgccgaccagaaggacttctcgatctgtgatctggatcatgcaatcagagagagcgggccccgaagccagggtggttgaagtccggcaaagaccgggaaggaaagtggagggaagaacgcttggagcctcctgagctgaagacggcaactgtaaaacaactgttgattgaggaagagcaagaaggaatagatcgtctctttcgctagaacgatcgaacacgaaaccgagttcaacgatatgatcgagatactaaagttgaattcgagtacatgattaagtctcaagcaaggggaatctgactcacattggcgcgagatcccaaattccggaaaccccttcgagtccctttatctctagatctgattggaatcctgcacctttctgaacgacgcttaacgcacccttgttcatcccacctgcacagactacgatcttgccctcttcatcctcttcctttccacagagatgaaaatctagagcaggagccaaattaggccagtcgcttagaggacggctgaggtagctttgtttattcgatgatggatcaggagtagattgtatattcagaatttgcgaggatgagaagtgagagccaatgaagacataagaagaaggaagactggtcacgctcgtcggaggcgaagacttccgaggcagagatcgacgtctaaaggtcagtttaaactcaaacatcgagagcagcctgctgaagagactcacctctcccaagatcaaggtttcgatatcgttgtatgtccctgtagaaaggcttttcttaacgtggaccaatgtcaattgtccataagagtctcctagaagaattcttgtacccgtttctttggaatcaataatgtcccaactgcatgcgaccccatcgatgaaagatttatcagtgagatgaatataaaaaactttgatatctgtggatatgatttctgaacctgtatctgtatcggaaggaaaactcacgcaacggtaacggagaacggtagtgtcttggtcaagcccttcgtcgtcttttggtcactctcgagtccactctctcttttcttcggtccaggaaggatgcttgtgttctgagaagtgccagaagagctggctcttcttcgtttcccttttcctttggcttcagtctctcttagctcagcggactgttcgttcgatttccttttagaactctcaacggacggagttggaatatcaaatacggccagttcggtctcgcctacgataaggatgcctcctggtagagctattagatgggacgaggacaggtcggaaggtctgcaagtgaatagctcttcgccattggatagagaagataagtccttgtttaggaacgaaacggtgtgtgagacaacagagatctctcggtgaggagtcaggtagagaaagagtagagtaggtggaatagattggtctatatcattgaggaatgagagtgatagaaggttgtactccttgattctggttgacgtaaagctagagttagctcaatcggaaagcacgagtatgtacggaaacatacgaactggacatcgaacttgagctggacaagtccatttgcttttttctcgtcttcggctgcgaactttctcctggcacctcctgtgggcattcctcctgtgggcgtacctctggacggacctgacttggctgccacatctttcaactgaataattgtgatcatgcccgtccagagccctacagccagacaacctctctcctgatcgacgatgataccctgccaaaactcggcttctctgatgcccaccggctgagtcatctcgatccgatcggttacatccaacgttttggtctccgagttccaaattgagacaatcaacagacattttggatggacgtcaagcaagagaacgaacaacgtcggaccgggctgccgagccagatcggaggagggttggatgatggtggccgcaccaagaggctttccccaaagaggcacatcgtatactttcgacgggccggaaggaaggagctcgtgtacctccaatgaggctgatcgaacgattgtcaacgatgtatgatcgggcgatgtcaaattcgagtgaacggaatgcgtcacagaggccggacgatgggcctatggatacgagtgcaattgcatacgtggagagaaggaaagactatcagtcaacaggaaagcgaaactgagcgggcacttgattttgtctacctaccgttgcaatgtattccatcgcgtgtgagatggttcgtctatggatatggtcgatgctttctggccatccagatcttaatttggctcggctctgatcgataagatggagatggagagtggaggtggagggtgtcttacgtaattacctgcagtaaccctaaccctaactctacttgaactgctacctttgtagcctatccttattggtacaccttgtttaactgttaaacccatcacctcgtttatttgtgggtggaggttgcttgcttcacagacgtttctctgtattggaattagacactgacctgtgtctgtctgtggttacgagatattgatcataggaagagaaaggaaaaatgtgtatgcctgttacctgttcatcctgttcactcaccacctggaaaggatgtggttcgttcttgtttcctatcttctgtcctaatgaagcctggattgtagctttcggttgactggtaattgaaatccatgttttgtgatctgaacaaaactcaatcaggccgacatatcgatagtgcgctccaaggagttcccgaggaagagcgatgctctggatggagagaagggaaatgcctgggaccaaggaaggatgaactgtagcaaaagagttgtagagatgaccatgaacccgttgatccactgatgcgtctatctattcgaccatgctctctgtatctatctccatctttatccttgcctctgcctctgcctctgcctctgcaactctcatctcccctctctcatcatcttcagctctatcgtgctctctgtatgaatccatagccaagcgtggtggttacggtgtgtaacgtcgtcacacaaaagctgtaaggctcggtgtttgagttagtaacccagtggttacccttggttcacgtagtgtcacttaggctcatactgagacagaccagactatccgcacgataattgagataagaggtttctgcaagaatctcagcttgaagaaaactcttatccaagaaggcgcgagagcgtccccgttttatatcaggacccctcgcgcatttggtctgccactaaagatatacatatgacgagcctagagaggctcgagatcacgagaactaaaaagatgaagcatgaaccatgcaaactagagcatgatggaaaatggacgaagaggcataggggcttgagggaaggaacagcctgtaggggtaacccacgaatcagatcacgtgacacgaaacctttacccctgacaaaagctgtacttgtcagggtccgggttcagagggtaacggggaggttacaagaatgtaacca

SEQ ID NO: 1981 - DNA, 18989 bp, Xanthophyllomyces dendrorhous
caggtcacatccctgacagtacttcttacattaaaatcacgtgacacaccccgccagcctcttgtctccctagttcctcttgtccccttttccttgccctccactctctctccatcatcatcctatcagcctctgtaggatagcaaccatgtcgtccaacttgatccttcagcagctcatacatcatgtggacgcctcgcctagccaggatactcttcaggtgatcttcaactggtcagctgcgaagcttcaggaacaggtcggtccaatctccatctcgaagtttatcttgtcgttttttcttcctctatcttttttcttgttctatattctctctcgtcttcactggggcttctttttatgctgccttgcgtagatacctttccaacacaacgccttcgggctcaggaacagagatctatactgtcgatatctgatgcataatcctggctgaaacccaagagatgggaaggagatggactgaattttcagtctcaagcgcatgtttgatgatgatctctgaatgtttatcaaacctctccgtcaaccctctcctccggatatcattcaattttatatagacctcggatgagatggttcgatatactatagttcaaacgcttgaccgttttctcaagcaatggtagtttctgatcaatctgttttaccgcgttgaaattctatccgcattcttagcgagcgtctacctttgctccttcttcctctatcgtccgaggccctcctatcggattcacctacaaccaaccaccgacgaacttacagcctgtccagtctcagcaagcaaccaactccttctcttccgctccggcccctgcgcatccttcgtctccctcctcgactctggcctcccaaggtccttcctatacccaagcacccccccctagaagaggctcggccgccaacacagcagccgccaattctctcttccagaatggaccgtttggggttgattcgacccctctgtcgtccgtctctgaaaacgagatctcgggggagacctcaccatcttcaaagtccgctcagcttttcccgcctccatcgttccctcccgggttctctgccggacgacgaacgtctgtttcggcagagtctctgatgccttcctcatccaagtcggccaagaactcgtttggggcgtccccgagtggatcccacgaggcatcggagaaactgccagtgtacccgaagggtgcccagcagatcgctcgaatcagactctcgatctccaataactttttgtttagaaacttggatgacgagcaggagcgagacgttctgaacgctatgcgagaaatcaagattcccaagggagagaagattatcaagcaaggcgatgtgggagattacttctatgttgtggaagaaggctcattggatgtgttcaaaaagaccggagatttcgatggagatgatttgggaaacaaggtgttcaccagcattcctggaactagtttcggagaacttgcattgatgtacaagtaagtgtttcctgatgatcatctcccaagcgacaagacactagatgctcatctcgtttcccttctcctgctccttctttgcatgtgatgtgtcgcgtctcaagtgctcctcgagcagcatccattgtggctaccacaccgtgcactctctgggctctagaccgagtgacctttcgaacgatccttctcgatcacacgtcctccaagagaaagatgtacgagtctttccttggctcaatccccatcttgactggccttgagccatacgagcgagccaaaatcgccgatgcgctcgagacaaagacttacgacgacggacaggacgtcatccgggaaggagaggttggagaggaattcttcatcatcgagagtggtcgagccaagttcacaaagttagttgatgggaaagaggtcacactagccgagtacggcaaaggagattacttcggaggtccgttatctctatcgtctcctccctcttatatgtgtctacacgaaaggaaaaaaagggaacaaatatatatttttacaggataactgatctcatcacacatttgtgtatctgcatcacagagctggctctgatcaaccgagctcccagagcggcaaccgtccgagctgtgggcggtaagcttaagcttgccgcgctaggcgaaaaggcattcacccgattgctcggaccaacgaaggacatcatggctcgaaaggccggagaacgatacggtttcaagtaattcatctggaacggacactgccagtctcacgtcctctttaattgcttcttcgttgttgcttccaccccttactttatttcgttttccaatgtcctcaacgtctgaactttacttctcttacatcactttggctgccgcgtttgtctatccttcctcgacgaacgtcatcacccttcttcatatgcctcctatcttctttaatttttagtaacttgtagttttcttcttccttttctcctattcttctctttaatcgctcttcttttccttcccaactcacctgtcatatgatgcgtatgcttgcttcctttggtttgattgcttcttcttgctcggctcgattgagagtcgaaacaacttgcatgccgttcgtgctgcgcgtacatggctcttatcccaagaccgaactgtgaaaaaggcccgcaaaagatgagaagaagaagaggaagaagaagaagcagcagcaacagacacctccctctacccggatagatgactcttttccgcctggcagaactcgcactttcaccctttaggtctgcagatctcgatgatactttgaaggagaccataagatctcaggacaagagtcgatattataaaagaaagatcgatatcaatactctgagatgagcgaatgtaccagaaagaccaaaaagaagaaagaaggaaaaaagaagagaaaggaaagaaaaaggatgaaacaaagcgaaaccgaaaataagtgctagagagaatgatcgaggtcgaaagagcaaatacgcaaaagaaagcacaccggtcaaatcaaagcattccctcaagggaccgaaagtaagagagatagtaagaaagggattatagccgagcgagatgaagcagtcggaaagaaaggaagaccaaatgggaaaagaggaagagggtcgattacaacttaattgaagctagctcagaactgggtaatggtgattagtagcggagggatgatatggcatgaatgaacactcaaactgcaaggatataaggagtaagaaggaggagagaagaagagagagagatgaagagggtattatggaaagatctgaagagacgtatcattcgaactaagatatcaattgtgtattcatatgagtcagtgattaagatggatgctggaaactgggcgtggttgactctatcagtcagcatatctgtcgataacaacataacgtaattaatcaggtcagtctattcgcaaagcaaaacagaatggttaccgtgcgagaaagatagaaatacatacaacataagcttgtctgtcctatccaaccaagctctgagctcttgatcgttattcaatctctttgttgccactgttcccggcccagatcctctcgatccagggaccaagcccatactatctctataactcaacatcctcgtccctccgcccaacctgtctgccactttctcgaccaactgatcgaacgtgacggatgatggcactctgatagcgatcacatcatccgatgcccggtcaaacactttgatctttttgtaagccgcagttgcctgtgccgcacccggccccatttgggctgatacggaaggggctgccatgggagcagggtcggagggcgttaatgtgcttaagctggacagtgtcgttgggttcggaccagacccccaagaggatgaagtaggaagaccgtagtatcctgctgaatgctctgccgattctggtcgactggccgtttgagaggtgttgataggtggtgggatagtagaaggtgttgaaccaccgtaagaaggatcggatgaggaagaactgtcggtattcaacccagatgactgttgggcggatagataactttgtcggtggctcgttggtcggtaactactcctttgggcctgactcggcgtccttctgtgacctccatttctgctttcatcatcatttcccctctcgttcctgccaaccagtcccattccacccaatccttcatccaacaaaggcggcagatttctctcaacttgaagttccatctctgcagcgctcctctgcaacccggtctgatgatcgcctacaccgggactaaggaatgtcctgacaagcgcgtccgaaaggacgtatcctgctccgatcctgtgaagggcgatgagcttttttacatagtcatcaagatcttctcttcgagtattggtgattgcatcgtccacgtgctccaatggtccaggcatcaacggtaagattcgagtcgattgttcaggcgggtgaggcgttccatctggagctcgacctgcttcagcaaggaaagtgttgagaagagaaatttggaaatgatagaaatcattgtagagcctgaagacgatgagttgggtagctcgttctgatggatcttcaggaaggaacacagcatgaattcggaagagatagtgttcgtcttctttatggaacgaaacaacactggcagaagtaaacgtgccgggaggtaagattggtatatcttcatctgtcaggacggattctgagaccgaaggatgaggtcgatgtttgatatgagaggcttgaccagccgccggttgagaccggatgtcgaccgagccgagccgagtgtgagaagcagacgaggctgcagaaggttgtcgatggtgttggtactggcgctgttgctgctgttgattctgattcacccctcctccttgagcccaagcttcctgcccgttccctctatggatggtgtgatcagtctgaagtgtcccagttgactgctggttcgtaaaatcaaaccgcccaagcggaatggatgaggctttgtactcgtccgcctttgctttccattcatccactctaggaatcgcgccggttcggatgatttcttcaatgttatctataatccgacctgaagccggatctcgaatctcgacaaacgtgactggaatcaaacccggtccacctaaacggcctatcggcttagctataaacctgaacgggttgagaaagtgcaaaaaatggtcgaaaagcgcgtcgagtgatttcagaaagaataagccaagtttcgaggaaagaaaagaaggaagaacgaaccactcgtggttgaagtgagcgataacaatgattggttctcccgcctttgcttccagctcatcaggtcgttcagctacaaaatcatattgtacaaccgcgtacaatctacaatggaaacaagagaaagaagacacatcgtgatcaaccagtgatgttcaatcagattggtaatcaatatcaaacccagtcgttcggaggaagaggagaagaacgacacgacatatacgtactgggtcaatccttttcctggtggttttgatgaagcaggcagtgattgactgaggagcctcgagtgttagtcctcaaagactaagcggcaatcggagaagggcgaggtaagaggaagataactcacgtgcttctagccggttcacgagcaacagcagcagcagcagcagaagagcctgaagaaggcattgctcctcctcttccaaactcttcgaattttgatttgagaacaagaccgcctacagaatggtcggatgattgaatcatccatcaattcgagaggaataagcaacaagaagaggaagagaaaacaaggaaagaggagtaagtagaaagacgaaggaaaatgagatagattagaacaaggcagagtgacgcgtccaacgaagacgaggcttgatctacaaagaggcacgtacgagcattcgagattgtatctgctccagatccatccatcaccatcgcaagagtaggagcataaactcgatcagaaaaactcatgtctcatctctggacgaacagaacacatgaaagagatagaacaacaagagaaagaaacaggagaggaggaagattaggaaggaaaaaaagacatactgagcgcctcatagaatcctggaccacccctcggatcatccttctcaccaacgacataaaagaaatcgccctttacgaacggtaattcagatggagagctggaggaatggttgtcgatcgctctgatgaccttcttcggtggttggattgaagccgatggttttgataacgatggtacaaacccggctgccgtcgaaccagaagaaccaccactgccagaaagcgcaccgacggccgaagaagaagaggatggtgaggccgactggtctttcgtcttgtcacctagagatctacgaagggacttcatcgttaggaagcgagagcaaacgaagactgagaacgagaacgatgaatggggaggcgagccagaagtataggtagagtgaaggttggtcgaacgacgatccaaactgaacggttgtctatttggtgagcttatgtaagcgttccttttctgacctctttgcccccaaattacaccccttgctcacaagattgatacacagttacaaatgacgaagttgaacgaggattcataacgtcaactagcatagaattaccatatcaagcaagagattaacagaaatcgagttgaggataagagacgatatcaacgaagaaattagattgactgagagaagaaaaatcgaaacaggaaagagacggccatgatcacacagagacagagctcacaactcgaattcaagcgttacacaaatacagaagaggaagcaagagaagagaagagaaggaattgaagaccgaggacagacaaagacgtaacaagacaagattacttagacctctcgaacccagctgccatcgagtccctcaacactactcgcctccccttcctcgtccgcactcccttcgtttccacttccacttccgcttgcggatccggtcgatcgtgctcgtgattttacttcggttccccctacttcaggccccttcgatttgactcgctcagattcagccacatcaggggatgatcgcttgagcgcagcttcgcctgctttccgcgcggcggccgattgctcggtaggaggtcttgagagtggatgcgtcaggtggtgaggcgacgtagacaagtgagagagcgataaaagtgactggagaagtctagtgggcagaaccaaaggaagcaaggtgtatgtataggctgagaaaggtcgtgttaagaattcaggtttgtcagagtaatcctaatcaatactgtcgttcacgaaccaagaaaggaaacaaaacgacttacaaccagctccaaccctccaaactcttggcccctgtttgacccaccaagccctgtccttgcccaaaataaccttgccgaccgcgttctccaacacctcaaatccgctctccctccgtcctccccaaacccagctgacaacccagtccccgaaccgagcggcgacgagccgaacgttcgccaactcgtaccaacgtccctcagacctcaaagtagagatcggagagatcagtccagtctgcaggatatgcaccgagacggttgcagaagacgacccagcattcgctcgatcaggcaaagaactggccatactctcaagcgcctgtttcagaggcaaattgtttcctctgatatctccactaggggtatgcccgatctcacccatagcaggaagcaaggcgatgatctttttctccaacaagtcctgaaggaaccgctctttctcggccaccttcgaggcctcccgtagcgagttgggcaccaccgaaattggcaacggagcgagcaaggtcgggagaagtgcattgatgatggccatcggagtattcaacgtcgcctggttgtaggctggagagttcagatgagactgatgaggaagcggaagtgagaggagagatatgatcgtggtcaacaaaggaagctggttggggttggatgggtacgggtcgcctgaaacgtagacagcggatattaatgcatagtcaatgtcagcgttctgatcagatcccatttccaacaaacaatactaaccagcgatgttgatagggaaacgcatggagagcacacccttcaaacaggcaaggaattggccagctgaatcaggctatacatccagggcagagtagaatgcaaagactcagcaaaagttacagagaggcatggaacccagggaaagagacaaaggccgaaaaacctcaagaggaaactagaaaactcacgtcctcaggcttcaaaaacagtgctcgaatgtaaccgtgtcccagattttccaaggcgacacaggcttcctttgatgagaccgaagccacgacgatgaatcctttcgattccctgttcgttcaaatcggtcgaacatgaagaggaagagaaagaagcaatataagcatcgctgcagacacgagcctatcatcattcagatgagatgaagaaagcagactgaatgaaagactaacaagtacgtcgctaagggataaccgagctcggtcgaatctgccccaaggagcaggacgacctcccttctatcgcccttcttgaccagcggtctctcactagcctctctaatctccttgacgtccgtccacactttaccagctccgttccaaccatccatcacttggtcccatactgctcgtcggcgacgtggtcccaaaccgacatatgttgccgacagagctgtgaccgtcagggccgttccggttagtagatatctgtttcgatggatgagagagcttgaatgggtctgaagggatccgagaatcgtaggcggtggtggtggaggaggagcgagaggagcggccgagccaacggtatttagtgtgggaagatagaaggataagagttcctctggagaagatatccggtcaacccgcaaccacccgatgacacaagacccagaagttcaaaagggaaaaaaaattaaaattaaagagaggcaaagataaacgtaagaaacaggtttgtcgaaaggtgggttttctcaatagagcatggccgagagtaccgatctgacaaagagtgtataggatggacatcatcgaggcaacaagaaggtggaacgcacggagatcattaactgatgtggccaactctgtcctcaagttggactggagtgagtccagattgtgagcgaagaagaagagctgctgctcaacttggttaatcagactagggtctgacatggcaagcggagagataagagtaagatgatgaaaacaaagcgcttaaagaagggtgggatcgagatggggtaggtcgtcaacaggtgatggggtggagatggtctagcgtagatagcagagccgtagggtggaaggaggatgagcggacggcgagaggtcagcggagacacgtgactttcgtcggcactgtccggcacacatccttttactagcttttcctcaaatgcttgttgtattggatatgatgttatctcagttaatattgatgtacacgcttcagatgtaatatgtcgttcgacttggattgaagatacaagatacaagaagaagtggcaccagaaggatgatgatgattgagaaaaaaaaggcatgcattttcacaattactattttctctgcatgagtgcgggcgtctgctttccacgaggtcgctctttgacgaccctgcagacaagagaaagacgggataaacagacggccgtaccaacgtcatccaattgaatatatcggtcagcacaccagagccatgaaagagagtgttattggtgttgtcaaagtacacagacattttgtttccgttcttgtgaccattgactcctggtttcctggttcggattcctcgggtaagccatccgtagatcgatttggggtgagtgttggacttggactttcctcgtcctcctccgtggggatggtcgcatctataatgaggagtggtctcttcttgtcaatacataatctggttatcgatgtggaaagataaggaacatacgcattcatggctactccacggacccgaggtcgtcgtccgagccatcgtcttcggccggctttacccaagttacgctgaccgtggtatttgcttttgacaaagacagaaaggtagacgtagagggcaaacaagatcaggctttctggcggacaaagtctcaatcatgcgattcaagtcacggagacttacttagagatttgaccgatggtagcgaacgcgttgctcgggatcatcctgacctctccgctctgaagcttgacgaaactgtaaatctttcccttgtcgtccgctttttgatgactgaggatacttcccgtggtccctgcacttctgcacaaggccatcttactgtctgccctgagagtgatgttgtgaatggctgtaccggccggaatgagtgccagctggaggacgttaccaggcttaacgaccagggttcgaagcaagtttagagcgaacgatgggttcgttccaaaagtcgtcgattgggtatacgtcgggttgaacttgggagggaggatagaaggcgccttcgtcttgatcggctcactaatctgagattcttgaatggcaggggccgaggtgcttgagaacgaccgctgggatagcccactggacaatggtttgggagtcgacgaagtttgggagagagtaactaggttttcggtggctgaggtttcgaggtttacgactgagagtcatatatttgattacagcagtacgttatcaagccatttaaagtcagcaaacatacactctttgtgatggagaataagtgtcaaaggagaaagtaaaagaaaaaggtaaaggaactcaccctcgggaccttcaatcaatgacttgggctcgagaggaactccaaattccaagagatgcctggcctcctgcttgataatccatttttttcccctctcctcgacttcttcctttgttctcgcatcacactcctcatcccactgaggaacaagccctctggggataccacttcggtagctcgtcaagacgtctccggctcggataccatcaggtgcgaggacataactccagccaccatgaggaccaagaccggtcctgtttcggagaagacaaatatgagccgatcgtccggggtcgtactctatccggacaacatcctgcggaccgctctcgagtcgcatgaagtcgatcagtcggtgtcgccgtttgtgacctcctccaatgtgtcgtcgaacgattcgaccaaactcgcctcgacctccgttctttcgaacaggcgaagtcaaagccttgaatggctttccgggccagagccaggggctgaaaggcattttcaagtgtcgaactccctgtaaaagaaagaagggagagagacgacatgaaagaaggacgcagagaacagaggtaggagccaagtttagatgtacgggtttgaaagtcagaaaaaaccaatgaaacaactatgaaacatcaaacgaaaggatatagaaggcaacttacaggcgtcttgggaactccccagtttccatggtacttgaacagagggattgctctagacccagcattagcgctgttgaacgattcctcggacataccaccgatggaagcatcaaagtcatcgagccgatcgtcatttctgctctggaaggagaaagagggagatgacgatgaggacgaaggttcagaattcgagatagtaacaggtgcagaagacgcatcggcagatccagcagtggcagcggaagaacgagatttcgattgatcctgcttttgcttctgagcgcgaagggaggatcccttgccgtagagggcagagagattagcctgaccagaggacccggtagtagaggcgtatcgtacggacagcagtgcacgagcctgagggatagagactagcggccggatcatctttctttgtgagggaagagaagaagagtgtgcgtgtggtgagtagaaaagagccagaagagaaggagaacagagaaaaccatggcgtttctcggtgatgggtaacagtggttacacaatcgggatacatggttacatcaccccttacccatcacccatcacccatcacccatcacccgccatccatcatcggaaagcggttcaaaggacaccaagaatccttgaacgatggcgagagggacaaagagaagacgggtagcccccaaagaagcaaagagagctgaagaagggaccgattgggcgttggaaaaggagcaacaaaaggcagggtatggctagtgcgagaaagacagtatcgtacagcaaggcacacctccgatccgtctgatgagatgaccgacccaattgctgatatcatggccagttgagaagagtatgcgcacattctatcatagcatgctgtctctagtatcgaatctagttcatcagcgacgagaagaacagctcaatacatgcgctatacgtcgtctctcgcctctaagctgaaggccatcttcacaatgtaggttatctatccattagattaactgcgcaggctgttgaacgttgctgctgttcttacctccgcttagcatacaaggatttcattcactttcgatcctattctctcttctctctgccatctatcttctctgtttcttccttgctttctttctttctcttccgcttctttatctagttcttacgctccgtttttgtctcggcacgccaaatgttctcaaagaaacaaaataaatctgacaatcggtcatctctcatacttggtgacccccaaggctccccgtcacagccgttcccttcgacatcgcctcccccacgtcaatcgttccagcaacagaattctcagcctgactatatcggtcctcctccgaccaggtcggtcgctcaaccggcgaaggaatccaaaaacaggctctccttctttggacgtaataaggacaaagacaaggatacgaccggaccccaagccggtggaggtaaaatgtctagaacgacttctagattctctatcgccgggagtcagcagcaacagcagcagcagcagctgttgaatccagtgggcttcggacaggacctcgggtctggactaggcagaccgggcgaaccggtcagacaaacagatctccgaccgcagagctcggtaggagactatgcgtccagctttggttcatccgtcaccccgcctcctgctaccaatgcccatcagcttcgagcccaacaacagcagaattatcgtcagaacggcaatatacctgctcagcagcagcagcagcagaaccagcaacaacagcagcctggccatcgagcttcagcatctgtctctagctccttgatgaagaacccagcgctgcagagcgcggtcgatctcattaacttgcacccaaacaaggtacaagcccactcccctctctttttgcttcgacatggagagaaagattctgagcggctcctttttcttgcaatcatataggtgtacgctacatcgcctcctacgctaaaggtcatgacggccgccagcccggacgggaaacacccaaagtgagtgtgtatttctcacagcatcttctacttcgcgcgtgcattcctcatcattaccttttccattgcaacacaggaatggtcctcctggaacacctggaaatgactggcaagaagcttggatcgagttgagaggagtgattcttcgttagtggttcttagtatccttcaacggtgtttccttcttctcgcttactgatgagctaatttacacatggacagatacctggatcatgtcagaggttcaagaagctaatgctagaggagaggacaagcaccctacacgaacaaacgtacgtctccagcccttttttaaattcaatctgaacgtgtcttctataaacggatgcaaacccttcacttgctcatgaacggcgcttttcgtcttttagatcaccgacgcctttgtcgatctgattcaacctctgcctccgacgaaacatgatccccaagccggtcctcacccgtttgtattctcagtcaacaccgctggaatgaacagtgtactattcagttgtccgaaccaggagatgatgcattcctgggtcactgccatcaggctcgccggctgggaaagttctagattaatggagatttatacgggtcatttgtcagtaacttttcccgcacgcttttacctcaacggctggacctatttcctgacttctctcgtctcgcttgatggctttttgtcagacttcgaacgacaggtgttcatcctgctcctctgggctccgacaaccggcttgctggctggtttgacgttcgaacttttggctctcgccagtggacccatctctacgtcgttctcagcgtcgatctcgagaccaacctgactggtgatcgccgagagtcaatctctgacaactcgtctgtcaaagacaagtcgctgtcatcatcggcaaaatcaaagaacaggctgtccagaatgttcggcggctcaaacccgacagagctcgagtcgacgccttatccacccgcgccgggtgaaagttcacccgttcgaggaaactccttgaacaatcgaccagtcggattccccggccaacacacggtgaccgcccaattctacaaacaacccccaccatcaaagcagaactcgagaaactcggtcgcaacgcccgtcgtaccgttcttgacggtgactgatgtgttccaggctctggcggtattcccagaggtcgaacgagagatcgagaattcggccatgttcaaaattgaaggaaagctgagtggagcaggtatgggtagggtcaggagagatgaaggttggatactcatgatcccgatggaggaggatccgaatggagaagggttgaacatagcaaagagagcggacatgatcaaatggttgaccggtgagtgatatgattttttatatcttgatcactcctgggaaggaactatattgtctttctgttacagtgaactaaccttcgtgcgctatgttggtacgcgtcgcagctttccatgacgcattcggcctatacggacgacctggacagtactcttgggatgtcagggatccaaaatccatgttcttcactcaccctgtaagacatatcaccatctggtatattgcgagacttaaatctaattataatcttctttcttgacgttttcttctgaatctatgaactcttcagaacggaccttcggccgaggaactctttttaaccaagccaattcctaaccccgacgagatctctatctcaagaccttcttttgtccggtctcgatttcaagatatcctagttgcttcgcttccaggaagttccatcctatccacctctcaacctcgagctgaattgtcccctgccccggcgcctacttctcctgcaccagcgcctgtagcttcgcctgttcctctgtcgtcacctatctcacattcggccgcccaacaaggccagttcatccctccttctagagcggctcaacaacaacagcaacagcaacatcagtctcaacaaatctcatctggtgctattccgcctgtcagacccacgtcgcgcgaacctcttgacgcttgggaaagagaacgggaacgggaacgagagcgagatgtgggtagaggggtccgtacggtgcccaaggagtcatctccaaatctaccacagacgggtatagagaaaagtttccatattcctcctttggcgttctcacccgacaaaggacaagattcaaatcgcaacactcctcagctcacgcttgctccagtcgttgtgcccgctgcccctatcgatcgagcacagttcgagcaacagcaacagcagcagcagcaacaacagcaacaaaaccagcccgtacaaaagtcgttccctcccaggctgacactcgacacagagaataagccggtaagcttccataatatagagaagtcatcgagtcttagtcgaaagaatcaaccaccgcccattgctatcgctgctgaagacgcagagtctgatttggcctatacggcctctcctgctcattcctctcgcccccagatgagtgcatcgtcgagcccgccttcctcaccccaaccagggtcgaaagtcaacacctccgggcgcggttccacaacctctattcagaatagagagaatagtcagagtatggaaagcagtagagtgaacaccgcttctgggttcagccccagtatgtattcacaaagttcagcgccctccatcagtgccacgacttggactcagagatcgaacccaacttctccgcccgtttcggtcaatcaattaccgtcccctccgccagtgcatggagaggttggtgcaatcacggccaacagtgtacatgaacgaaattttgctactcctcttgcttcgtttggcccaatgacctcatctccgatagaagtcgatcgacaacaacagaagcaacagcaagttgatagggccgagaacaggttcaaccattcgggagacgaaagcttcaacgaccattcgtttgtcccgcttgagatgatcgaaaccggactgccgacagaagaggagctgagggcacgagcacaggcagaggagcagaccaggttggcttcggttgcccagcaagagcagcagtaccaaccagctcaggtacgcctagttctcttgtctggtaacatgactttcacacttttgctatgctaatcacctcttgaattttttgccctgaattcctcttggttgttcctgtggaaatagaaccagggcactctttcccccaagagagaacgggtcgacctcggacggcgaccatctggtgctcgagctgctcctcctaaaagaaacttctcagaatccgctacttccatgaccactgtctctgacgaaaataacgagcaagctcagctcgacaacttgtcctcaggacatggttccaccgatcacaatgccgatgctttagcagctctttctttcctcgatgcatcctcctcccctgagatcgttcgagcccagatctctcctcgatctcaacctgccctttcgaagacacatgcagaggaggaaccagaaccggaacgaacaacgtcggagatactctacccttcttcattcggtccgagtaagagtgcagcagaaaggagagccaggttagaagctgctcaacagcaacatcaggatatactgacaaaaccgggtaaagctcgctcagctggtgttggtcggtcgacaaagaaacctgcaagagctggtgcctggatatcaagtagcgacgaagatgaagaagaggaggatgaagatgaagattctcctgttgttcaaaaggcagttccccgaccgcttcctataaacccttcgatggccaacaacggcggccgacctgtgtcgactatgataccacaatcccaatctcaacttgctcatcaacgtggacaagagcagggtggtttccaacctcctaacccaggatttgctaacaaccagcgacctggatcgcgaaacagcgaaagaggcggttcatcgtacggacaccaacccgtccaatcgtactatcaagatcgagatggggttcaacaacctgtgccccgaccggctattgctcaagctaaccctcgaggaatgtctcaaggacgagcctcggtgtggaatgctcacctcgagatggctcatggaggaaaggctgagcaagatccgaataagttcgtgacgatcgaggaaccggaagtcaagttgacgaaagccttcaaccccaatgggttacttcaagctggtttggaagatcgggacgatcggtcagcgaagaggcaagaagaagtcgccagatcgagtggagtgtcgctaagtgtgtcccctgtcttcctattttgtcgtgtttatatgaccattgtgactcaaaccctgtttgcttcttttccttcgtagtcaacgttccagcccctccaccccctcctcaaaccggtcttctaggcgccatcaccgctcacgaacgagatcgagccagagatggtggagtaggagcggtcctgaccgaaaaagaacgagatcgacgactggccgtgagtctttatgatgccttgtacctcatacttatcttgtcactgacaattcccatctcacttgtgcctgtcttctgtgctcctatctttctgtgcatgaattgcaccggacaggaggaacgagctcaaaagatcgatattctccaacgagagcaactcgaggccatgtcccaggctggcggcgggttcggctataatgcatatgggacacagggatacaacgctccatcacctatgatgggtggcatgccaggaatgatgccttggggaatgggtatgccgcctcctatgagtgcttacggagggggatacggaatggaccctcaggcacaaatggtatatttcttctacctctaactgtatctccagatgactaggatctcgaaaggctgaatggtttgttatttggtgactcgtacaggctgcaatgatggctgcccaatctgcttatcagcgtatgtttttgttcaacgtgtttctcttctcgatttgctctgtacttactattcctcttccccttcttacattatcatttatgtctcgataaaccacagaggccatggtgtcttactctcaagccggatcagccatgggcggcggtggcggtaatggtggcgaaggtgaccaagaccaaccgaaccgatactcatctcctcctctttccagctggggtatgcccaatatgatgccacctcaatggggatacccgggatccatgatagctggttctcaacctatgacgcccatgccgtatatgcacccgtcaccttcacaaggatacccgggaatggcgagtccggtaccaatgttcaatgcagggcaggggatgtattatcctccccaacagccgatgtcggttcatggaggaagtgggtttgggacacctgccgcaggaggaggaagtgggcgcgcgagtaggaatgggaacgagtcgcgaaatgggaacggaaatgggagtggaaacggaaacggatcaagcggaccagggatgggaagggagggtcag

SEQ ID NO: 1982 - DNA, 116711 bp, Xanthophyllomyces dendrorhous
gtcgtagagagtaactcccggctgtcgactgaatcttctgtttttcctctttctttatttttttttccttcttctcttgtgggatcccttcggactgtgagacgtgcctatataccgatattcctttatacgcactcctctttctttacatcgccttcgactgatctggacatatgagtaccccgcgaaatctagtgtagtctttctcttgcctttcatcctaatctatcttttttcttcttctcatacatgttacgcgttttctctatattattctcgcataaaacaaacgatcttgatctagtgtgattgagtgtttgacgaatcctcttacccgtctcttctaccgtctcgtttcttgaaagtgtatcattttgtatgtatcacaagaggacgctcctcatcttcttacacaagaacatatttgtaagggtctgaggagaggaaagatgatacgttcaatcaagtcagccgattcgtaccagaagaagaaggaggagagaaaaggaggaggagaaagaaacataaaaacaaaatgaagaaagaacatactaagaatacccttcgggtcgtacgtcttcttgatttgcttcatcatctcgatcgcctctggggttttcgagtaatggatgtgagaagctttcatcacactgtattcccgttccggatgcgacccagccacgcgcacaaacagatcggatcagggtggtttagttgattaataaacggatcatagtcaagttgagatgagatgaagagagaaggaaggacgaacccaagaccgtgttcggcactgatcgatccgttctcagcagctgccaaacgaacaatcacgttcagaatcgtatcaaagaagaacagaaatcagaatccataaagaaggagaaagggagagaggaaagatcagagagcataagagggtgagccagatcagacttaccggtaagctcgtagatgagaggctcgatggcagcttcaacttcagagtcccacttctgagcggcgatgttgatgtgcaggttcgaatctccgacgtgtccgtctgaagatgaatgaatgattgattcagaagaagaagaagaggaggagtcagaaatatgtgccgaaccaacgatgagatgggtgatggtccaaggcccaagacttacaaccgacgatagccttgatcttctggttgacctcgtccccctcgacaaacagccccttctccgtcaacctctccctcatcttctcgaccaacgagtacatctttggcacaggcaccgagagatcatacttgtacaccgacccacactttccagcagcctcagggatggattctcggagggaccagagagcagcgagctgggtcgaatcctgcgcgagaacaccatcggagatgatctcggactcgagaaggtgctcaagaagcgactcaagcttagcagagtcgtgctcatcgttggagcctccggtctcgatgagaacataaaactcggccttctcttcgagggggtctctggcgatcgctccggtggcgtatttgtgaaccatgtcgaaactctgcttgtcaaagaactcgaaagcactaagaatctctccgacgtgctgcttggtagcagagaaacacgtctggacggcctcgaacgaggaaagtgcaaagagagcaacgtttgtcgaggtaggtcgtcgggggcaaaggatggtgacagcggtgatgatacccaaggtcccttccgaaccgatgaacaactgcttcaagtcgagacctgttgttgatcacaggtggtaccgccatggtagatagaaagaaaaaccaggaagtaatcaattatagatcgaagaagacacgaggattgcgcaaagcaaaagaagagagactgaccagtgttgtccttcctcaagccggctttgacgccgagatcgacgatttttccatcagcggtaacgacctccaaacccaagacggatccatgaagggacccatatcgaagcagtcgaagtcctccggcattggtagcgacgtttcctccgatatggcagctatgattttccaaattgtaaaagacacccggccgaaggatggcattgttaatggcgatagctgcgtctattttcaagtctacaaatgacggaagctccgactcacgaccccttcgctccaagatcaagaggcatcatgtatccgtcctttccgatctcgatatcgagggcttccagaatgcaaccagcatcagcagtcaagacacctacggggcgcaacgaaccgacgaaagcaaagagggttaatcgaggagccttgatttggaggaaaccaaaaattaagaatcgcaacgcaagacgaaccagagacagaatcgaaatttcggacggtgttcaagttggagaggttgaggatgagctcatcatgcacgggaaccgatcctccaaccaagccagtgtttcctccttggggaacaacggcgacgttgttatcgttgcaccacttgagctagagtggtcccaagcccatgtaaatcagacgtttctggagtgagtactgcatcttctgtttctctcatgtcgaagacttgtcgagaaggaacacaaagagagagagagagagagaaggaaagataggttcggacggcggagccgagcgttcaagaattctcggaaagggaaaaaaaccaaccacattagccacttcctgggtagtcttcggcttgacgaccacaccactctttcccttgtacttgtccatccaatcgacattgtactgcaaaagctcctctggctctacaggagtatagccctcagtagcgatggtcgactgaacctgcgaggactctccgacgagcttaaggatagcagagagagacgaaggcgtgatctttgcaaagtccgctcgaggagcgacgtgggaagcgaaccgaggcttgggaagggcagcggccaggcgagctgacgggcgtaagactcgagagaacatgatttgataagagggaaggactttctgcacagcgacttgacaaggaaggcctttgcggacgaccaggagcgatagagtggtggtcaaagatgagcagaagcagacgaaagtggaaagtggagagccgatataatatcttgctgggttcattggctgggttaaggaatcgtggttacgtttgggtggttacggtgactaccgatacgttcgctagcacaacagagagtaagaaagttcattcaagaaacagaaactacattctagggaagcagcctgcttggagtttgatgctacagaacagaagatacggaaacagaatggtagatattaagacagaattcaggaacggactacaggagggagggtatcaaaactaagagggaagcgtccatgctcaaacggcgtcaggagcatctgcgatcttggcctggttggcgatcttgatgctcgcaggggatcgctcagaggcgtttcgaatggcccatgtaagctcataggtcttggcggcgtccatgtacgaggatagaatagacggttccggaccgccctcgatggcgtcgatgaagttggatacctccgagaagaagggatcatcatcagtgaatcggtgaacttcttcgtggtcgtctccaggtcgtcggacatagagggtagggttgttgtacggatcaactagtctgagttggaatccatcagcaaagacctccaattcacacgaatatacttgtccctgtaaagcgacggcgtggatgaactgtccgacagctccggactcgtacttccaggcagcggtggtcactcgggggattcgatcgtgaggaggaatcttggactcgtcgattttgatcttggagagaactccaggagcctcgttgtgttcgacagagtgagcaaagacggtcgagatgtcgacgtcaccaccaaagtatcgggaaagatcacagaaatgcgttccctgctcgattacaggacccatggagatggacttggtccaccaatcgctcttctcgatggcctcgtaagcgcaggcatatcgggcgatcgtagccatgacagtcaagttgttgtcctgaaggatcttcttcatctcttggaccacacggaggtatcgaagcatgtatctagaggcgcgccaagaaaaaaaaagaaagaatcaggctctcgtgctcaacgagtactggatgtatcggaataggattgcgagaacttacccgacagagacaatgttccctcgcttgaccaatgtatcagcgatgaacttcgctccggagatcgacttttcccagggctcgcccgtagcgacgggcttctccacaaacatggccacatccgggaagtttttgaggagctgaagctcgagatcctgaggaggcttgggtccacctcgatagagcggcggagacccaatgacgacggcgctacaattggtttcgataaaaacgtaagacatcagattttttaatccatcgtgtattctgatattaaggcaagatgaacgaactgaggcttcttgacgttcccaccctgaacggcccgagagtaagcggcgacatcagagtagactagcgtgccctcgtaggcgctcttgacgaacgagtctcgcttcttctgaagagcgtcgttcgctcgggcagcagaaggatcgatgagggcaacgaccttgagtcgaggtccaagcttgtgttccaatcggaaagagtggttccaaggtcctaaagagatcaacgcacgaaggcaacgtaagagtttgaacaatgtacgccgagagatatttctctcaacaaggacagaatagaataaacaattacgaaccctcgtcagatccgaacatgatgttacctatagatcgaaacgagtaagcgacgtgagacaaggcaacgaacaacaagtgtgtgcatccgtgagagaaccgagaacaagatcttaccagctccgaccatgacaatgttgaaatcctctccgggagcaggaggagggtgcctgtgagcaagtcacattaaccggtgagagagagtgatgaaaatagaaggatgaatacgaaaaggacaaataggccgaatgagccgaaagatcagtttcgggttcttccgttctcctatctcactaagtctaaactcgggtctgtacccgactcacatgtgcataggagtgatggactccgggtcgatgacattttccggatcatccggatgggctgtctctctccgaacagaactggtagagaaagccctgtggccagaggtgattggtgctctggtcgaagagatggaaccagaagcggaggcccttaaggactgagcgatgctcggatgggttgagaacctggcgtgtgagccggtcaatgacctggcaacagtggcgtttcgtagtatgtttctcgaaaacatgatgggacgtatagacacgagtggtggttagaagagaaaagaagagaaagacattggagaaagaaggagaagggaataagaacaaaaacagaaactacaccggttacgtagttgaaatctttttttacgtggagatttcggttctgacgcggggtcctttctggggacgcctctcgcggtgaggtcatcgagtggtctctgtggaatgaacactcaagacagagaaggaagaaaaaagtaaagaaaaaatcaaggcggaagaaaaaaccccttcataggtcttaacttttgtttcgtctcttgagtgttcatcaatccttgatccttgattcttggtccggaggtttttttgggtagtcgttgaatgaagcgtatgctctagtactgagcatgacccaagcagtcaaagaagaacatactgccacttcgttcatggattaaatgctcttctttctgtggtcaacatatgctcaatctttggtcaatgtacaaaaacttctcgatgtataacaagtgtgcctcaaagatgtgacgatcgatagatgtatccaacagcatgactttttttctttttctttttttgatgaaaattcattgaaactcgaaaaagtaaatgggaaaacaacctctctcaacaaactccaacacacacttaagcggaggtgaaggcggcaacgtgctcctggatggtcttcttgatctgagcctcaaggtccttggtcatggatcccttggcgatctcagcaagaaggggctgctgctgggcggtaaggtgggcctggaaatcggcgtcccatcggacgatgtcctcaacggggacagggtcgagaagaccgttgactccggcgtagatgaggggaaccataacctcagtggagataggcttgtactgtccctgcttcaagagctcggtaagtcgggatcctcgggagagcaagaatcgagtagaggcatcaagatcggaaccgaactgagcgaaggcggcaacctctcggtactgggcgaggtagagcttgagggatccggcaacggacttcatgatcttggtctgagcggcagatccgactcgggagacggaaagaccgacgttgatagcaggtcggactcccttgaagaagagctcagcctccaagaagacctgtccgtcagtgatggaaatgacgttggtgctgatttgacaaaccgagaaaacatgttagaatttgagtgcactcatccgcgatcattttgctccaacagtgaactcacggaatgtaagcggacacatctcctccctgggtctcaatgatgggaagagcggtgagggatcctccaccgaacttgtcgttcatcttggcggctcgctcaagcaatcgagagtggaggtagaagacatctccggggtaagcctctcgaccgggaggtcgtcgaagaagaagggacatctgtcggtaagcaacagcctgcttggaaagatcatcgtagatgatgcaagcgtgctgtagatgggagacaaatttccgagtcaggtcaaagtacaacagatgggatggttgatagaaaatatctcacctttccgttgtctcggaaccactctcccatagcacatccagagaaaggagcaaggtactggaggggagcggcctcagaggcggtggcggcgacgatgatgctaaaagatgggaagcaaaaccgaagtgagaatgagaattgctgacaagagatgagatgattttacgtacgtgtacttcatggcatcgttctcctcaagggtctggacaagctgagcgacggtagatcgcttctgtccgacggcgacgtagacacagtactgatgaaggagaaaaaaacatgagatcaaggggttgagttgaacgagactccttttttgaccaataggcgcgtcgcatttctagaaactcttgacaaaccacttacgagcttcttggactcgtcctgtccgtcgttccatcgcttctggttaaggatggtgtcgatggcgacggcggtcttaccggtctgtcgatctccgatgatcaactctcgctgtcctcgaccgatgggaaccatagcgtcgatgggcttgataccagtctgcataggctggttgacggatcgtcggggaagaattccgggggccttggaggaggctcgtcgtcgctcggcggactcgataggtccctttccatcaatggggtttccaagggcgtcaagaactcgtccgaggagcttgggtccgacgggaacatctgtatcacaaggggagaaagtgtgagatggaagtattttgagtgttggttcgagcgagaaaaagaggtactgaccgacaatctctccagttcgcttgacggtatctccctccttaatgagtcgatcgttaccgaagacggaaactccgctgttgataggattgagaaaagaaaaagcatggtttaaaaaaaaaacaagacaataaaaggaagccgttcggaaacggaaatgtttggtaacttacacgttgtcggcctccaagttcaagcacataccacggataccagaagagaactcaaccatctcctcggcctggacgtttcgaagaccgtaaactcgggcaataccatctccgatggcttttcgaggtaaaagatggggaggataaaacaccaatgaggacacttttcgttttctcgagatgaaaagatgcagacatactcaaaactcgaccggtctcctggacgtcacctccggtagaggcaccagcaattcgggactcgagaatggaagagacctcagaagcggctacaacaggttgagggaaagagtccatcagctttctgaacaatttttgcattcagccaatgaaaataggtaacgtaccaggcttagcggtggcgtaagccctggcaacggtggggacagcgacggaaagtcgggatcggagctgagagcatgaaagtgccggtttggagagatggatgggttgaagaaagcgagattggatgtggaaaaaaaagttttttagaccgatggatagaaaaagggacagatgcgatggacgacaaaaaagatcgataatggcggttgaatcccattgtcaacatgacaaaaacgggcaccgtgaacaagatgcgacggaggtggttgtcaaagagagttgagatggagaaaagaagatcgaccaataaagaccaggaagcgatgggaaagcaaagggtgaaaaacgcaacaaggagaggaaaggaggaggaaaaaaaaagatgggcgatgaaatcagccatctatcgatctgaacaataatcaagcagaatataaaaactcacggcagactggctagcagcccggacggtcgacctgagggcggagtgcatatttgggattcgtgttttaacgaaagaaagaggagaaggtggtgggttgaagggattaggcggagagggcggaaaggggaggaaacgaagctggaccaaagaaggcgtgggcccaaagaggcaaaaaagaaaaagacgatccaggagggcgttacatttctcttacgtaatatatgggatcacgtgtcttttatgggcaaagccgggacgatagaaaaactaatggaatagaatgtttcatagtatcaaagcacaaggcattaggatttttccctgcccttccaacgttcaccgccgttggatttgacctcccaatcagataaagcatcttcgtcgtatcgttttccttttgcgctaccttcagcttggagaaaagagtcacacggagtggcggagaaggacgaggagtttagtaggggaaaaggaaggtattcctaaaagatacgtatgtttagagacagaagttagtttgtgagtgcaatctcaagtgaccgaggaggacctacgttcgcgatagggtgaacataatctggtcccgacacaatgagaagaaagatagatttagtccaatatctagtgggttcctctttttaaacccgcacatcaagatacacataagctcacgaggattgtatttgtatccagcgccataaccgagatccttcatcaagcctgtaggcgcatttctcatttgaagtggaacatcgtaaagctctccaggcgcgcacgcagcttcagcctacatcaactcaagcattcatattcagtcagatatacttgtcagtcttaacaagatagctggtaaagaacggagaaaagagagaagatatgttacccgattgtaagcttcatatgagcgagttgacttgggcgcctcagcaagataggcaacacagtgagctaggttgattctgatcatttcaaacaagacaatttcaccgaatacagaggaaaccccccaaatcagctatatccacagtatcaatatcacagctcttatcgagacttatagaaaagaattaatttacctacactccggccttgtgcacagaatcataaccatcattgacgtatgtgagtacaatccataagggtatatagaggaagagattttaaaggggtctgagcatacattccgatctgttgacaggcaaccattgttgatgcagcctccgagttcgtccattatttatcaatatccaataacactgctgtcagataacgataccccgtgcaaaccttttttacaggcgtttgatagaatgaatagctggaacacaccaacggaagagcatgattatcggccaaaccgatgtcttcggaagccatcactatgattctcctagcaatgtatacagggtcttcaccggcctggatgattttcaatcaataaagatacatggggggaaattgttatttgatagcacgtcgggcatgtatgcgcgcttacagtcaacattcttgccagccaatacatggcagctgacccatctgatcctcgaacacttttctggatagctcatcaaaaagggctttaatacagtccacgaacgattgtctcgtcatctaagttgatatgtcgttctccagaaacagactcacatgtagagccgagatcatatcataccgagcatctccagtacgatcatacctgaacgtcaatgttctctttaaccccttcatgagggcatctttcttctctgagtcccacttccatagacgaggttcaccttgatcagggagtcgagccctcagtctacattcctttgcaatcaagttcaacgctgtctctagcgagttcaaagccacacgacaatccccattggctgatgaggatagagagctgagcagagtgtcgtctaacaacgggatcggaggaaagtcgtttggatcagatttcggggaattcggtggttcggaagctggtggaagccagacctcagaggtgtggccttggtaccattttcgacaagcccgtataagaactttcttaacctcggatgaagatagtttcttgagtgtgatcactcgacagcgagagaggagggcttggttgatctatgaatcagctcaaagtatcacactcaacgcagatcagtttacgatgaacacggtcggttcatagtagatagtacatacactgaaagaagggttttctgtagtggcgcccaccagctgcagaaccccagactcaacgggaagaaggaatacatcctatacagtccaaagaatcatttttctttcctttagaacaaagacccagacaggacagatgaatagaatgacttgcaatttggcttttggaaaatcgatgaatctcgtcaatgaacaacatggtcctctttcccgtcagctttagcatattccccgcctgttcaataatctttttcacatctcccaccccggcagacgtcgcgctgagctccctcaactcgctatcagaatggtttgcaaccacacgagccagtgtcgtcttaccacatccaggaggtccccagaggatacaactgccaagctcgccagctctgatcagatccttcatcagagtcccatcagacagcagttcttcctgtccaaagacttcgtcgatagtcttgggacgcataacctctgctaggggacgtactgccatcagagcatcgtgagaagtgtgttttggcttcttggaaagtggagcgggcgagggagagcgctggcgaacggatgaattgtggtcggtaggccttggctcggacttgactgacaggcgccgtttcagtcctgatgaagcagtgaaagtgtcgacaacggatggcgctacctgggttgattgataactgctggatgtcacagctgcctcgaataaaggagccagcttttgagccggtttgggaaacgaggtggaaatcgcggcagatgctatctcgggagttgatgatctattgccaggtagccactcgcaagaggaatcgagatgtctgatgaaaagattcgccgataagacaacgcttagtatcttgcatgagttctagaaggttgaataagcaatttatacccacctattgatactgctctcctccaaaagaccagaacaaatgggacattcgactgaaatcaacgaattcaattgtcagcgtattgcatctagatatttaaaatctacctaccagatacgaaccaatgttgtccggcattgttaaaagccagatgaatctcgagtagcgttggtcgttatcatcaccatcagcaaaacgagctggtggagttcaggctagatcgatgaaacaacctcgtctccatgacgaccgcgcgtcttccgaatttgaattgttcaaacagatttcccgggcgcactttgctaacttctaagagctaccgacaagtgtatgaactgcagtcgaacgaccatattacgtacactctctagatctagctatcgccaaaactcaactaccatcatgcctggaaaatctcgtattaagaaacccagactggaacctaagccggactttgagacgggtatgtcaaagccagcctatattctcttctcttctttctacttcagtttggcatgaacgttggataatcttgcagacattgattcttttcttcttgtgctatcattctataggcctgaactactgggcagatattccggcagacaacaacggtgtgctcggagggttcggaaacggaacactcccccgagtagatgctctctcctcccgaatgttcattctttctctcgttcctcgactagctcttgttccctcctctctcaaaacactacccaccaattctccctctacttcttccattcggactagagctctggacgtaggagcaggaatcggccgtgttactggttctgtattgatccacttgctggatactgttgagatccttgagccagcacctcatttcttggatcaagccgtcgtcgactctgccaaatggaaggggctcggaggggtcgaggtggacaagaagatgccgaagaaggccgctaggttctggagaggaggtctggctggatttgatccggcctctcctgcagcgtctgctgacgagttgacaagaaaaggattttgggacgatgaacagaacgagcgaccagaggggttgaagtacgatgttatttggtgccaatggtgtttaggtcatcgtgagtgtctattcgtgtttccaaccgtctcttgctctcgtatatctgctgaatattccttggtttcgtttgtctcactcgttatctatttggtggatgaataacggatgtgtcttgcagtttcgacggaagacttgattgtatttttcaaggcagctaaggcggctcttctaccaaaagagacgtatgcggtaatcgttgtcaaggaaaacatctgccccgacttagaagaggatggaatgaagggaagcactgtattcgacgatgaagactctagtcttaccaggttagttcagatctctcaaacatatatggtttgtgttgctcatccgactaaatccttgatctctacatgcatatcatgtatagatcggacaaggcttggaggtacgcgtttgctcaagcaggtctggaactcgtcaggatggaagttcaggttcgtcctcattgcgttttaccttacagataggttacttggctcggatgccataagtatgatctcctaatctattattaaaactttgattcacagcaagggtttccggatgagctgttccctgttcatatgtaagtttttactaaaaaccaacacattcaattgaccccatctgtacagaaactgattactatggtctcatctgttctttaccgcacaggtacgctttgagatgagatatatatgaacgttacattaattgaaatggagatctttcagataccaaactctatcatctcgtcgttgtccttgaaatttgctatgcagctgatagatatatcggttgagcgatgctgttcggatgtacagttcttgtgcatcagcactgctatatgccgtcaaatgagagcgaagcgacatcgcagggcagtaactcttaaccctaaccagaatccgacggtaaatgaatacccgtcggccgaggttttgtgttcctgggtcgatctctaatcatgctctatcaacattgtttgcttggaacatcgactcggttgacgcttcatcatatcaataccctctgctgtgcggtctataggacatcatcatactacgtgcctcctctagactctagagagcaacatggatgccatcaacacttttgtcgccaagtatgtacaaacttgatctgttcgactatccgtcacaactttgtgccttgctttcggtcatgaagattcagcccagactgtgagatttcttctgattagttttttgtttgtttggttaattcaaatcagtccgtcatataaggactatcttgctattttaaagggagctcgtaatggactggttcgttcggaacccatccaagtcgatctgaattcttcatatattcaattgatacttacgccttacatcgtttggtgtggatgaccttctggatgttgatctgacatgttgatttctcgctaatcttcgtcaggtctacggtgccaagattcggtgagattccttcttaatttcttctggaatatgatgtgtctagagaggcttgggagcgtccgatgcggtcattagtgatgtatgctaaacgctcttgaggacggctcatcagatttccgcatgctttggtgatgactttgctcttccatcgaggagatacgaaggccaaagcagtgagttctctcttctatctgtccaatagaccgcctttgatagtatgttgtgaggaagaaagaggagataggagtaaatcaatggctaaatatcgctccattatcgtccgggtcgagcggtgacactaaaacagaactttgtatacaaagcaacgaagcagcatgcattgtgagctcatatgtatcataatttaggtcttgatttatagccaccgtagttaacgatgcttgtttgttccatcgattcaggaatctggcaaagtttgtgacgatatacaagactttgatgcttatacagaaaaagttcaacggaggtaaagaacgaaatctggatacgtttctatctgggttgatgggagggtatattgtgtttggggaaagaaacgctgtgaacgaacaggttggttacttcttcggtccaacacaccttttcgtatttctgatcgaaatcgttttttccattctctcttgcctctcgtatcactagattgtgctatatgtttcctcaaggtaaagtgttcgactcctaatcataaatttacatctggcaaacctgacatctattctctttgggagtacactcggtctcacagagtattagcttcgttccttcctcgaatctaccaagcaccgagtcacccaattgatactgccgcaccgacgaccatccaacctatcccgcctgctcctctaccgtttagtcagtgcttgagcgatacaaaagactgaatttctgctgaaagtttgttcatatattgactcgtcttttcactccatctaggtctgtttgcgagtgtggcctggggactggtgatgtatattttccgacacaacggcgagaccctacaaggtgcgtgcgcgatatttttaccttcatttttgttcttgtactcctcccccctctggaacgcattaccgtgatgcttacgagaatgtccttttgcttttctctctctcggtcgaatgcgcgatcagctggaatggttcgtgcatcaggatgaaacttctagactgatgaacagcgatagaggagtctctcactgaactgaatttcttcgtttgttctgcccaacaggttaattcgatgacgtatctatatcgagattctgatacgtggtcggatctaagatctcttttgtggcataacaagtagtacggccgacggggtgggataattttgttacaaccaaaagatgatcttctcttctttgagctgttgtatttatgttggttgttctattcgttctcctccttttctctttatatagtacatcttttggttagtcgatgtatgatatacggaaagcgaagagcactccgagtggagtggagtgtccaggctgagatgaggctgaaagggtgcgcagtcgatgctggccggcttgcacattttgacttacgaaagcgattcccagtattttcatccgcactctcttctctttagccaatccaatcccaccttgagcttttacccgtccaatcctccaccaacgacgactaccgccttacaacaagaatcactacaacaactcttgtcctacaaccagtgatttcaaaggccgtatatcatgttcaagtctactctcatccgaaccgctcgattggcttcggttccttctgtgtcaatgtcgatcgctcgaccggtggcagctgttggtccttccatggtcaggagtcagcaaaggggataccatgccaaggtattggatcactacaataagcctcgaaacgtaagtgttacctgtgttttcttcctttatttcgttctttgtctcgactcgaacgtaggagcgagaaagacttttccgatcagatcggaatcagtggagtgctcgccggcgtaccacttttctttttctcttttcctattcttaccttgataaattcgatgggatgggtagctgaccaagtggttcgactggctcaaacgtcgcttctttaggttggaagcatggacaagaaggatatcaatgtcgggaccggtcttgttggtgctcccggtatgtgatttcgagggagatctaatcctgcaacgtctgcgtttctttgctgatcgtgacactacttttttgtgtgtggcgacaatagcttgcggagagtgagtttgtttgctgcgtcggatgttgtgtgtatgtatatatatgatttgcctgtactgattccaatggtttctttacctccttacagtgtgatgaagctccagatcaaggttgacgagaacggtatcatctctgatgtgtgagtgatcgatagtgggacgggagtgcgcgtgcgtgctgatctgatctccttctttttcttctatgggattcactcttttgcagcaagttcaagacgttcggatgcggctcggcgatcgcgtcttcttcgttcattaccgagcacgtcaaggggatgacccttgagcaggcaggcaaggtcaagaacacggagattgcgaaggagctaagcttgcctcctgtcaagcttcactgctccatgttggccgaggatgctatcaaggtgggttctcgttcatcgctactgttttagataaacggtgtcgacaccctatgaactcgatagatggctgatgattttaaatgaatcttcatccacgctcacatctacatctatagtccgccatcaaggactaccagtccaagcgaactcctgctgtgagtagtttcaagttgtgattagataaataactcgggctgaacaaaagacaagttgatcaactgaccaaatgatttgtctgatgtaatttctgatttgtgtgcctgtatgtctattttaggctgctcctgcttaaactggggattaggatttgtctatgcgattttttcacctttccttctgctttttggttcatgtacaaatgttttttccactttatatttgattttttaagttcttcaaatctgttactatcgcctctgccctatatcttctctttctttattccatctggtgtgtcttctctttctgtctttgaaacgatgtccttgcgaaggccgagggggagtgaaggaggatgagggtggggctatgagtacagcggaagcagccgttgggattccatattctgatctctatactgctcccgtagtcactctatctgccttgccgtgcgtgagtgtgcgtttgtctctagtccttgccttcttctgtagcattaaatagtgaatctcattaaagttatatggctccaagagcatgcagaggaaaaacaaagtaagacaaattcgaacacagtcaaaccgaacaaagacaagacccatagatagaatagtgttataaaaagaaagaagaaaagattgataggtaaatgcaatctaagcgataaacagacaccgcccgtctctgctcacaccttgtgctctcccccgaggctttttttacgcgtgcgaggaggatggcggacgggattagacgcacatgttgtgttttttaatacatgttccgtttttttttctattgtgttttttattagacctatctagttccaacaaggtgaggcctaaacgctcggcctcatacgccgcccatacgcctcgcctcaacatcaccattcccgttttggctcttcttccttttttctttctctttccctctgctggatcttctccatttggacgttcctatcatccactcgcccatccagctcgcatacacccatatctagacccacccacacccacctatccttatatacatactggccctgaacactcacactcagtacaagttcacgctctcatactctcattcacgatgaagagaccaccgggcagagtgatcgagcgtgaacctcccgaacactctcgatcatccgaacagtcaacatcggtcaacgcgtcgtctttttcgtcgacagattccggtcgtcgtcttgggataccttcaaagagaaacctactttggttgatcggttacctcatcgtcacaactcctcaacccggcttggccatcccagttccgtcttctacatcgacgacactcatttgtgaccacccttcgtcagcatcaccatcgccctcggtttcgttcccctcgtccctttctgtcccgaaagtctatccgtccgcgaatctaaaagaaaaagctagttctattttcggctcgtcacctgcaccttcagacgatgactgcgaccgagtcagttgccgtccctcgttatcgtcaccaactagtacacagatggccgtaccgagacagtcaatcggtcactccattcgcgtccggactctcgatgctgctcttgaacaaaaacgggttgtcgatctataccgttcggacagctctgggaattggcatctgaatacacaatgggaactctatggagttggtccagccgtcagtctatcaggattttcttcacgctcgctcattcatttacaagctcacacggtgtctcgggaatgctgatttgggttactggtttcttctcttattcttgttcttcttctttcggttcatggtccgtacttgcgatgcacgcgtcgttcagaacgccgccgtatccacaaccggcccggcagattcgaccgcatccgccacaggcacgtccgtttcaactaccaacgtctccacggtttcgcctaccaggcttcccccaggctggggaacgacctcgaggagcgagttcgaattaccgttgatcgtagcgtgcagcgtagcgctcgcactggtcgtcttggtcaccatgttcatgttggtcacgtctcttttgttccacccgttctcgttcatactccagactgtcactcatggttcttttcatgcgtcttttcatatcttcttatcctctttcttgtcctgactactctcttctcatcgatacaacagattcatccgccggagaaataaacgccgaaagaaacctaagaagaaaagaccgagaggaaagaagaccgacccaaccgaggtcgtctaccccaagccggcttccattacttcggctgttgagtccatccagacccagccgacgaaggaacgaccaaaaggaaagaaatctcttgtcggaacccttcgttccaaaggcaccaagggattcctacggctgagaaaacgaaaaaaatctccaggatcggatgaagatgaagaaacggaggatagggacgatcatgcatgggcaagcagaacacgtccagatggtggtatcggtggaggtgttgcaggaggagaacacggtccaacggacagagtcgaaccgttgaacgaggaacctcggcctccaagagtcgcgtcttactcttcacttgatccactatccttaacgagcatgtccaacccggccagtctgacagatccccctacgacgacgaccactgtgtcttcaaccgtagagtcctcaacgtccgtcgaaccagatacgaacaggaccggagagcccacatcggtcgtttatcacgagaacaaccctccatccacctctttggtagattctaatcgcgagctcactcttccagaaacacctgactctcaccagcctacgcctcctgcttatcgcgcttctcaagtcaatccgtcagcccatcgtcatcaacacaaccatcacctcggcgattcttcgcccccccagtcgccgatccattctgaacaacccccgattccatattcattatcagcaggaccagggccttcagatcggtccaacggcacacctatgcctgcgacgagaacgggaccagaaggggtactagcctcaacgatggggtcagttcctggtcaagcatcgtcgacgattatcgacgcttcagactatccaagagatgaaaagttcagacctgctcggcctgtaacccctcctttctcctcgagctctacatcccacatcaacccccaaatctccggcagatcgaccgaggctggcagagaaactacgacgacgacgacgacgaccacccacatggctcatcatttggctacggatgataaaggtgtgttggccagattggccaaccaggcgagcgcaccggctgacctagacggagcacctctgacagaaggccataggtcagatcaaccggagggaaccgctccgcctggatgggaactcgagaatgcttcttccgccttgatggtctcgccatctacgcctgtcccttcatcttccctcttattctcatcatcgattcctcctctagtcggtggttcaggtctgcctcattcgaacaccgtttcggctgaagaaggtgagggtataagcatcctacccgctccgcctaaacaatggggtatgaaaacgatggaggacccgtacatctcgttggatacctcggaagttgtacttggaccgccggatgagtcgatggatcttgctgattatgtcgtcgacgacgacgacgggggaggtacggatgacggacaaggcttgccctccgcaccttttgacccacaatcagagccggcagaggagggagatcatctcgaacaggggcaggaggcgcaagctccgtcagcaccccccttggatttggaggacgaggaggagcaggaggaagatgagagagagcaagaacagggacgaagcaaaaagtcgttcgaagctagcgcaccggatctaccagctcttgaagaagatgctagtgcgcctcatctggagtctgaggcttaaggcgaaggtcaccaaatttagttacattctaccatttccttttttttcctctctccaaagttttgaatctgcttagtcttgtcctttttcatcttatatcagtcagccttcttctccctctatatatcgttctctaaccatcaaaaataatggacactgctcgtcttggtttttcctgcttaaatgttgtatatctgtcctcacgaaaagacgatctttcatattcgcttggctctcttattttcattcttgtctccctcttctggatctttcgtctgctctcgtttctctaaaatatcaactcttgcgctcttcttttctctttcgctcgtcgtacccgtctgcatcgattcaatatctgatagtcatacatactcaaaatataccatagaacactctgttcgttcataagccaactttttctcctcgagcgaacaaagacctaccctccttcttcgtttttgttctctgtctttgttcgttttacgttgttctaccacctctccatgcttggtcttcgctctttcacgtctttcggctttagtactatcttgatgaacatctagcatgtgtggtgtgttatgtcgtagtggttcctttacagaggtagacgagcctgggcgcatgatcatccgcacgcatacacgaaaagccatgaggatgctcatgctcatgcttagttggcgagtcgttgtgtgttatcgtccgtgcattgattcttgaaacgtcggtcctctttgaagggccatatgtgctgtgacttcgttttcataggatcctcagcgaccttcagcgaatgaaagaaacgcagagaagaggaacgcaagacaggaaaaagaaaagagaaaaggcagaaagaggaaaacatgggatagatgagttggataggagagaagagagaggaagagaacgaaaggaagaaaacgcgagtcagggacgcatgggttcgacctaggttcattcataattcccgttcgtgtttgatcccgacctcaaccttcgcctcgtcctcgtccttctccttgacatcctcaacctcacttccgctcccacctccaccctcggcctcagtctcgggccagcagagagcaggactcgttcctttgaatagatactcgcatttctccaattccatgaccgacaaaagctcgttttctctcgcgcacgtcatctcgagctagaaaggaaagagaggtgggatgctttgtgatcagtcctaaggccgaccaaggaaagagtagtgaaaagaaaagaaacgtcaaagaaaagaacaaaagaaagagagaaaagaaccttgacactccgatgtggaccgttccagcatttagctcccatatcgtacaactgtttttggtagaagccttctgttccctctgtcgctttggaatcatagttccactgtttgaacctcctgtgttcgtcgatggcgaagggggtggtttcggtatgcgagagttcaggaacaagagggaagagaagagtaccaatggccagacatcagcgcgattttcattgaaaaggtgaaaaagaacaaaggacagaaaagaaaaagacaagctaaagaacgcaccctaggctgttgaccgaaccacctttattactcttctgctttgcctctccaaagaagcacaactcataggtgtactctcccagatttttttcgatacacgtcccctccagcttcttccattcaccctgcggaccaaacttggcggtcaggtccgacaaagtcgactgagtgttcgataaggatgattgaagatttgtcagcgccgtttgcgcgaccgtcagcttctctcgagacggcgaggatgctagacgatgagtgaagtgatgattccagacacaagagttgaggggaagaagacaatagagagcaagcaagcaagtaagcaagaaaagaagttagaaggcaaggttccaagaaggcaactttttcgaaagttttaatgatcagaatcaaggtacaaaatcggccacaaaccagtagaggccgaagatttggccttggccttgacatcagttggctcgacaactcctagtttgatcaaccactctacaaagcttccacgaaggaactcgtacgactcgacaaatggatcagggatatagtttccgatgttgtacacttttttttaacacaacgtgaatatgatcagagcatagaagaatcccgagggtgaacgaagagtcaatattgatatttaatttatggtcgagattgatgtaaaacaggatggactgacaaattgaatcttcagctaaagacgcaaacgacgagcttgagaaggaggaggcggtggtaccatcatcccagccgaccagcagaccttccagatccagcttctcgagctcctcgagatcttgatctgtgactgcttgcgaaccaagctcctcttccacagcctccttcttgatctcggtttcgccttctccagttccttcagcaggaggagttcggccatctgagttggacgatggaggatgggtcatcgatgagagttaacgcacagctcagttacacgaaagacaaggaacatcaggaaccgcgcaccatggaaaagttccatatatcctttggcagccgctcggacggccatatcctgatagttaggattgtagctccggacaaattcctccatgattcccttcagctgctctaattcagtctctgcccgggcggttcgcgtctgcaaggccgataagatagaccggtggtttaagagagattggaacaaggctaaacatatagaattgaaatgcacacaaggagtcagctcatggagacacgttgctacgcagacatgggagatgaaccgatggtgacgaacgagaggctcttctcttttctttagtggctccttcttcggcttcagaggtctctaccaccttttcggcctgtttgacctctgcttccttctttgagacatcttcgaccaatttctccagctcctgctctagctgaacctttcttttttgagcaaaggcgatataagatgatcttatttttgctccctggatcatgataggaaagaacagggtcagaagagaaagataggatagggcggttcctcatctgagttgtagcgcaacgggtttgcagcgtacaaccaatctagatgaataataacataaagacaaagacggagaaggatagttaaacgaacggtctttctaatcttggcctccgcatctcgagccgctctgaactctttcccaatctccccacatcgattctcacaaaccccaggagcttcatcggatccatcgcaacactccggatctgttagaaaccagaatgaaacagttgtgtggataagtatgggagtttgataaatcaaacatcattgccggcagagagatatatattaatttaccgcagatgccatcgcccacccgactggatagaatcacaccggggagatgaccgacgttggcgcaatagaacgtcgagtttctacacgcagatgtgcctagatatacattgcgaggaatggaatcaccatgcgtgtcaaaggaaacttcgtcagctcattcacacgcttgatcgcacatcgacgtagaggaaatcagcaaactacgcaccaggctcgtcacttccatcttcacaatcacagtaatcatcgttcaccgcattccacgagatgacctttttcgaacccgtcagacatgtgaaggttttctgcgcagagggcttgtaaagcgaatattctaggaacaaagagttgtcatatagtaggattagtcaagcttgaacaacatacttagactcgtcttgcgaacgacaacctactttctggattgagacccttgatggtcgacggatcaaaagcggcgacctgggtagaaaccgacagggaagaggccattaacagaggaatcgccagaacagggagcatgactacttcttgtcgagagagagagagacgagtggactgtctggactgtctggtcggtcggtcggtcgatctgttcgtgatggacgttgttgtagagaccagggagaatgatgaagtgaggagaatgatgtggcgttccgggtctgaaagcggtgcaggttaccaggcagtcatcatcaacagcggcagccaggcagcggtggtggcggtagcagtagcagcaacgacaccagcgacaacaaagacaacaaggacaacagcaacgacactgtcaatcaagagcttggccaagcgcactcgtataaaccacacagaccattcagtcccactaaagactctgcacctccatcgacttgcccaaaggccagcgcaccgatgaggtaacctgggctgctgctgctgcggagaagattgggcggccgtcgccattagccatcccgctcgttggagttctatcttcttaccttcaaccccgttcttgcatcctacaatccgtacagtcttatactctctcaagtccaatgtcaactgtcgaagcccagccaccttccaagcctattcaggtcaagctcgtccttctcggttagtcctttggtatcttgttcgcgtcagatagaaaccggaagacagtcggtctgaactcggccgctttatccctcgtactgcaaactccttgcttgatttcttgctcaccttgcttctgtctttctgggtctctcttgaaacatcctcccttggacttcaacaggcgaagccgctgtcggcaagtcatcagtcgttcttcgattcgttagcaatgatttcaccgagaacaaggtacgtcctgaccatcgacctgatctggactgatgtgtggaccgcggtcggccgagcgtgtactgatagacgtcggtaccacttttttctcctctggccttccggggaaactctcttccaaccttcaggagcctaccatcggagctggtaagtgcaaacatgctgagacagtacagacgcaacgcaaggtcaaccgatatcctgacccctggcttatttatcattgtggctcggatcatcctcttagctttcctgacccagaagtgtagattggaagacaaagttatcaaggtccgtcagcagtctttgtcagatcgatccctccgatgaatcatgaacaaccaagacttattggaagaatcatgtcttttcttctctcagttcgagatctgggataccgccggtcaagagcgatttcactcgttggcacccatgtactatcgaaacgcgagtgcagccgtggtggtctacgatgtaaccaaggctgtgagtggtggatctctgtcatccgttttccctcttgacccaacgatatcttcagacatcatcatgcacatgcaactagtgactgatagaagaaagcgttggccccggatggtccctttctttcatcgcttgcccaggcctccttggacaaagccaaagcgtgggtcaaggaactccagcgccaagcaaacccaaatatcgtcattgctcttgctggtaacaaggtacgagcgcttccgcatcgtccatcaagcacaaacgcccgttatctttcagttctaaattcatgttgtcatctctgtttcaaagttggatttagtgaccccgtcgactgagccggcgtcagaagagggagccgaggagccggaagagggagcaactccggtccaggctaaagaaagtcttcgacaggttcccagggaagccgcagaggtcagtttgttccccttcagaatgttataatcatcatctttattcgtactctctatttaaactctttaacattcgatatactcatgcatgggtctcttgaatcaaaatacaatcaaatagcaatacgccgaagagtctggattgctcttctttgagaccagtgcgaagactggagaaggtgttggtgaggtattcaccgaaatcggtaagtcgtcatgtgacttgtctttcatagaacgagatcagtcgttctcactcccttccatgtgtttacacactttgcagccaagaaaatccctctcgagacactcaccaatggacccgggcgaacggcagcggcctcgtccggaaacgccgctcgagccacctcggccggggcagaaaacgttgcgcttggagagaacggacagcagagtagggaaccttgtgcctgttgaaccatccgctatggtcttttctacttctctctctcattctgtgcatgtcgagttttcctgtttgttgtttccaattctccttgttttgtttatccactgctctcgtccttcggcccctctttccctacaccatcatcagatgatgatggctcgtttcttctgccctatctcacccctctcgacctcctgctctgtaccatctctatctttcctatttctctctaaggagttctctcctgtcctctttattgggtctcttttgaacccggcttggtaggcagacaggcaaatcagacggtttggtctatacttttcatttcccatcttcatatacgttcctctttccagtctttccagtctttcctctcgatcttcatctgtctacctgttcgttcgagacagctttgtttcgttgatttatatcatgatttgttcattcagctccgatctttagtcaacactcacaaggtgaaggttcactctgtgtcgaagaagaattttcacaatcggtcgacatcatcttcatcaacataatcagatcatccaacgattgtgaagggctcgtgacaacaaataaggacgaaacaaaggaaaagaaaaggattttgccccagacaagaagggtctaagacagaagcctggacgaacaatggtgatgaaggagaggcgagaagactggagacgatagatatgcgaaagagacagccggtttttcttttcctcatgagaaacaacttgagtatgagggacaaccccatagagacaagctggataaacgatacatttacaactcgacacacacgagcgcagaccccacacgatgttatatctgagaggcggatgatagaacggcaggactctggatacgaaattgaaggacaagccattgtaaatggtagaagtagcctaggccctcaatctctgaagatatatctcgagatcgatcctgatacccgagcgaacgaagtgagacccaaatgaacaagaagaatgtcaaaaagatgatttaaaggtcaagggaaagaagagagacgaccttaccatccacctccgacacggaccatgacttttcttacttttccatcctcccctccgcctccgctgccactcgtctctccttccggtcctcctggtttcggtccttgcaattttaggtttcgatgcatctccagcaccttgcacgctagaacctttcttccccctccgctacctgtcactgctccgccagcggaacatatgaccttgaacgcatactgtccttcagacaaccctcttgccgcttctcctttaggaaggagatctatcctctctaccccgattcgacatcgattctgaccctgtccctgtttagaatgttcatagttgaaatgaagatcaagtcggaaattgttcacgaccctagcgatctcctgatcgagcgcgttgaacttgtgtggcaaatacggccatgtcggttcgttctgtcggcccggttgatcgatctctgaccgagaagccggacgtaaggataatcgagaaggcgatttactgatcgtcgtccgagaggtcaatgcagacggggatagtgatgaagaagaagacagagagagaccctgtcgagttggtgagtccatgttgatcgcctgttgatgctgaaacaaagttgacggagatcgaacggccggatcgaaccctgcagtaggagagtgtttttccgatcccgcgggactggctcgtgttaaattagagaacgatcttctcgagcctagggacgactgtctagcagtcgtccggctaggcgaattgagcgaacaaccgagtgccgcttgggcggtctgcttgatgatatgattaggtgtttgagatcgactgtatgacccggtgggaggggccgatcgacttttttcgtttccgaatgacgaagaaggccgaggagggagtaagcttgaaggagagagaagttcttcacttgccatatcagacaggctgtagcacgattggtagcctcctgatgtcggagaaaggtagcgtggagacgaagaagaggacggcgtatggcgggtatgatcgtaggagggagttgaattcggatgaagggtttcttggagatttcctctcgaggctagtctaggtatacgactaggcgaagacacagccgacatttctgctcttgaagccggccgaggaatccggctgggtgtctctggtcgcagtgacgctcgggatgaagatcgagggaaaattgacggaggtggactcaggcagcttgggcttacacaacgggcgctggccccactgaatccgccaacagaactagtaccgacagacgaaggcggagacaaatctggccgtccactggtacacgacgacgattgactgagcgtgtcaagataccgagtttcaccactataatgggcatgggaggatcctgaggtagatgagccgattccgacagatgaacctctcgagggcggtcgttggatgtttgctggactgggactttgacttgcacccagggtcagactcgacaaccgtttcgtcaaccctcttgagggcgccggagatccagatcctatctctgatggcggcgctcgaggagaatcatcgactctcatggagccgttccatcttggttttcccgccaaactatctgaagaattcggctggcttggtcggcccatccaagtagtcaaggggaatgagagggaagattggtccatttgaggcgattttgaggattgagtcgagatgcctatagatccagttgaggccctccctcctgttgttttcgaaggtgtatacgttcgagagctctgtccatcggacggagtgcttcctctcgttgaaaatccagacatcttgcctaacattctttgaaacggcgatcctgggctggacagtgagctagccatggatttacgaggtcccttggtggttctcacggaaggagtctgataagagccgtcggatgcaggagagtgatgggtgtcagatgtgtatttgtcagattgatgtgaagagtcgtgtcgaggagacggatcgtaggtttctgaggaggaactgcccgaaggtgtcaacaagtgaggctgcccgtatgaaggagatgtggtcaacgtagaattatccatagtggaagattctttggcgataagaaagaggcgcgcgctgtcgatttcgcgctctacatggttcattctatctgtcaagctgaaaaggcaacaaaactcggtaagtcagcgaagatcagaaatctaattcatcaacgctctctaactggtttgatggtttactgacctcttccatcgggcttgagtatcagtgtgtctattttacgaaaggggagaagtggcgagagcaaatgaggatggatcattgagactaggctcaaattgatgaaagtagccgaacaaaaacaacacatgcttatacgaagcaagactccactgacctgcgcaatgcttctccgttacttgtgactctctccctgatagacttgtcgagaatcgaaagcactttttcaaccgacggccagtaatacttcttcttggcttcatagctcttgagcgtttgctcaaacatcgatatcgtcaacagtggtgcctgttcgggcgggtccttccaaaggtcgaccgggtgatgtgcattcggttgatctgacggcggaggaaatcggagctggcgcacttgttttatgagatcctgcatagcccgatccaaaagtacacatcgagtaaacaaaatcagcgcacatatgagaaagaacgaaatgtcaaagatgtgaagataagtacatttgtttgcgaaactgctttctccaaactgtcaatcatctggtcggcctgactgacggcaatgcggaacctatcgagccaaccatcttctctaagttcttccttgaccttttctacgctgtctgtgacttcgcgccagtcttcctcgagcgcggcgaaccgcctgatgagtagcgaggttgaagaagataaaggagccaacgaagaagacgacgctacgttcagatcggaagaggaggatatctgattgatacgagattgaattgagggaaggagagaggtgacggaagctaattgcacggccagagttgcgagcactgtctcgaccgaggatgatcctgtagaccgtccatgtttgttagacgatgaggctgaggctgacttgtgccgcaactcttcgatctctatagacgaggacgatgaaaggcaaacaaccgagatcagcaccagacttaacaaagagctcgattcagactagaagttggccgagtgaaggcagtcccatggtctgtttgactcgcatagcttggcctgtacgaacaggaacaaatatacgaaccataaactctggagtgcatctctgagatgttcatttgagcttgagctatctcagccatcaggacttcctgtgtaactccatcgtccaccacgagaggaaaccactctctgctagatccaagtaaatcgaaaaagggaatgcagccggtgacccagatcgataacaggataagcgacggtaagtaaggatcaagcctggaggaaagagaaaatagcaggcagactaacgaggattccatgtgatctccgctacttattttgcctggaatgaacctaagcgtatatatctgatgataggtgatatcaaggatagatgaaggcttgatgatttggatgaactcttggtgttcgttggctgaacgctccctgttggtctcaatttgaacaagagaggaccaaaacaaggcaagaggtaaacaagagcgacacacgtaatgagagaacgaagtcaatagaaattgatgatacagaaaactacgaaaagactacaatttcaatctcgtgtcgtacaactcgttcacaccatctcatcatgtcaaccggaccgtccaacaagcctcttcgtcagctgtcctccgatgtatcgcttctggcatcccttccaaatagaacgtcccttctgtctctccttccagacgctccggcttatgttcctccggttgaaactctcgtcaagcatgctccgcccgaagctcctccgacgaccaaggaggactcgctggtttttggaaagagctttttgaaagcagttcgtgagcttcaggctagtggagtcgagaaagatcttgaccaatacggtagcagggtggaccaggtcagagagaagctagagaacgttaaggagggactggatgacggcttgaaggtgcagggttggtaaagattgtacgcttcggctcgacgacggctcttctcgaatgaaggctggctgtcgaaaatgtcgacagatctctcgcgcttgctctccatcttccctccacaaggcgtttaaaagctggccgtatgtacacgtccattcctgtgaatttctgtccttctactttcacgagtaaattgaccgttctttgttgtggattatctgtccagattgaccatcagacactcgaaggatcgatgccgaaccgctttgatgattcgacggcgaaatcctccgtaaattgatctaagattttggtgtctgggaggattgtttcctcgtagccgttataggcatcaaaaaaaagaaatctttctgaatcaagaaacgtcttcgtgtactcgtagactgtctatatgttgatgtgcatgtatcaatgaatctattattcatcatatggtcgagcgaggagacaagaagttgatcgacatatgcgcatacaaccaagaaggtagcaagcaagcctgtacactatactgtctattggaatattttgtattgttttttgaaggtttttgtagttctctcgtagtcgtgggtcagaaaatcgatcggttccttattctccctgtccacaaaacccgcccccatcgtgtcgtttgttctgccaccatctccatctttcatcgttctccttgcttcatcacccaggccaatcgagaggttgttagcaacatgtcccacactgtagaggttcgtttcttgtctctggccggcttttcactatcagaaaagttccatctcgttcggcccctttgaacaacacaagaaagctcatgcttcgacgccttcatctctgtgttcccgtctcctttcctaactatcctttctgttcctttcttgatactggaaataatcaaacacacacactctctcgtgttactcgtcaatcgaatgttcacgcaaagcagtcttccggaattaacgatgatgatctcaccccttcgaccacggctggctacaaactcggtcaggaacggtcgcttgccgaacttgcagccctcgaccaagaggacgaatcgctacaaaagtggaaggcttctcttgggctaaacaccggagctgtaggacaggccggacccaaaagagtaagattttcacagttcaatatctgctctatccttcctcttgtccttcacttgagctttcaggagatgtagatgttggcttctggttcatcgtcactgttgggctgatcgtcggaatctttcatttgctcttcctccggctaactaggttatgtaaggtctttcatctcgctcttttctgcaaccgtataatcatgtaaatttctcacccacttcaaatatgtcctgcgtattgcgctgttctgcccataaatatcgattcaacggacaatgaattgacagcccaaaaaagctctacctcttatccccttcgctcaaagtgcctcttactctggacctaacccagtctccggatgagatcgccaaactcaaaaagaaccctagtaagttcttccaggaattccgaatgagcgcatacacctttgcactctggaaagccgctacatcgcttgcgaactctcatgtaaatacccttttgcttttgacacttggccacctatcgcacattaaacagtcaacatcaaggaaggaattgaatactccgttggaattgagttcacgttcgtgttctctttttcaaaaaacaataatacttggactaagttttctttactagatggctaaatatggtgtttgtcttgcgcgcatgtccgaccgtttgatttctcatgatgcagcgtggaaaaccagatcgtctcaggattgaagtatttgcagttggtcaagagatctgggtcagtacactgtttgttcataacattccaacaaaactgcataaacctgcttccaccgtcgaacccattgctgatctgttttcttcaatcggacgcaaacactcctttccgcaattcttttcactttacagaatcaaagtcgacaagacggaaaaaatgattggttcacatggacctcaggcggaaccttacagccgaattgtaagtcatcattctctttgtcttgcagaatttcgtaccattgttgaccatggataaattcctcccgctctcgttatcccttgcaaatgaaagatcgccgaagaagagtcgccttcgggaatgttggctcggtcgggcacgtataacgttcgatctcgaattgtcgatgacgatggtgtagtctatggtcagtcttctccagtcgcgaaagttcactcacttcatcccgaacggcattgttctgaacttcggacgttcgtgactacggtcgtgtaccacatataatattgtacgctcaacagttgatttcgagtgggcattcaagttgacgacatcctggtgatcatcgactttacaaatcatgtaacttcccgtctattccgtatggtttcgacatgatctttttctttcctcttctttctctgtacggacgctctcaattttctgttcgtttgatacgaattcatatttgtgtccttctctcttcttctcttttacccttttattatcaccacgtttctttgtctctttctatgcatatcttcaactcaacgctaccatccagcttggattttcacccactctacttgacatgtcgatctcacttattgtgccctcatgaaagatgaattcaaaccagccaagaacattcaactgaacatgaaaatcatgagattggtccaagaaggattaggagaggaaggaaaggaaagaaggaaaagctgactaaaagccatgcgaatgggagattaggtcgtctcgtagatacataaggcgtggaaatgtatataggaagaagtatgaggtgggaaaggaaagaaaaagattgatcgtgtgggtccgtgtatattctatgggttctcagactgtaatagagaagaacatcaagagaaataacgtttccttttccagacaggtaaaggggaaagagaagacagggtaaagagaggaaggggagcgaagaagaaggacgggggtgtttgttcgttcatctatctataattctcagactttaagaacatcttctcctggcgatagaagaggagcgctacaatcgaatgatgataaaaaaaaaagcaaacaacgtcagactagagaagacgatgttttatcacgagaggaaaagagtcaaagatagaaaagaaaaggaaaagacataccccatacccgttcggacaagatctctggtttggtggcaaatcgatagatggacaatagaaacatataagaaacatgaagaagctgtgggacagacaagctggaggaaaaggtaacggactctttagtagcgaatatttcgctcaaaacgaatgcggcgaaactcgagtccgtccaataatcacctgcataccagaaaatcagaccagaccggacaagaagtaagaagtttagaaacatattcaagtcgatgaaaacatgaagagaaacggaccatgtgcggtcaagagatcatagtattcgctgacaattcccgtactctgcaggcagaaactgacgttgcgcaaaaaaaaattcggaagacgctcagtcagagtgatatggataggaagaaacgataaaaacctgacttactcgatgttaccatgtgggttgagcgcactgaatcgacgttcggctcgagtacctttgagtcgctcgaaccctacccctcctgtcaactgaggtagtcatgacgacaaaatcaagatcagattgtcgatccgtccaagtatgagcaaagaaaagatgtggaaaaagcaagaagagtagaagcagaccggacatacttctacaccgctaggtaatctgatagtctctgggcgtttgagttgagatgagcctgaacctccaaaaggctgaaatcatttccaaacaaattacccgacaaacatatatgtaaggcccagtatttcgataccggaataagaggcaaagctcaagaagactcacattaggaagtccattgaagatctgtgagagagaccccataccccgacccatggaatccgagaaagtacttaacaaaccagccgtcacattggagatcaagagtggctccatggtgcgtgccttcttggcgtcgacgcatgcattgagcatgtacgcacttgattattgggaaagcataatcacataataaacattaatgtcctgtctgatttcaaactaagaggccagaatgaacaaaaacaaatgtttgacttacattgggtccctgaagaggaatacaaatgaattgagaaagataagcaaatctgattcacaaaaggacgaggaaaggcaagacggaaatcaacaactcacgatggatgaaacacattgtacaaacttgagacagccatgcatcccattcgacctgctctgtcaagtgcttcgtccggaggagaatgcttcgttcggtcccggccctgattaatttgcggggttcgtgtaaaacaaggtcagcaatcactctggcaacaattcgaaggcggatgaagacgaacagctcgaggaatgagctgggcggagtggagatgaatgaacagccctaatggagatccgacgaggaacaaagcctgagtgttgaagataaaacggtctttggatccgtatatcacctggaatgtttacaatacaaattcgagaaggtgcacagtatcaacatcatcttgcatcagggatctatgagggaagaacgtagagaactgacctgtttgggcaaagttgaaagagacggtaggttggttgcttgggccgaaagtacttctgcaaccaaagcggatcctaaagaatgccctataacatgctattcatttgatacattcaaacggaaaagaaagaatcaatagatattgaacaactatcaatctgtgcgttaagaatgaaagaaaaagacacaccactcttcctttcgtctcgaatccaggatgtcgtttacaccaaagcctatacgtcttgttacattgtgtcgcaacctgtatacccacaaatcgagaaagatagtaagctcccaccgtgagcgaccttttttgagtctacaatcagtccgatgatggctcatcttttttttttcacttacggcttcaatcatgcgttccttgtgatggctcatgaagtatggtatatcgatcaagacgttgtttgtaacttctctcacccatgagatgtttttactcagggtgatgtcatccaaagtgaatctgtcgttcagtcggtttacgaagattagatcagtgttttcgaaagaagagaatgatgacagcgataaggaacatacttgttatctaattcgtgatctaaatcttcttgtgcttcagcatcattttgtgcaaactaagcagataggggatcagagagggggtggtgagacagagcttgaatgagttctcaaaagcaatgagaccttcagaccatctcagagacatacctttagactcgcccgccactgaattggtagaaactgcacttggcgatcccgcataatactcttgagcgcagcgccagtagcctgtttctgagcttcttttctaaggagattcgtgcactgaacatgacccaagtcgacattcgtacgaatcgcgagtaaagatagatgtcagtcattgaaattgctagagttgtgatcgttgatggagttcgacgcacatagacaaaactaaacccttcatgcgtgagtgccaactctgagtatgccgaatcgggaacaaagaaactattgtgtcagttgtaaacctcatcaggtgatagatcggaagaaacgacacatacgttggccaattccatgtacaactagaatcaaatccgtcacttcgccagctgggggctctccaggctccccattcggcttgtagaaaatatccaagaaagaacacggtcagtacagtttctggctcattttgacattcacagatgcgtcgtcccgtccatttaagctcatcaaaggtctcaccatcatggtaggtttttctactccttcaacaaacgaaccgttcggtccctcatcgacctccgtcagctttttcgcgagcccctctacacctctttgtaagtcatctaccatcttatctcttgtgatatccaaacttgttctagcgctcttgtgacctccgcctcctccgtttccgttcatgatagaaggcgcaacggatgatcgactggatgatctagagtgggattctttcttctcactcgaaggtggatgggcagcggtgacggcagattggaagccccggtacactgaaaaacaagcatcatcaagatgattcagttaagggaggcgtaacaggagcacgagatggagacgatggggaaggagagaagaccgacctagtgttccaccagtgttagagctactcgatgaacgtaaagcgttccatattgtgaccgaaagtctagcggtgatactttctctgttattgtcccatcccggtgtgtgccgattgatgagacagaaagcccatgagaagaggaaacatcttagtactagattcagagaacaaatgagacaataaaagttatgctgacgagatgatcctggctacgccctcatcctgatagaccacaaaggagccacctgcatcctcttttgattgtttcagtccgtatcgaagttttgcctcggcctctttaccgttcagcaaggccgcttgtagttcctctccatatgaggactttaaggaagtaggaaggatgtgcagtcagaacgtcgcgcgtgatgaacggttgagttcagatgatttgatgagctgcagacttacgacccacggtttgatctgactttaagcgcgcgagcatcaccgataaaatgatggaagaaaagaaaaaagtggacgagagggccaaggggaataaggaagaaaagaaagtcacattcaaaataacaagtcgagagaatgatgttgttaaaaagaagacgaactgaaacccttcttccaattcgtcacatagcagctccgaacacggcttgtcttccgagaagaaccatcttgctctgcggaccggtatattcggtcctcgatgatgccagctaacagtaccagaagttttcgaatgagtttacacgatgacacatgccgatcaaagcgtagaaagaaaaagggcgtactatacagggtatagtttcatttccttgacgtctacctcgaataacccgtcctgtttgaacaaagtcaacggtattgagctcagatggctgatagtccaacgctttcttcatcgactacgccagaaagtgaaaaagatagaacacaaacctttgcaacagggacaccgacgaattcttcttccttctccatttcctcggcagtgtccgctcgcgtattctctagctcaagttgcaacctcttatcctccgcctcgtcggcttcttctacctcttcttcctcaatcttaaccgacctgcctgcgtgtctctctcttgcttgatctttctccttcttcttcttcgcatccttgtcctttttctgctgcttcttcaagatttcgtctaatgacggattctttgtcctcgtcgcgaattgttcttcgggtgtgaggccttgccagcgggcctccatctgatcagactcagaagatgtgaaggctgcatagatctgtgcgggtgcagatatcgggcttccctatgattgagtcgatggatgtcattaaaagacagaggaaggaatgaaaatgcgtccgcaaggtgtgtaagttcggacgcgtcgacaagtggacgaaaagaggagaaaattggaagagaaaggaagacaagacacctaccaacagattgaggaacggtgtgccgaggtgaacccaacggacatccagaggcggggcctcctctatagacgcggacatgagtgcttgagcttgtgcttgtatgtatgtgtgtcgaacggtgttagaggatgtggatatgagtagaatgagtaacacgtatcttgcgtgagtaggaatttggattagccgggttgaagtgacgtcaacagtgtgagctaccaacatctgatagttccatatgctgtttactcttgccttctttcttcgcttgactgcttgttgcagattcattcatgatgttcatcaatcgtttcgtcctctacgagcatattctagacattccctttcgagtcctcccacccggtaaacctccacaccagcctcggacaaaaggcgactccccgcacaatccacaaagtccggtggctcctccacaccctattacccggaaaaaggttgaatagaaagaaacaatggcagaatgcaagaaggatgtcaagactctatccattcgatcaaccagataaattgggaataagctcacgagaaaaactctgttgacctggtactttgccagaagcctcgcacaatcaggctgaccactcgtcctaaccgagcagggttccagtgtggtataacaatccgctttcttaagaaggtcttcgacagaccatgtctcgctgccctcccaccgttctccttcttgcttgttcaacagctgacaaagttcgtcctctgagagcgccaaaagtttgaacacagccgacgactcggcgtgtgacgtcggacgaggaggttctctagaataaccggtcgagaggacgaggcctgggcccgagcattccttgccaggaggagaaggtaggacgagaatggagcctacgcagaacgcagttggcgaaacttcacacttgagcgacaattctaggcatgttcggagatgatcgaggtgaactctgtctgatggaaacgtctcatcgaatcataatcagacgtttgtaccaaacaagaccaaaaaaacagctacaccattcacaagtcaacaaacacagatagacaacaagaacaaaccactagtgacaaagctctttgaagaagacccggctggactgatagccaaagacatggttgcagagcactcccaaagatgttgcaggcaaactgagtcctactccgaaatctactgcggatttccaccgtggcaatcttccttctactagccggcccatctccatcatgttggccatcaaccatcatcccgtccgatcgcatctgcgttgaatgaatattaacctgcccacacagatagcaagcatggcccaatcttctaacactcaccagcccaaggagggggacgagcagtctttcagcgtatgtttcgtctcttcagtcttcctttggcctttcggcctgggtgatttcgtcgtatgacatcagccgattctctttccttttgctcgccacctaatccttgatctttctttcctcttcttccttttttttttttctcttctgctctgtatgcaatgctctgtgatgacagatccttcctcaccctgctgtgagctcttttgactagtttcatttgttggactgtgtccatctcgcttctttgtgactgatcctcttcttttatttctctcgccactcagacaaccaacgatccttccactgatccagcccttcagtctggcaaccaaggtgccatccacggaggtcgggagccttacgtccccagcaagagtctggctgacagcttggagaccccaaagagtcgggaggaggttcgtcattttctttcaatctttcataatgaccatgtggtcgtcttgtcatcttttgtcttctgtcatctcggagggagtcagcctgactgactgaacgattgattgaacgaacggaatgtgaaccctcttcgcgcgccgtatctcttttcatctttcatctcctaaagctgcaagcagcctccgctgcgttgaacaacaaagagtaattgggatcacctggcgattttctagagattgctctcctgccgctttctgcgcgctgctaccttccatttcttccttccatcaagttctgtatccatctttacctgtttcatctacttctctgtagcgttcttgttctgtttctctctctcctttcatgatgtttgagaagttttttctgttatctcatgtcaatttcttgtgaaacagtgggagttgacaaatagacgtatccctttgctgacggttagagagaataaatatttatgaacaaaacagcaggatcatcgaggagtccaggcaagaaagaaagagaaaaaaataacacagaaaacgtttctaatcaaaacgggcggaggttttctttagagagggattccagcaaactcatcgtaaccaagcgcaaggttcaagttctgctcagcgaacaagcgaaagaaagacaaggtcagtcagataacctagactgtagaagaaaaaaaaatcaagaagaaagcgctggaacggacctgaaggcactgagtagcggctcctttgagcaagttatcaagcgcaccctacaagccaccgtgaaaagcaacccgatcagcatggtatctcgacaagaagaaaacaaaaaattggcaaaaagacagaaacagaaagaaagaggaagcaaggggacgaacgacgacgacgactctcctaccggaactgtgaacttgcaacccacccatcacccaaccatgggtaccctccacgttcctcacgtcgaccacaccctccgtcggcgccaacagcttgatcatcttctcatctccgtaagctttctcgtacaactctttgatctccgaggccctcatctctttggagagcgaggccgaacagacagagatgatcccggcgtaccacgaaccgacagagggaatgaaggagagctcaaaagtgctgggcgacaaggtggataggtggtgggatgcttctcgctcgtgaatgtgatcagtcagagagtaaggcttgatggcagatcgaagggtagcagggtcctagggaacgtaccgagacagcgcaagacaaaatcctccaagctggtaagcaaccgatcaagaagagtaagagcttcagggagatcactcacaatcttggacacggtagtaggagttccatcctcagcaggctctccagtcttcgttccggctccactgtacccagaggaagcaaagatcgtgggtggcttatcatagttcaagtagggcaagagagggccgagcaagagctgggaggatgtggcgaaacatccggggttggcaattcgtttggccgatcggagggcttctctggagtagagctctgtgtgtattcaccatgttcgttttgtgtcgttttcgttcgttcgttcgtaaacgtgaaagaaagcacaaaagaaaagggaataaatcaacaacacttagtttacgaatacacacaaatgcctcagataacatgaaggaattgtgaaggaaagaaagaaatctcgaagagtttgtaggacggtcacgagtggggtaaaatcaaaggcatcgatatacccagaactcttgaactaacgacctccttcaaacaatcaagatgtgagaggaacaagaagaagaaaaagaaagatgggaagatggagggaaggaaatcaagaaacaaaggaggacgattctcagagcaaagtgttcaaggatttaccaggcaaaccgtaggtccagtccttctcgaaacggtagtctgctccaagatcgatgatgattccctttcctcccttctccttagcaccctcgatggcgtcgacaaaaggcttgcagactccattgggcaaggccatgacccaggcgtcgacctcaccagcctcttccatcctggcaatctcctttggggacaagttcgagtaagtcatctcggacttggagtaaccctcgagaggtcgaccctcgagctgtcggctcgacacgtgagacaggatcatgttcgggtgctggtcaatgagggaaacaaggttctttcctgtccagcctcgggcgccgatgatggcaaccttcttgggcgcggtagtggtagcgggggatgaagcggtggcgtaaccccttcgcaagctgggctgagtggagtacgatcggttcaatcggtgaggaggggtcgatggtccgacgggtaggtacgtcctggagattcggttcttgccttcaaactgggcaatcgccttctcgacctccttgatgtcgtggattccgtaccagaacaagctcttgccagcccgagtgaaggaaccgtcggcacgctcgaagtgccaggcccggttctcatcatctgtcttggcagtccagaagagctttcggtggtcctttttgatggtgtcaaagacgttgtcgacaacgctgttgagcacaccgttccgggtggcgaggaacttagtcatcactgggacctcaccctccggatgggagaccacagcgaccacgtcgaatgtctcatctccgtaaacagtgtagggagtgtccttcaactgggagaactcttgagcgacagaggttcgaccggaaagaacttcagggtccaactgagcaaatacatttcggagcttatcagtaccgacagtctcaatcgaggaagacttgtaaagcttgtatcctcttcgaatcatggttccagctccagagtcggtaaagagctccttctgaatgttgtcggccgagatgatagcgacggaggaagatcgaggaaggtaatcgaggaggtccttgatctctcgaagcttgagcttggtgccgtatcgaacccaagactccttcatcaaagcgtcgtactcctgataaacgtcgtagatttaaagatcgcaaataggaaggcagagtcaatgtgactattcaaatagatctgagacatcgagcgagcttgtagctgtaggaaaatgattttacctcgtccaggttgataacactgattttgtcaccggtgactccgtggaagagtccacccttctcgttaatataaagaaccttcatgggctccaagatcttggcgagttctccggctgcgacgtcggcgttgacgttcaagagctgaccatcttcggtctcagctagagaggtcaagatgggaagcgctccggctcggatggaagcttcgatgggggtcttgtcgaccttggtaatctttccaacgaagtggtatttctccttgtcgaggtactcagcggtgaagacaccggtgggaataggtcgggctcgggtgccgagctcctcaagagcgttgacgagcttgaggttttcctcgaggaaaactcgctggaacgggtcacgagacgcgacgtatgagtgtgagcataggtaaaaatgcgaccggtggaaaggatgatcaggtagagaattcttactcgggcgatctgaagggttttggcatctgttaatgtgatagaatgaggatgagacgagatggaagagatggagatgaaaagtaatggtcagatcatccgcaaagatggacacgggtctaaaatccatagataagcgacataccggtgatacggataccatcaatgtagtcgggcacgactccctcggcctccaagatctcgttgctattcagagaccgaagagaaggatgaataagtggaaggaaatcggatagcgtgaagatagatggatgtatgctcacagctgaggtccagctccgtgaagaacgatagggtaaagaccgagtcggttcaaaaaggatagagataaggcgagatcctgaagctcgttcgtcaagatggctcctccgattctgttgaaagagaggttgtattgtttcgttagaatcaacacaggctttcaaactctctcgatacagaacctctagaaatttcgcgcgatacagaacctctcgaaatctcgcgccagaaacagaagacgcactttagaacagcaaacttagcctggggtaagacaccctgggagctgccagaaggagaggacgagttggtgaagatcctaagatatctctcgacctcatttcgtgatcctaacgagtgaagaagtcggacgatggtatccctgtccatttgaccgacctccctagcgccagaaatgcctcgctttcgcatctcggatcccacctgggagacagagagattgaaagcgatataggcgctgttggtcgaagacgagggcaatcgatgctgctggagctgcttcggcacaccggccgaggcgagagtagacagcctgtaagctgaggttggagccgaggcagctgccttggtgacaagacgcctagccgtaagggatggaaggatagacataagtaagagtatgatgggtgatggtgaaagaaaagaaagaaggatgggcaaaaaaaaggtaaaggttgctatgggcgcaatctccattcgaaatctttagcctcttagtctttcttacccgcggcgagtcatgtttcccaatcagctcctttattttttatcatcttcagcatcacctccatctttggttctttttgttcttgttccagtcttaaggagactgtttcttcgttcttgtcttttgaatgtgttgcttatcgaccgagtgtagtatctgctgctatcgttatattgtgaggccggtccatcggccgggcgctcgtgaatcgctctttcaggtgtcgcccggtgtttttttcatcgctcatgctctttgaaaaacatgttctttcatcttgcttgacgacgatacttggaatattgttcaagacacgatggaagaaaagatggatatactacaaattaactttccttacgtaagaaggcgcacacacaaacacatatactctaagccggctcttctaacggctgtaagctacctcctgcttcaacaccaacactagtcacatcagcttgaggaacttccactgtgccagcgctagcgctggcagtggcgatagcagcgacttctgccgccgctgccgctgcttctgccttttctctctctgccttctcggcagcagctcgttctgctttctctgccttttctgcggcgatagtggatgctacccgagcggcattcacagcagcaacccgattggcatgttgagacaacacattcgttcgtcgggtcgcctgagattgggcttgtcgaatttcatcagacgcaagtccaggaacctgtaaaagatgaggatacgatgaatggaagacttggttattcactgcatctcccttcgagggagagaaggaagtgtgaaaagtcgataaaatcttactcggatgttgtgatgcatttctgttgaggaaacaaacagctgtcagaattactacaaactcacaatgataaaagaacaagaactatgggtagataggcataccaaaatgaagctgaagatccttgacttccagtacattgctctttcgatgtttggccagtcgagcagcgaaatgagtggccgaatcgataagctcatctaccatctctagtatcaactgcagaatacagcacagagggagaatgcgaagaaataatgccagtgtcagagcgccgtttgacagaggagacgttgaaaaaacaaaaggaaaagaatctactgacatcctcaacctcgtcctccagcttttctcccttttccacgctctctaccacctctcttaactttcgttttctgccctcctttgtccaatcgcctgctccgttgccagcaacctcatcctttttcggaccacccatcccgcctgctcggctcgcctcatcccagcctgaaccagaccgagcaaccaggctcggtgtaccaagactaggtccagccgccagaccggtcgacaacgttggtcgagcgccatgtggatttggatgaggcgaagcagtcgtcttgtatgtaggaagtgtgttcgaatgggtacccattgacggtcgcgttataggaattggttcgtttcctaccgcaggtgttgacccattcgaggcgttcccaacttggccttggccttgctgctgatgttgttgctgttgtgactgttgttgttgttgctgcgacggtggaggttgggatgattggtgttgactctgagactgttgctgttgctgttgttgctgcatatgaggtggaagggacggtgttccctgtcgaggaagacctccaccattgagaggcggtcggacctgttggttctgaattggtcgtccagccattcccggaccaccagtcgtggtaggttgaagtcctgggtttcgagcacggccaggaggtaactgcaagttaggtaaagccgggctgttgatcccttgaaccatagatggcccagaggttggagttccagctcctgccccagtattgctgccagtggctgtattgttgttgacgttattcgcggtaggagaattggtgttaccggcggatgaacctgcagcattcgtcaacgttcctcgagctagttgggcagtatagtgattccacaaactgagcagcttcggggtcttgagaagataaatccaattaagcgaaatagacgagaggagaaagaaaagggttaatgtcaaccttattctagaccaagatcatgggtgggaatcaaaatacaagacaaagagaaagaacgaacagtcgtgaacgtcttttgcctctgttcttctgacatcccctgcaaacttctgaacaatgcgagagcagccatttgttggctgtttgaatttgtcgccggcgtcgtaccagccggcgctaccggagtgggcgttcccgactggactggtcttacaggagcgggcgagggtgaagcagtcgacgctgcgtattgtgaggtctgcggagtggacgtggcggaaggaagtgtggaggcggcagcattcggagtagaggtcgaggtcgaggcagccggttgggcaggtgaagcgcgttggcttgagagctgagcttgcatctgtggagcatacgccatcaacgctcgaaacttgaggatggttcgaaatatgatacaaagcaatgaaaagatgagaaaacaccatagagcaaagaaaagacattggttaaacatcgaagcaaggagtaaatattcaagatgcgaaatgaacaaacctgttccatctgagcagggtttagttgacccttccttgcgagattcaagagttgaccaatattaacattcgccagacctggaggaagggttaagccacctgtcgctgcagctgatccggtacctgtgctcgctcccgcaggtgtgtttgcctttggtgttccattgggattctaatctcattcgaaatgataaaattgagataacacaaagaaggaagttccaaatccaactctttagtcaacagctttccccgtctgcaagacacgatcgagtacagaattccgaaaaagagggaagcccgattaacacacctggccttgaagtcggagttgctgctgctgctgagcagctatgatcctcaaagcttgggcttgctgttgttgctggttggtaatattactggacatatcctcgtcttgacggatggattgggcaacgtcggacaggcgcgaaagatctggatgttcttcgaacagcaagttctaaacctttggacgacagtcaagtgagatcgtgaaactatcagtcaatttcaaaagacattaacgaccttctagtccatcctgactcgtcaagagaagtcacccatccgcccttgattcgacgttgtattcagtgtcgataaaaagacagtccagcaagggtttctgggtacaaacagcttgtcatccagaaacattcgaccttcgtgctttttactcaagaatcgtcatggaggcgcgtctcgcgagaagccggttgcatagatacttacaaagagccaagagatccagtggatgtatgtatttgagcgagcgtgtgctgaagatgatagtgcaaacgattcagatgaaatggaggcaacggtcgaagttgtcgaatactcgatagattcggtaactggtcccgaatggcaccccatatatgcccaatgcttgggaccaaatgtcgctccagtcttcggccacttgtgacactgggtttctttcaagaataaatgatatacagacagaaacaaggacgggaaaagacatgtgtataatcgtgatataggtatgtttatgaacgtcctcccattcctccgccagcgctgacggtgcccgtgaaatgagcatccgcatcctgccagaccttcataaggacatatgcttcggaaagaagtactctgacctcaacgtccgtccaattttgcgtaggtagcgattggaggtacatgatgatctcctgtatgaagaatattttcgtaagaattcagacagtgagcgtctcttactgggagaacagaagggattcttatggatatgtgtaattaagcttttaatttagggaacttgcctggaaatccttcttcatgagttcttggctccaattgacaaggaaagccgagcagacatacaaatgaaactgagagaacgcttctgctccttcagcctgaacaaagaaacgaaagacatgaaagtcaggcgaaacatgaagacgatgatgcacaacattaaaggttgatcgggacgtactagataagtatcccacatcctgattgtagcctgcatactgatctccctcatgagcagacaattcatccatcggaacgcaaactgcatgaattctacgccttgttcttccatatgagatgccagtggagctattatcgatgataagaaacaatcaataaacagccatgataggaaagaaaggaaagacaaaaaggtgaacaactcacggtctatcctgccaaccaattctgccatctttcgaacagaccgatgaatacccggttgggcaaatatatagttatcctgaataccatccagtagtttactcagacaccaaaacgaatctgcctcaatcgctgacaaaatatgaggcggcagctgagcaatatcaaacgtctcgggatcggtttctgcagattgaatccataccgacgaattgacaaacgcaatacaacttctaatcagcctttgaatgtgtttgcgcgatcccacgaccacatctgacagtaaagagcgagcaaacctatgtatgcggaaaggaagatttgaaagaatggaatgacaagatcgttgatcccttgaacgtaaccagatgctggatgccggatagcccagacgtaaagtatgcgctcgagagactgtgtagaacgtaaaagccaattggtgttctgtatcaacacaaaagggcaagttcagagacgaaaaagacacacgaaccctcattgcaggctccattgaccatagtgggacgccaggtcgtgttctcggaacgtcaatcacaatctgatgccatatctattgtatatgacccacaatgaaacaaacaggaacgtcatgagaccgcgcgtgcacgtctcgttgttagtatgcaatgtccgaggaaacgcacctgttgatctagcgactttgttccattcttgaaagccaacctagataactcctgatactcgtttcgttttcttgaaagcgttgtcatccgaggcgctgtcggcagaggtaaatagcccttttttttacaaaaacacctgcttcaatatctctgatggttggacatgttgattgacgaggccttttcttatgcatgaactcacgagtaacatctgccaaactattggtcgaagctcgttaggtactccgttccaagccaatgacttcaactctcccgaatcaacgccgagaccattcaacaacagcttctccagcttttctctagtccgtctagttcgaagtgattgaacccggccgagtcgattaccgcctggagaacagatcaatgagggagatcctatctgttcgggtgtttgaaagtttgaagcttctttcgctttgcgaagcgtatgtaccggatctgtgttttccatcgacacataagtttcgtcattcccggaaggaaacaagggagaacaaacgatcagtcgactccttttattcgcatagtgatcgatctcagagttttagacaaagaaacgaccgaccagccagaatatgttcaatatcagccttcatgaccccacccttcggctctgctggtgcttcctcctcatcgtcaccgatatcttcaccatcgccacctgtgattcccaagccaatcgatggatctgaaactagaacttcatatgccgcaccggaaggttctctcttatgatcgtctttcttcgaagtcagccttacagaatcactgatgacgtcttcatcctctccgcctgattttaacctatggggtaaggacagagaagttgcagatgacgaagcggctctccttcctactcctcccagactagacagaaaagacgagggtgttcgactcggtccggcaggtcgagagccaagtgaaagtgaggaaactgtgttggtaagttgcgcttgagcttcggtctgagcatgtggcttcgtgtgtgatcctccggtaaaggacgatggcgtcggtgtcgggtattgtttcgtctttgacgtggacgatgttgatccgagcgtagatccagatccggatccggaggcagatgcagaggttgaaggtttagatacataagctgtctttgggacgactggatcctcgctatccgaagcagaatcccaagcgtcgtcttgatcccatctttgttgtcctactttcgagttgtttgacgaatttgactgatgggatggatagattcgactcatttctcttctcctctgataagaaagataaaccaagcgagagacgggaagaggtaggagcagagagcggagtggggcggaggttcaggcttgaggttgaggttgtgctttgatagagatgggtctatatcaacactggggaaagcgaatataccggacctctttttcttttgtgttacgcgttttccaagagtttgtctctaagcaggatgagttcaaggacgagacctgtcggatatgagagctgtgtgaagaaaagatgcctcttcaaaagcgtgcgactcaaactaagcgggagcgagcgggcgggcaagtaaatcggttgaaagagcgatgggccaaaggagggaaatgaaatctcatcccatcacggtgtgaatgcttcgttgtttcgggtgtttgttcgatcgaaacgtcgtcatatttaccaacatcccttctccttactctttctttttccccatctgctctttcttgtgtatgactttgatctcatagtcattagacgatgttgattccattctgcattctggcagatgcctgccgaacaaagacaaacacaaacattgatcgtatacacagaaggaagaaaaacaatccaacaagacttatagcaaaacaaatctgtaatctgaacctcttctccttcctcgcgcaacatcttccgacctctaacaatcttcttgtttttcttccttttgctactctatttcaacgcagtgaacatctccatcgatcgggtgagtgtctcaatctcggcatcaagcagtttcaactagacaaggatcaagtcgaagtgagcatagcgtcagtaaaaagcataacaactcataaaaagaagatagaaaacgaaacttaccttatcggcgttgttggcgaggacctcggcagggatgttaggcttctggctcaaagcgaccgtcttctcctgagaagtcttagcgatctcaatcttcttctgaagcttctgaacctcggcatcaaggtcgaccttaccctgtaaccgatcggagcagcatcggatgcaaaacaattctctaggcgtcagagctgattcaactgttggataaaagtgaaaggaaaggtgtgcgacttacccgaaccatcaagtgaacggtgacctcagcgttgaccaattcggaggcacaaccttccggaagttcctcgaccttgctgatcacctcagccgacttgcatcccttggtgagactggaaagaacagtgatttggctctggaacatctcgttcaatctaggctctgatacctggacaaagactgtttacccatgaacattttggaaatatataaagcatcagaaggatagttggcaaaattttgataacctgaaagaatcatgattcaggataacgtaccctgaagaccggactggatgttgtaagtggaagcgagagaccgagcggcctttgtacatgagaacaccaaatcaaagtccgcctcggcctgaggatcagcagcgtcagctgactcctcagggaactgggccaaagaaaccgacaccgtcttgtctgcaggtcgtcgaggtaatcgctgccagagctcttcagtcacgtagggcatgaaagggtgcaaaagtcggagaccctcgtcgagacaggtgtacaaagtctgctgagcagatgctcgaacctcaggcgaagccttttcgtcggtcattgacttggaagcctcctaaagtaggcaagccgagagacaaagagacgagatgatgaacaaacaaacaaatagatacaagaaaaggcagatgaaagataaagaagacgaacaatgtagacatcacagaactcgtataaccagaagttatgaatagccgtggtggcggacatgaagcttcggtcggtgaagtgcttgttgacatcggccgaagcgatgttaagcttgtggaggatccatcgctcaactacgctctccttgccggatcgctataagacaaaaagcctgtcgattgagctctgaatgatcgagaatatcattgcaagaaaaagctattaaaaagatatcagagaaacaaaccttggaagtggatgcagggacgaaaccagcatcaagcttaagcatggcgaaccggatagcattccaaagcttgttgcagaactttcggtaaccctcgactcgaaggatgtccaagttaatgtctcgtccgacaccagagtatgcgcacaaagcgaacctgagtgcatccgttccgcactgaggaatacccttgggatagtcctttgcctgaccggcctttgccttggcaatctccttgtcgtccaagtttccggccagaagctgcttgtgaaggtcttcaagtgcgcaaccctgcatgacatccaaaggatcgatcacgttacccaacgactttgacatctttcgaccgtgagcatctctgatcatggcgtgaaggaaaacctctttgaacggcatctggtcggtaagctggataccaaagaacaccattcgggcaacccagaagaagatgatgtcccatccggtttcgagaagagtggccgggtagaagtttttcaggtcatccgtcttctcgggccaacccataatggcaaagggccagagtccagaagagaaccaggtgtcaagaacgtcgtcatcctgagcaagggtgtactttcggccgttggcgagcttatcggctcgggcagtggcctcctcaatcgttcgtccgacaacccaatgctgggtgttcgcagcgtcggtggtctgtccttcgatatgaaccaaataagctgggcatcggtgtccccaccagagctgtcgagagatacaccaatcctgcatgttctccatccatcggtaccagtcggcctcgtttgacttggggttgactaccatctctcctgctcgagtcctcttgatggactctgcagcaagaggctggcagttgacccaccactgaggcttcatgatggcctcaatcaagtcaccagatttactgcaaacagggatggacattgggttgtcctttgtctcgatgtagaagccctgctctttgagggcatcgatgacggcaaccctggcgtggaagcgcttcataccgttgaacttttcaccagcgttagcgttgagagttccatcatcgttgaggatgttgatgaactcgaggttatgtcgctttccacactcgtaatcgttgtggtcgtgggcgggggtgatcttcacggctccagttccgaaagccatgtcgacggtgatcgcgtcggtgacgatggggatctttcggttggcgacaaacggatgaatagcgaactttccgtggaggtgctaaaagtgatatgatgtcgacgaaaacatgaagagggatcaacaagattgagcgcaacaagagatcaagtataaaagaagaggatacgaacagtgtatcggggatcatcagggtgtacggcgatagcggtatctcccaacatggtctccggtcgagtggtagcgacgatgattctctcgtctgatgcgagcgaaccgggtgtgcaatcaagagacgtgtaaacacagttaagaacgcgtttctccaatgtccattttcaaagtcttcagaaactcagccagatcgaacttaccggatccttcaatgacgtaggcgaacgaggtgattgctccgaactcgaacttttccttaggatcgtatccagggacggaaagcatagttcgtccggttaaagtcttttgatcgacctatgtaaaataaatggacagatcgtgatcagaggtggacaagagggctactaggagactgatagatgagagggaagagaagcttcggcttacctccaagttggacagggtagtgttcaatcgaacacaccagttgaccaatcggttctctctgtaaatcagtccatcttcgaagaacttgcagaaagcctcattgacagccttgctgtgggtctgtaggatcgaaagagagcgcacacaaagcgggtaagtgatgattgttcgtcgcgacaagatcatcggaaggaaacgtacgtcgctaagagtaaaggcgactcgctcccactcaaaggaagctccgagtcttctgagttggttcgaaatcttaatttggtaccttggagaggttggaaggggagagccattgattcaatgaaaattctggttgagacacagctgatacaaggaagaatttttggactcactcgtccttccaagtccaaactttttccaagaatttctcccgaccaaggtcgtgcttggtcaacttttcatccttccacaatcgcttctcgaccacagactgggtggagattccagcatgatcatatccaggagcatatagcacggtgagacccttcattcggttccatcggacgagcgtgtcctgaatggaaacggtgagagcgtgtccgatgtggagcgcgccagtgacgttgggcggggggaaaggaacgacgaaggttccttttggcgagactgagccatcggcttccatcttgggcttgaacatgccttccttctcccaccagtcataccaagcagcctcgacggccgtcgggttgtaaccggttgacatcggaatggtcatgtctgaggacagccgacagatagaatttggttgattgaatagaggatgtagagaagaggtgagaatgacggaagacaaaggacgagaagactatgtgtaggacaaacctttcttttcacccttgggagtggtgttgacgaaaggtgcctcttcaaccactttgggcttctccttttgctcctttgccttaccctctcctcggggcttgaccggtcctttggcggcggctttcgcggccttctcggcagccttggcagccttcttgactggaatggatatgcagagaggggaccagaggaatgtgatggttcgaaggtttcgatcgagagaaaggagaggagaacaaaacgaaagcaatcatgaaatgaaggaaaatgcaaagatatgagacgtttgtggtaaaggtaaaataattagaacgcagtgaaaagagagaaacacttacgggctgacttcgaaggaccctcctgctcttgctgctcgacagggtcagacatggaaaactgtttgattggtacgaaggtgtggtgtatacgatatgaaggtatccttctgaaaaagagacgagtggtagagagtgtaaaaagtcgactgtggatcatccacactggcaagggtcaggacgtaaggagagaagatcgagtcagagaggaggcgaccgacgatttgacgagatggccctttttcttcatttttttgttttcctagtcttccttcctagtcagcctccgctttttccctattgactcggcctaatatgccataaaagttcctgaaaattgcaaaagaccgttctgtagtttgtttcgtagtgctacactatagtctgtatagtgcatttgtattttagtccgttcttttgtagactgctgttcgtactgtagtctctgtagtgcgagtagaggagtctggtcgtacagtacctcgcatggcgttcttctcaatgaacacgtcctccttgatacattcttctgggagacaatttctatctgtggtaactcctgttgctcggtcgtctccctcatgttactcttgttgtgctctgaagaggtctcggatggaaacgagatgaaatttaattcatgcgctcgtgcatcatcatcacaagtacacttgagtgatatatgatcagacaatacagagcgaacaaggttagtggtagagtaatattgaaagagaaggacagacctggggtatttgtgtgacatatggcgaagaggactgctggttcagaagcgaagagatctcgtatggtagtttgctctctgtagcatatggctcgaacctgaccctgatacatccaaggtgagatcctttcaatttgttcttacatagagagcctcactcccccatccccatacatgtgccatactatctccttctcctcttgacctctgctctctatctctttcttggtctggatggttcacactgtgagatattgtccgcatacagatatatgaaagccctgactaatcaaatttacttatgtaagctctacccaagtcgcttttggcattcgacctcatcctccggctttctctccttctgtctgcattcgaaaacctcatcggccaaccatgccttctgcaaagaacgtgttgaggaacttcggtagggattctgcccaccgaaagtcgctcctcaggtgagtcttggtccattgttcccaaatttgcatcttccttcgcttttagacagtcagcagatcgactcgcacagacgctcatcctcttctgatcttgctggttcttccctttttccttgttctctcatcccaattcgacattctcttgcaacctatcctatcaataatcacagaaatttagtcgcctctttgctcgagcatggcaagatcgtcaccactctcgaaaaagccaagactacagccatcttagccgacaaggtgcgttcgaattcctttcaatatctcctgtctctgtatcttctctctgccgatcggaaggatgtgtctggtgcaagttcacaactgaattatatctgccttgttacactttcttgtcgtcgttatgtctcctatctatcacatacatatatctcctctctttcttttcctgtcgctcttctctcaatcaggcgatcaccgctgccaagaagggcacgcctgcctcgtttggaaaggctcacagcctggtactcaatcacagtgtcaccatgccgctcctattcaccaagcttcgagaacgatatgctaagagacaaggaggatacacccgaatcatcccgaacggagttcgagcgggcgatggtgcaaactctgccattcttgagcttgtcgactcgcccggggagatcagatttgaaatgacggccagagagctcggaagaaagtactatattgacgagctgtcagtcttgtttatacgttttcctggttttcaatctgtcctgaaattcttccttgtgaagtcgctcatctttgtccacctttcttcgttgtccgaatcgatagggcaaacatgtcaaaaagaaagattttggacccggcggtgttggacaagtatgaaaactggaagttgaaggaaagggtagaaaagtgcctcaaattccgtccagagggtgcggaagaggagttaatctctaaggccgaggcttacagagtatgtttctgtcgtccctcctcctttctctcttttgttctccgttcctgatctcgacctcgttttgtgtgtgtatctctcctttgcggatctgtccgaactcgtcttgaaaataggacctgttgagagccgagccggccgttcacggtggtctcagccgagtcgatctggacaagttcaaagacacaccggaacgaattcctacgtgcgtccctcttctttttctgattcttgattcattcgccctctcgctctctttctttcaacaacatggcgctcattcaacttttccacccgtccgttgtatcgtggttcctttcctttcctacaactttcttatgcctcacagtaactccaagatcctccctgtcaaaggccgacaggtccgagcaggagagctcttaccggccatggcgatctacaccccccgaaagcctacgccgttcaaggaacgacacgactacccccgactgccatttggtcgacggatgcatcttaaaggaaaggacctggccgccttccatcagaacggtccgtttgatcctgtggcggaggagatcgctcgaagtccgagtggagagttcatgttggcgaggacaccgcttaccttggctagaggcttgttgggtaagaaacgtctgcccgtcaagagattcggtagaaacggagatggtctcggaggttagacaacgggtttgccatcaaccttgcctcgcaagaggtacacaaagggaggataatccccctctgtttcgtttactttcttggggtggcaggaggcaatcgtgaatgaaaatgaaaatgaatctattgaatctttgaaggatgttttctaaaatgcgttttgtcagttcaggtaacgtccaattactgtttgttctctgtctttcaaacaagtcttccatcgtagccattcggatttcaagtaaatataggagatgaagagaggaaaaaaagagaagaaagtggacgattgaagaataggttgagggaaagactggattatacgataacgaaaccaaagacagcttgaatataaaaagaagaaggtagtgtataggaagaaaagaaggagatcggactggattacaaggaaagaaaaaggctaaagaagtgcatagggttgtttggatctcttcctttatccaaatccggcccagaggggaccaaggtaagatacgagcgggatagaaggtaagaacgataagggtacgtagatagaaggggaaggatcgaacgaaaagaaaagaaaagaaagaaaaggcaaagtagaaacgataagagcagagcaaaggcaaagcagctttgttcggcagaaccaatcgagagaagtgacaaagaaagttttaaaaaaggacaagacaagaaacacactcccccttcttaatattcctgaggatttagattttaaaaaaaagaaagaagacagggagaagaaaccccgacgaatactcaagagagatcacagactaacaaacacaaccaaggagagcaataggaacacaagaagaaatcaagccagagctcttcgctcgacgcaagacttaccgacttgtttcatttcttcttgatcaccctcaaacctcttgaacgtctcaggctcgagcttagtccgatttagaaaaagaatcgaggaagaatcgaactaataacgagtgatttatccaagcgaatcccgcatgaccccaaatgatcagaatcacacccacagaagagcgtgtcggaagaacccaaagaacgacaagggcagcaggaatgcagaacatagaacgcgaaagaagaattgagagcgggggagcaggggagcagggagaaagggagaaagacatatgcttagcttcttgaggatcgaacagtggccttggaattccaagggatggataggtgataggaagacggtgaagaaggaatgaaatagttttggagagcaggagggaagggacaagaacgacgggcattggacgcgtcggaaacaattaacaagggggaaagaacatcatcttttcctcttttgtgatcatgtttcttttcgaaacgaatccgaggtagttctggcagaaagaatcttcgaacaaatacggccggaggagagatggacaaggggagaagaaagagagaagacaagaaagtgagacagataagagggactaacgtagcaccgactccaactccaaataccaaagctccccaagcggcctgcttaaaggtctgcatcgctcctccaggaggaggaggcaccaaagctctactgttggtagcgatccttcgaccctcctcaagctcctcctcctcctctctcttctcctcgtcaatactggtctcctcagattcaacctcctcgatcgtcctctttccggacttagtctgctcaattggctcctcctggtcctctcctttcatctcctcgtcctcggatccgacttggccttcgtgtgcttgcttttcagcagcggcagcctcggcagcggcttgaagggccgctttcttctccagttcctttgccttcaactcctcgaccaatcgcttggactccatgagttctttttcggcagcgatcctcctctgttcggcatcgatcacctcgtctaccttcttggcatcaacctcgacaataatctgggaatcagattgcttgacctcggcagacttcgaaggggttgacgaaagagaggaagcggcggcagctctagtggaggaccgaagaggcgatcgctcggcctgcgagggggattgagatgacttgatttcagaagttcgtgttcgcttagcagccggagtcgagccggtgctgtgctgggaagaggttgagccagagaccctagaggcattgagctcctcagaggcggcttgagaacgttgagactttcggtactgctgctgaggatctggattggcttcgctaagagccttttggatcatatgcaattgtgtgtcgaagaatttttatgaacagtcgacacgtaacagagatttgcaaatcagaaaatatcgacgaaagggaaaccagagacccacgtacctcgattaaggagatgattccgtagtcttttgccacctgttgagcaatctctaggacgaccctgtacacgaatcaaggactaagtgtcagctgataaaacctctctcagaccgtctgctcgagggatgcggccccggaaaccccatatcttcagatcttcagattctgacgccgaagtatgtctggaggacggctgcattggcacatgcagggtgagagaggtatataaaagagacagagactgaccagcttccagcgagtctaatagtattcgtcgtctttcctccattagctccgctattgtcaaagttgttcttgacccaatcacactcggccttctcctcctcatcaagagcaccggggaaacaggctttaaacatggtggtgagggagaacgctccggtatcgtatcgtcgaaggatgaacgcgtgtccctccggctacggcgagagcaaagggaaagaaagaaaaaagacagaacaggacgaaccggtcagacactacttgacagaaagagaatggaagaactgacagtcggaactttaactcggccgacgatgatctcatgtccttctcgaacgatagtctgatactttacaacaaaattctccgggggtactgtcgtcgggagcacagcatgattaggcagccagacctggcagatcgacaatgggaaataatgattgattttacgagaaaacacaaaccattagtgaggtgaggattcaatctaagcgatagatttcaggtcgagcaagagaagattgaaagaaaataaagacgacgtatcgttaggttcgtttggtctggatcatttttcctgcaatctgatcttaagaacgaaaaactcaccggctgacaggaagagagggccgctgatcgatcgcctcggactaaaattgaccacgaggagttgaaatagacgcgatggaggttgaagagaagaaggcagcttgcgttaggtccaatcagatccattcaggagagaagaggaaagaaaggaaagaaaacaaaacaaaacaagaagagggagaaagtcagagaaatggatatttacggtagtggttcgtgccatttggtagcgctaggtatggatggattgaatgaagaagggtttgaggttatttgatgttaaacgagaagtgttcttgctttatatagaaaggtcaacaatataggaggataacgatgacggagggtgtgtgtatgttgggaggcaaagagaagttgaagtagaaaatgaaggagggcgcgttttgcccgtctctttcttgccctcctgatttcttgagccaacgatatgtttctgtctctcttgtacttcacatcaacttgctgatctgaccacacggccgtatctcatatgacgataacaaatgcattgtatagtgaaaaaatcggaaaagtgaagatgacaccgtcgcacactaggcatactcgctcccctccggaggctgagggatctttcggttgttgggctcagccatctctctttaagaaccggcagacaaagcaaaagaagtggcataggtcagatcaaactgtgaaagaggtgttgtttaagatatatatacaaacggcctagtacccacttgcgcaagttgaccagaacggtctcgatagacatatctctcttccagttgtgcaaagcggtagtcctcatgcccctaaagttaacctttgctcgtatattgccggcgtcagaaagtgatggtgaccagcatatcagcgttctcagagtctcgatagtgagcagtccactgacgagaccattactcacgactccgttgctatcgttcacaccgggcaggacgattcggcttacgaaccgaacagtcggaggttgagacggatagtccggtccacaaacgatcttgagagagtagattcgactctcgaaaacggtctgatatcaatcaaggcatcgagcaatcaatctcgggattaaaatctttgcgagcgaggacaagtgcgcgaacgatgagcgtagacttacgtggccgggaccaatgatggttccattccaagatttcatctccatgtcatctccgtcctgtcgcgaaggatgccggagtacaacagaagaacggtgacagcaaagcagcgatagaacacgcatgtagagtaagtatcctacgaaaccgaatggacggcatacaatggatcaccattgccctgaggcttacagaagaaaagacaaggggaacctacgtcaaggccgtaagagcagcttccgtctccgatacctttctctcctttctccaattctcctagcagaacaaagtttcgagggacctgggaagtcattgatgggaattcgatggtcactgtgtgatcgctgaagtgatgttgacgatggtgatggtatctgtgacggatggacaatctcaggtggcaattctatcagtcagaagtccgcagcgaaaatcgtgataggcaggcgagcctgagttctctcatcaccacagatctaccatcatctcttgcctttgtttcttcctacgtatccatcttatcccatcgcacacgatctggtcgatcatgtttagacagcagaatccgtttgaggaacaggttaccaaagcgacagatgaaacgctcacgtccgaagattgggctctaaacatcgagctatgcgacaaagtgtcggacgaaggcgagaccgggtacgcttgttcatccttccagctcgatattaagatgatgttgggatcagaagttccgagtgcagctatctgatatgtgtatgtattttgtatatgtcagagctcggaacgccatgctggcagttcagaaacgattggcccatcgcaacccgaacgttcaaatctttgctcttgaggttcgttccgatctctagctcaagggcgtctgtgtagaagctctatgctaacctctcatgatcaccggtccgatagcttgccaacacactgtccgagaactgtggacaaaacatccacagggaaattgcctccaagagtttcactgagggattggaaagagtcgtcaccgatagggtatgtgtgattccagtcctcgtcatcgcccgcatagccccgtttgtcattgctcagagcataacctctttctctcaatagactaccaacgagcgagtccgacagaaagttcttcagctcatccgaaaatggaatgatgcgtttcaaaatgattctgatcttggtataatgaacgagctgtttgagagattaagaaggagtgagtctttcatcaagcgtatattagcctacatcacctcgatactgattatgtagaatacctcttcaaatcttctttcatctctgtagacagtgaatacagctcggtacttacaggctcctctatcaacgaagctcctccggtacgtagtgttcctggtcacttatgatcgacctctgcgatacatactgatcgagccctctatatgcgtttggagaacaggatgaggaaatagaacgcgctcgtgctgccgcagaagaggccgaaatgcagcgagtcctcgagttatcgaaacaagacaagggtggcagatccgttggtgcgtcctatacgaaccagtctcgccttagtggatcgtcgtcgtccactggagcagcatcagcagccgttggctccgccgccacgtcctcgtcgtatgtacaaggctcaactcaaccaaccgcccagacacacaacaaccagcatactgcagcaccacgtagaccggtaacgcccccactggaccaagcgagtcgggttcgtgcgttgtatgattatacgcctgcaaacccaacggagttacctttcaatcagggagatatcatcaaggtcattggccgaacgtatgctgaatggtggcgaggaacgttgcgcggtcgggttggaattttcccagtgaactacgtcgagccattgcctattccaacctgggaagagatgcagagagaacgagaagaagaggacgaggtctttggaagtgttgctaaattcgacgagctcctagaaaagcttaagggcgtcgacgtcaacagaggagaccgagttgaagaaagtagggagatcgaagagttgtatgggtactgtgtcggtctacagggcaaaatctccagcctcattcaaaagtaccagagtcaaaaaggtgagaaatttcattgctgggcaccatctcattcttcaatagcataatcaagctcaccttacggcgaatcttcctctggcttcaaccttgttcagccgacttggagcaaatatccaacatctttactcaagcctcttatcaataccaatcaatgaagaatccccaagttcccttaccccagggtacgctttcatctgcctttgccttctttcatcttgacaggcgatgccatctataccaaatctttgcgccctgctcaaattcagaaatattttcttatactgatcatctctgtgcatatatgtccttcttgacgacaaaacaccaacagcttacccgccaccccaccttgttcagcatccttcgtatggtcattcttctgtcgaccaggtgccacaacaggttccaaccgccagctcgccagcttatgctcaacatccttctgctcaggctcaacctcaagctcaatctcaggctcatctccagggacaagcacatgtacatccacaacagcagcagcagcagctacaacaaccaccaatggacccgcaatgggctgcgtactatgctcatcagcaggcagtcgcgcagggtcatgcaccagcttcaatcccgggtcagactggactactaccgcctgctcaacatctaccgtctcaagatggtcgtcaaagcccgtacgtcctctcgtctgacggtatagagagcgtttaccacgtactgactaggtccttccctgaattactgttttgtccttgatgatactgtgatgaacgattatatagttatgaccctcaacgacgtgagcaatcaccttctcagcagatccaaccatcccagtcaatccatccggccgcccagccttctcatttttctcaacagaataaccaaatgaacccaggggggactcgaccacctcctcagtatctgacgtcacatcctcctgctcaggcgagttcgccgagcaacaacccatggagtggttgaagatattcctctgaataaaacgtagtacagtcagccgttgctcgataacgaacgaattctgaggtctggacacaggaggcctacagcactcgagcccagtcatatcgaggttacgactctctaagctttgctctctagcgtcttcattctattttctgtatatatcggtgccatctattactttgctctcatttctctatgaatgcaccttcctacctacctgtttcatgatacaatacccagctgtccgatgaagatatacaagagagagatggaagtaaagaggacgcttctgtgtgcacggacctgtcatctgatggaactattctgtctttcatctctcctgtcttcttttgctctttctgctctcttcttcgatccaggatccatctcttcgtctcttgtctcactttccatctctgtcatcgttcttagtatcaataagaccgtcagtatcaccaacatcagtagccctaattgctatcatgtccgacttgagaacgacaagaccagctcaggcttctgtacaagcgcttcctgggataagtaaaagatccaggttgccttctcctgtcatcaagtcatcatatggaggtaagagtatatgcgccacatatcgtttcctctcttcctgttttctatatattgtttcggtcctgaatttataaagtgttgatctgtccgaaatgatgttctgatttgggttgactgttctgatagctccgccggatctagcctcaattcgacgcattgaaagacactcgtctcccagtatacctgtcgcggctcgagactctcgaccaagtcgtcgatcggtttcattcatctccaagacggctcaaaccgaggaggaagaagagagaggtggaagcgaagatacagagatgaccgagagtgaggctaatttcgaactaattccaaaagggctggaaagcgctaaggctcggtaagacaggtttcccttctatcatgcagcctagatgtgtctgtgtagaggagagcgtgagaagggttcattctctgcaatgtgtccagaagtgataccctttcgaacggttgcaacgtggccttcttgtaaacctgaattcgttaaacgcgtcgctgttgttgactttcgtctacggttacgcttgacttcccgcatttatctgaacactcgttctcttcgactcttcgccttcacctatccatccattctctccaacggtctacggtcgatagatacgctcgcctcaaacaacgaaatcataacatccaaggccataccaagattcacgaatcaactctcaacaacacgtctgtcaagttagtctccgtctatcaatcatctatcgcgaggggtcgcgtcataactttcgttcgcgtcttgttaagtgaatgatctcagtaacgaattcccatttactttcttccttttcattcatcgagcagtatagcgacagctttccaccaagcttccaattcggacaatcctttcgtgaaatcagggtcattcgtcacctctggtttggattcaaaccaccaacaacctcgcgtggaaacccaactggcttcgtctgaaacacggccagcctccactcacaagacgatggcaaactcccaattccagccgaatacatcattgtcgtcatcctatcgatcatcctcatcttctcgtcgacgaacatcacctatgcctccttcttcacttactgaaccccagatggctattcctaaccgggagcgaacaaagtctcccgttctagaggctgttgctggagcagctcgagctctcagccctgtcagttatctacttaaacccagagtcggtggtcagttggacagcttcattgacgaacgagatctcaatgagaacgatgaatcgtccagaggatttctcagcttttcaactgccgcggtctctccatctagaaaaaagacagcagaccggagcgattttgaccgaacgttcttgtcggctacaacgcaatcggccatggactcaagcatgagcttcgaccgatcgaacgagagcagctatcgattcgaagaggaagagaggttgcttcaagagatggaacaaaagaaaggaaggtcaaacgcagtgaatggcgtctataatactcgcgacttgaacgcaagtaatggaggttggtattcaggattgggcgggtacgatcgagggacatccgaggtttcttcagttaactatctatcttccatgaagggcagatccccaatgtctatctcgggcgcggcgtatagaccaccgatcgaaacagacattgtcttggagaatgaatatgagagctctggaacggacctagaagatccaaatgaggatgatcccaacaagtcaacgaagtctacacgccgccgtcggcctcgagtctcgaaagacaacatggctttcaagtaccaagctggaggatccggctccgatgaatactctgactcggaagagaaacataaacgccggagaaagaagggagaggcaacgtctactggcgcgacaggcatgatccccattgtagaaaaaagcaggcgaaaagggactaaaaaatctacgaaagagacaaccgggtctacaaatactcgcaaagagttgatcgtctttgcggatgaagaagagatggaggctcgtaatgatgattcgttatctagtggaagatctattcaagcccctaccggttacgacgatgactccagagaggaagaggatcattatcccggatttttacgccgtcaggaggaggataatcaatttgtgaagcgagtcggttcccgagattctcatctacaggattcgaccgcatcagcttcatccagatcacgaaccccctctagacagatccttcctcacctgactcaggatgtgcctccagtaggtctaatgtccacccttaaaaaacttcctttacatatcattcggtcagttctcgtggccactatatttctctgcaacatggtcttcaccgccctttcgtgggttctgtctagaccaggtcaactccttcgcgatatgcgggtaaactccactatgctggactggaaaaaacttgcaccgtttctctggggagcatttggtcttctcagcgccgcctaccttgctggttcaggttcgatcgagtcaagttctccatcattaccttcgtcaccctcgtcctcttggttgcctttcttatcacctcgacaaccttcttatgatgttccttctgttcctccggaatccttggaagaagttatcaaccgactcgcctccttggagtctgccctaggatctctctctactcgaactcaaacccaaggaaacgatctctcaactcgattcgccactgcagacgaccggctctcatcggatgttcaccgcgccttcgagattgttcataagaaccaggaggatagcaagacaaggtttcacacccttgattctatcgtcggtcgcttacgaagcgatgtccagaccctcaacgtacggatggtcactggcgaggagacggttactagcttagacgcccagatcaacggtgtcactaaggagctccggtcgttggatgagaaggtcaagaaggcggaacagttggcgaagaacgctagtaatgctgccaaggttgctcagcttgccgcggattctatcgaagctcaacttccggcccggctattcattcgaatgaatcccaagacaaagagcttagacatcgaccccgtgttctggaaagctctcagagctgtcttcgtcgatcgaaaggaggctagtttgctgggcaagagtcaaccatccgcctcaaaggatcaaccagttccgactcctaatccacagattccttcctgggatgatttcttgtcacataacgaggatgctcttcgttcgtggaccgattccgaatttgatcagaaggctcagtcaggcgttatcgtctcgcgggttgatttcctggacctcctcaagcgcgagcttgaggcgttgaaattcggcttggagagtcaatttgatgatcaaacaaggtcgatgggcgatgaagttctggcaaagtcactctctgctatcaaagtggcctcagatgatcaggcatctcggccgtcttctcgatcacccgcttcagaggacacatccgccatatcgacgatcgtcacttctatgattgattctgccctgctcaagtactctaaggatgtcctcgctatgacggactatgcgctcgagtccgccggcggaaggatcatcccttctctcacatccaaaacgtatgaaatcaagccgtccggctgggggactgtattcggtcgaaaacctattcaaggacggcctccaatcactgtgctcaatcctaatatcaatgtcggttactgctggccgttcgtaggatctgtgggtcagcttgggatttcattggcgagaccggttatcgtctccggagtaaccattgaacatgccgcgagggaggtaagctttgatttggcagcggcgcctagggaaatcgaaagtaagtaatcagtgtacagattcacctctcgctccggttatcttgttctgatccctgccttttgtttctctttctatctgttttgtttagtctacggtcttccagatggtgaatctgaccgtgccaaggtgcaagaacacaacgctcgtcgagctggatcagagacagagtccgatgaagcgctttctcaagtcaccaactatttcttgcttggttctttcacgtacgacatcgaagcgaccaaccatatccagacgttctctattccggaggatattcaatcgttggagatcaagacaggcatccttatcgctcgagtgaaaagcaattacggggatgactatacatgcttgtaccgagtgagttgtgtctttccttcatctagctcatactctcatgttccgtgttcagttgctgtgacctttgctaaaaccccaaactatcatttcatcctcttttgtagatccgtatacacggtagtcaataaccgcattttctctcacatccctttcttctttcttcgtcttttcatgattgcttttgctttttacagccagtctctcgttagtgatatcacttaatatagatgccgccgtggtcaagcatattacactaccttttcttcttgttttctctatctctcacaaccccttctttcaacctcttatctctgtagttgtaaagatgtattctattgctcgcttgtttccgttaaacatcagaatgaccacaaagatatcacatttctcataaaggaagaaggggaaatacgtatatgtaaagttaaacagcatgagagacaaccaatcaatcccagacacccacttcttgtagcaccttggccaaacggcctgaggtcgtaagcaaccaatatcaaaccaaacatcaacaagagcatcgttagcaacgtaaaagagcatcaggagaaaagccgcgagatgaacatacgatagtccttcaatagttctgccaactcgcccaccttcagctcacctacatcatgtacattcaagaatctttccaccggtgggcttacagatcctccgctctcgagaagcctttgggcggctataggaggagtgtggactcctgcagaagcgatagatccagtagaaggctgtcggccagcaagtgtcggacgaggcaagcttgtcgaaggagatagcgaatcaagggcattgttaagaagatcggccttgggctcagatggtgtggacaaacgagtcgctcgatcaagcgaggctacagaggattttgggtcagagggcgatgggatcgagtagaatggagtggccttgaagaaaatgcgaaggaaggtaagcgaaatttgattactagggcacaacgaactttatctcttgcaaaagatagaagaagtgctcacttttggtaatgaagcagatagtacttggtcgttgggacgatcccccccagtggcaagcctagcgaaccgctgactgatgctcattcgctcgcctctatccgttggcgcaggctgtaatggcccctcagctttactcgcaaaggacttgaatgacgacacgcttcgcatacttcgagcatcaccatccttcctccacggacttgagtcgtcgtcgtcctgatcatccgatagggatgcttcaggagattctactgctgcatcgtccgagtcttcgcctttgtctaagattgaaactggtctagaagatacatcgaccatctctcgctttggcccccactcttggtttgctttggatatcgagctttctctgagtcgttctatccgatctttggctccgatcccagctacgctagccgtcaaactggctatggagaaacttcgaccttgcaggccaggacggccgatactaggtgcgccaggaacttgagccatcagtccctccgcggcgacctgaccgctaccgaggagcgttcggaaagcgcctaggccagaatcgacaacgttattcagtccagtagtagccaactcgccaacagtcctagcccgaccgcgagttcgaacacctggctgggcagtcagaataccaaggtccttattgagttctggatctacaggagggaagtcggcactgagcactcgtccagaatcccccagtcccaacgacttgaaatcaacattctcgaggaagtcaaccactgctgtagtattgaccaaagcataggatgattctcccgaaatggacatgctcgatctatacctctgtacatagagtaagtctgagaccaatcgtgcaggattggatttgactacactgtaaatgatgacaggtaacaacaaatctgccccagagcttccgcttccggtgggtgttgtctcctcatttgttggttgagtctcctctggtggtttcgtataaacctcctgttctgatgtcacacatggtgaatctgaagattgaggcgctggtggggctaacatactctcggacatggcttcttccagaggagaccggagatatgaatcttggctgctactcctcgccgccgaaatcttgtcaggaggtgaccctaatggtgatatgaactcatggttagagacggccgacaatttgttttcagtaattggagctgagaccggaggatcaatatccttcgctctgggaagcgaggtggtcgaggttgtgtcatctgagcttgacttgggagatccaggaactacggggctagaacctgaggtggacttttttagatgagccggaagttcttcgtcttcaggtctcaacctgattggtggtagacccctcaatccatcgatcacaattttgtgggctcgaacaagaacaagagccttttgcttgggcgattggtgagagggtgactgtagcttttggaactctgtgaggacagtcccaagatgttatgttaacagataatcgccatcggtgttgatcagaattgatatcaccctattgaagagaagaaggcacgtaccagctcctacggcacggacgatgtcgtttagtcccttcctaaccgtttcgttcctatcggcggtctctttctcttcgatcgtcactactcccaaatgatctaatgtaaggtctagcatattcaatgcggcgatccgggaagccaatgcttcgtcatgcttagaatcagttgcttttgagggtgagaacaaccttcaggcatgcccagtggtatcaagttattatcagcttcctcgatgctgacaaccgacgtaagaatttgaagtgaggtactcacagattgtagtgacaagacatgactacctcttctaccttatccaccccttctaatactatcttttcgatctctctttcctttttctctctttccttctctctcttctcctcattttcacctcctggctcgatagatggaatgtctgccgagaaatatgcataaagctcgtcatgaacgaggctagagaaggactgatacacggatgaacaggcctctggatccgagtaggatactggggcagtgattgttgatagagtcggaagagaggtagatggccgcgaacgggatttggaggagatgggtgattgcaatgagtgagaacggggctgagcggcagagggatggggcatggagataaacctggttggtgcaaacaaaacagacttgacatttgatcctgtcctagaaccgaaaacttgataaactcttacctttgaacgccactgatgactcctgtcggcaggccgctcaatgctatctctacccatcctctcgttcccataccaatagccttctctatctccgtcttcttgatagctcggtcgactccccaagcagaaatgaacacgatttcttccttcttctctgtcgactttggcttgacgtctccatcaatcgaaggactgggtgattgggcgcgctcaacagacggcgagggtgatcctggttgagctagaggatccttcagcgaaacactagaagagtatcggtgaatcgatccagtctcactcttggactcgctttctgcatcgacatctctgagagttatcgtgggtggtttgggggataatgtttgaggctcagaagaggaagtgggcaggacatcagcctttggcctgctgaataagctggcgaaagggttacggggagcactgccaagcaaggatgttcgtcctttagctgcactattcattggcacggtcggagttggtacagctggagctggagggggaaacggtagattccccgaagagtgaaggactgtgagtgttggaaactgtttatccgacagactcggatgaacataaggatatgaaagttgagagagcgtttgactattcaatgtgcatgaaaacgattaatattgtctactgacagaaatcaacagacactcagaacattcgtcggacataatcactcacgatctagtcgaggggtctataagagaagacatgataggaccatccgtcgatataaacgacccaaatgtcaagattgatctatcaggccctcgatgaggcgcaaagatgacgacaatcagatcatgaaaaacacactttttggagttgatagatatatgtaaaccagactcacgaatccatcctgccgataaatccacccagtgtaacgaccaaagtactatcgttggctccgccgttacagaagacaatatgctccttaaagacctctggagtgatatctgtcgtaccaatcgcgatcagaggagaagcaagcgggagtagcagtgtcgcctggagtttcgaaaaaagcgagagaatgaaagcttgttcatcaacacatgatcacgttttgttttgccaaatgtgtctggacgttgcctgaagtcagaagtagaatcatgacggaccttcttgaccagcacaagatcgatcacctcctcccagggtttctctcctcctttagcaaccagcgtctctaacatcttcatacctagactatcatttcccaaaccgagtcccctttgagcttctgccttcaggtttgtcaattgcagtcttccagtcaatgatcctcttcctgtcgacccactgttactcctaacaattgcccccgcgcctgcgcccgcaccaatcaccgttccattctccgctccagatagagctttggaatctacacctgttagtccgtcagatttcttccctgttgctccagaggtgacagcgatgtcggtcgtctctacttgggaggtcgatgtagttggtcgcacagggtttgaaaataagggcatccctccagtcccagaatgagaattgttggtgatcgaagaattgatagaagacgaagcgttcatcagacttgaggtcgtaggaatagatgaggtagatcctcctggtgtcctccttcgaggttgataaggaagaggcgaggatgactgagcgtctgaaccggcatgagtagatggttgagctgacaagtgagaatgagaagatgaaagagtgtcggccgacgttgaatctaacgaattggcttgcgaactgttctccgcgctagtcttaggaggtgatccaaaacctagtttctgagctgtaactcttgacaaaggattcccttgaaagagatgggacatctgtaagctcgatagaaaaggtggaaggaacggaagaaagaaggaagagatgggtcgagggaagaagagcgttctctcaacagaagacgcgtcatgtatccactgggcgtaaccatcacttgccacgtggggaaatgtgaccgttaagaaagtctagttgtcgaacagcatggggtataatatatatcgttcacaggtagcattcactctatcaaatacaactaagaagctcaagcgaatgcaaccttggcttctccgcctcctcgcttgatcatcagccctctctttcccacgccccaatatacagccttgatgccctgatcctcccctccactgatcaggctcaaccgggatttgatctcgctcatagggagcgcgtggtcctcggcttctagcaaagcgaggaaaacatgagcgagaaggacgccctgaggagtcagtggatgagccggcgtagaagatgaggcgatagacgagctcgagataggaggtggaggaagttctaattgagccagagaggtaaggaggtcgctttgtgatttttgataggatgagagtgtgtaatgaccagtcagaacatgttctaaatgcagagcgtcgttagatacgacgacgaatatgatgtgctcacaaggtatctctcggcggaagaggttcgccagattctggcgccagagatgattgacgtaaaatatcaccgaatgaaatccataatttattctgcaacatatcacagtcaatatgtccgaggagtcagcaacggtatcagcgtaatccccactgctggcaggaaagaccggacatgttagaagacatgaggctcaccaaaattgtctccatctgcatagtgatcaacggctcgtctatcttctcgtccgctttgtcgtttatcgttacatccgcttccccatctgcttcctgttcatcctcatcgtacaagtccctctccacttccatcttctcaactctgtttactaagggctcatcctttctatgacttctcaagaatactgtcggatcctcgtcgtcatctcctttcccatccttctcctcctctatagtaacatcacccgaatcttgatcgggaggcgcatccttcacaagacccgattggacaggctcttcattgtccaacaagctcggcacaaaaacctccttcggcgtgcgtttctgacttgccgccaagaaccgagtgatcgtcggagtttgccattgagctgccctaggagttgtaggcgcgcctatctggtctttcagaacttcgctggagaatggttttgctatcggtgtgcgtctgggctgataagatgacaatagcttaggggcaggcggtgtagatgggcgatttgcttcgacctagagaaacccagtgataaacatcagacaaccgtacatatatcaaaaatcaccatatcagcgatcaaaatttatatagacataaaccagaaagggcaagtgttgatcaacgcttaccgcttgttgagcgcgcttctccttagcaaatttcagtttctgtagtttcatcttcttcgactcgagttgcttcacccgagctgtctcttctttgaacaggtcttctatcgaaggctcagtgtcaagatcgtccaatccaacatcctgaggagccggttcgggctcgggcatctgaagatatgttttcagtacaacccatttctatgaatctccgttcagagaagattcgaaacgggaaacgataaatatatacatacatctaagagtagttcatccaattcctcgttggtctgtctcgataattcatactgatccatgagttgaatgatgaactctcttttccgaggcatcggttgactacacaatcatgtgtaaaggagactcgggtaagcatctacgtacattctggactacgttcgtatctggtcacggcctgatacttactatccatccactaatttcagtgcagctcggaggagaacgtctggctcgacggttgatgatgcgttcgcagatctatttcgaagaggtgtcacaggttggactgacgtgacttcaaacagtgtttgattcgcagacgctggaggagcatgagctgtcgttgaagtgtgtttcgggctgacccattcgttgagtagatggaaaatcaaacagagaaacaagagcaaaagttgtcagcagcgttcacgagaggacaagtaatttctacccaccctacatatttgaatagctctctctctcctggattagcatcccgaacgttagctggaaacggtctagacattgatacactaaatggccctgccggtgcagccggatgactctagagcatttcaagaagatatcaaggataaccggttaatacagatcagatagggtgaccaggcatgggggaagagagccaaggaagatggagaaagacttgactaactgatgcctctgttatctttgctacattggtttcaaaccgatccaagagagccataaaggacggcatgatttaagaatgatagatgtcgggtacaaagacttctgcgatattagcgtctgacgatggagttcgtttgatgagataaatatattggacgcgtatttgttctgtctggacgcgtttaaggcgaataaatgaatatataagctgttcatctattcgaccatcgacccctcgaactgcataccacgtgtttgaccgataattccatctcgacctcgtccgaccaaaccgaaatccgaattcctaacatacacttacctaacatacatagcgctctattggttcagtcttcatcaacatggccaagaagagatctacaccttcgactccctctacttctcaagaggtcgaaaaagctggttccgtactctctggaacagtttcctcttcaccctcatcgccctctgccccttcttcgaggccagcgttacagtcgactgattcggaacttgtcaggatcaacgcagctaacttgtctcaggcaaagctggcattcgacgatactctccgagaggttcgctctcctttttcttgttttcttaccggattaattctccttttgaatgtctactaacctgattcactgcgtttccctctctgtattctgctggtgtttgcttgactgaattatatgaatctcttttaatataattttattcacaggtcttagtggctcctccgcatgcatacacacaatcactcagacacactgacctcaaactcttgctcgggtggagtgcctgtctcatcgcgttgggcacatctggttgggcatacagacacagttgggaggagagcaaggggccattgaagattgctgtcgttctgtaagtcagatctttctttaccattcgagttcttctcaaacattatggaacagtatgctacggatcttcctgtttgggatattccgtttagctaagagtatcactatacagaatgactgatattttgctcgttgatctaccttactctgaaagatatgctatcttatccaccatctcgtatctatatacatacttcatccaaggccaaaagatttttgttgggaaacggaagacccttactgacggtcgagtaagccctgcttatctcactcttcgttccggaagcacgcgcacgagtagttgctcatatttcgttttgttatcggtgatcggggtgtcatagattgagactagcataatcacggtatccacctcaacaaagctttcccccaagccggaaaggatacctctggtacgttttttcgttatcttgctgttcctttccttttaatagtagttctagctttgcttgtggtgatatttttgcatcttgattctaattatgtttctctcatggccttctcgtttttctggttccattggccctccttctgaattaatactctgcacaatagtacaatatcagtctatcatccttgacatcgacgaatgccggaaagtccttgctatctcgaatagagaacgaaggctcaaaatctatcggcgcgttcgtcagtgcggatggagtggtcgatagggtcgagttggagagctggttaaatgggttgttggagggcaaggaagggaaaagcgcttaagcgcgagagtatccgtcctacttgctagttcttcgggcgacttcaggaacggcttatatacactgagcttctttagtatcgttctggggacatcatgctttcccttctcttttctttgtgaaaatcgatgtacgtgttactttgcaccctctcggtctgcctaaatgaaagtgtggcgtatctcaatttggtattcgtgtcaagtgtcaagggggggaaatgtagaggtaataaaggcatgtgaacatctctgaaagatgggatatattgcacaaatgatgaatgatacagtatcagagttcgtaaaagtatgtatcggaatgtctgtagtaatagagagatattgtccataatagatataaagaaaatcaagaaatcagactcttgagaggaagatgttcgttctcattaacactatagatcagaagcatccgcgtaagtcagtcagtcagttgcaaataattataaacaagagaaggaaagaatcaaatacggaccaagccgcaacataaaacagcagcaatcgctccaaagaaacagccgcaacatgctccacagcagccgccacctctaattcgggcggcctcttctagctcacctgtcgattgcgcgacttgtggtgggctaggaacgggggttgaagagagaggtatcgaggaggattctgggaatgtgcagattgaaatcagatgagtgttggtcaataagatggaacaagtaaggcgaccaagagctttaggacatacgcatggtgggagccacttgaggctgttctcgtcggatgtcgacctccggaagcatggcttttttgtctagggtgacagcagcggcagggtacgtggttgaggaaacggcggtgctcatagcgctttcgttagaagtgagtggtaggaagagcttgtagagtgagatgcaggcgagtctgaacgaagagagaaacagatgacgatgtccgttcccgcgctagatattattgagctactctttatacgaacggaacccagaaggccaagaattgacggatggcggttcaagaagtgacactacgggaaatacctgtgcgcgcagtccgggtccggaaccggctcggccgggacttatcctccgagacggtagaaattctggcaggtgttactcaagcgtttgacataatatatgaaagttgtataagccaccttatttgttccatcaaccctaacctcatcgacaacacccatgtaccacagagagcttggtgaacaaaagttcatggttccatcttcccatcaatcatgtcgacacccacttgctcgccctggaggcttgattatgcatctggatcaaacaagtaagtgatgcttatacacacctgtccgcttcatgtgatcgcatgatctgatagactctgttgtacagctctcaattagcgacgatccctaatccacctggagcaaaccagaagctcatcaagtctaacaaggtatgttctatcaccataggtcaaagatccttgtcattgaacgcatccctcttgaatggaagcttaccatattttatatgctttgttatctctgatttgactgtctcaaaccaagaaatcgaacccgtcgtcgaaggcaacctcgacagcggttgttaacccgatggacgatcctctagccgctcttgggttcggagggacatctatccggatgaaacgagcttgggaattagcgttcagccctgctaaggtatggacgtgtttttctactttgtctctgagactgcagggattgacgcgctatttcgttggttatagtccttaccgatgaacgcgttcatgttgtacatgtctggttcaggcgtccagatcttctcgatgggaacagtcttcatgcttctctctagtccaatcaaagcgatgtccaacatacagaaaggtagctctaggatgatgctcctcaagcaaacgagaacgagacaagataagggctaactttggagacatttggatctaaacagtcttccagccgttccagctcccggctaactcaacagagacgaattcatctcttctagggcccaaaatattattcgttctctgtcaatgccttacgttcgtttcgttctctttttccttttcctattttccccactctcatcttcgatgatacatgtcttttgaatactgatcatgtcccgctttgaggaaaacctacgatcatacaggctcgccctcggactttggaaagtagatcagatgggagtccttcccagaggagctagtgatttcttagctttcgagaccagaggaaacgtacgtattgctctcctttccctccttctgaaaccagacaagcgaacagagaatacatcaaactgacccaacgatccaacgggttgacataaaaggctcccgaacgatctttctttatgggctgatacctcctcttccttcctgtcgggaaaaagaaatcgatacggttgtttctcgtttagtctccttgtaagatttgagttagaggtgtgatgtaatttgtatagttttctatcttatgatgattgttaaactttctcaaagagtttccagaaggacggagcaaagtcgaaagatattttggaaggataaggagagtagaaagagatggacgaacaaggagacatcgatcagtcatcgaggcaagacggaacgggagtagcagaataggacggaaacgaatggagatcgacagacgagggatgaagagacgaggatgaaaatgaggcgaaacaagagaacacaatagaatgggacggaacagaacaggataggacaacgaaggctagggtatcgcttgtttgttttgttttattccgagaataagaaatcaggaagaaaaaaaagaagagaaaagcagcaaagaaaaggcgaaggttgaagagttcgagcgcaaaagaagtagatctaaatgaaacaaaagagaacaatagaaagaaccgattggacatgacaaagtcgcatcaccaagcacataggtatacagaaggaggaagaggaagaacagagagaagggtaagaacacaatgaaactagagtcaaaacaaagtaaaaataagaaaagatgcaaggcgtgaggaagagagagaagaaatgagcgcaaaagcaagacggaaagaggcgcggggagaggggaagtgaagcacaagcgacaacagtgtccggctatgctaagcctgcccagtctttctggccaattttttctttgttcggaacaagctaaacctgaaggccgaggtagcttcgtgccaagatctcttgacgttatctgcgcagcccggtctagaaggataggaaagataacagacgggcgagtgagttgagtcaaggaagagagacaagatatgcagaaggaagagagagagagagatgtgaatctagaagactaacgtccattccgagtccttctcggtcggcctgaattcttcttcgattccgcctcgtcttcctttccgttcttcgctccactttgtgggcacatatgtactcccgacaccatatttaaagctctctccgccggtgacactgccacctgggatcgtctgtaaagtcgagtaggtgagttcatgggcgtttggtctaggaagaatgctggacagaggcgggggagaaggaatgacggccgccggtgctctgaatgggcgagattgttctaaagacttccgtcggcttgccgcttgagcagctgagagatacacaacagaatcagcgattgttctacattggagatacccataaacatcccagaggcactcacgcgtttcaggatagatttggggcccactggacgaagcgatagaagaaggaggcgatggatatccacccctcatactttgcctagtatcatacccaaaccttggaccgggaggagggagaatgtcgtccgaatcaaaggtgtggacagtcgactgagagagcaaggtggaccgtctagactttgtgccaacagtggtggttgcagtgttcgggtacctagtggtcgaggtcgaggttgcgattgaaggttgcctgtacggctggtagccatgcgaggaaggagtgtgaggagatgtcgggctgggtgaatcgtccttgtcgctggaggcgatatctagccttggaggaatcagatacatctcgctcgccggctgattccatttgcggccggtgttgattggctttcggttgtttgcccgataggacgtcggccgtccagtctgtaggacaccagagagggtatcaaggccgccaaagtcggcttcgctagaggtggatgaggctcgatcatgaaaggcatagcctcgccgaggagcttccaagccactgtatggattgctgtgcagagagattgaacacgcatttatgcatgagccggtgcagaacaaagaagaaaagagggagaaagacacagagagataggtcatactagtttgcgtcgtgtgcttgaccggatgaatcaaaataggtcgatggttcgatcagactcttcttcagagacgaatgggacaatgacgcgtaggacggatccagaagtcgatcaagctcggcgcgttgaccttctgctgtcttacgtgcccgacgcgcagacggccgctcgaggtgatggtgatgatgatggccgctggacatgatcgcgtgagtatgtatatggacgagtgctttgaatagagtgaggacaatacggtgagaaggatgaagagaaaagatgggaacgacccgtcgaggaaaaggcttttggggaaagaaagtaatcgataaaaagtgacatcacgggtgagacagcccgacaggtaagccctcttttctgccttttcttgtgcatgccattcgttcccacccacgaacagtccagcttttccaagggaacaccgcacttacagtctgttcagatgtatgtgagcgggtgggtgtatgtatgtgacagacaagtctgagtgtgagtgtgtgggtgcgagtgggtgagagaacacaagacagacgacagtgagagagcgaaagacaacggaaaggaaaacgtgaggacaaggtgagacttacgtaatcattattatttttgttgctatagtcttctctgtagtgtgccatggtcgatgagtatcatgtagatccgaggcgactgctgcctcgaggcttatcatgtacagatccagaatgtctgtcttatacatgtacaacgggagtctgctgcttctcatgtctgtctggatgttgagctggagccaaaggtggcacggtgaacagatgaaagacgtgtcgtcatcggccgtagtccgactaggacttctctagtctttctttcctattggccttgtagtctgtagtgtcaaaagattacgcgtgctaggaaaggatctaatctacaatcaaccttcttcaaacacacactctcaccacacatatgatcccttcggtacatcatctcgtctgtctgtcactcgttacatccacagcatcagcattctcctttccatctccgttcaagaaagcaaggttcacagaaaacggcctcgttctcgcaggtgatctcggtctcggtcgtcttgacgggaaagtcgtcgccctgggtgattgggatggtgatcaatcgttcgtccagctggtttattctttcttctgcgttcatagttctcataacttattcgattgatttcttactctacttgcggtcacaccgtagccttgatgtattcaccttgaccaacgatcaaaaggaaattcacgtttggctatgggatcatggttcgcacagcacctcgctctcatacacacacccttcctgcctagcctgattttttcttctctactttcctcctcaaatatcttcagtcaactttaagtacaccaaagcaaagccgacaatctcaaccaaaaacaaggttcgcaatgtcgtgccaggtgatttcaaccacgacggtcggttagacctgctcgtcctgtcagagattgatgacggtggctggtggaatgagatcaaggagctttcagtcgatctatacatccagcaagagtccggagagtttggtatgatgatgctactatatctcgagctccattattcatcaagtgcttatcccttgtgcgcgcacctttcctcctacagactcaccggtatctttggacagatccaccttggtccaaccaacgattctagattctacaggaaacctcagaccggatctcctaggtcttatgtctgagaagaacggacagcaatcaagcctgaagctctggcagaacgacggacatgggaactttaccatgtatgtgttgtgttgtctgggtcaaagtgaacaccggcctgtactgattgactgtgggattgcgcgcgaatcaaaagacaagaaccgatgttggactcttccaaagtctgcacattatcagaaccacatagcaacgcgttcgttgacttggacggagattgtctcgccggtcagtatgccgttacagtctgcctacccgaggatacgcttctccgtcctctgttctttactttcatccacatggctatagacgttcttaccagacgcatgtctcttttcttgacttcaatctcatgccctgcgtgaatcacagacctcttcctacattgtacagatacctacacaggtgaaaacaccttccaaatctgggtaaatcgacggggaagttttgtgctctctcacgaaggccaattccccaagggttcgggcatggtcacttttgccgatatcggtcggtccattcaatttcttctccctcctttctcttccaatcgttccattctctctttccatcttactaacctccctcggaaatcttttgcactaccatctctaccttctcagatcgagatgggacgctcgacatgatcttccctgtttgcaaatcattctccgcttcaactggaataggccaagattgttctgtcaatgtcgtttacaaccagcagattcctctctgctctaccacctcgaccgtcgtcctggacaaagaaggaaaaagaatatgtagagattcagctgatctttgtgtcgctgatagtggtttcaagtttgagtttgatctctcgactggagtgagctcttttctttatgctttcctcatctacgttgcctcgacctccttgacttgtactgattttcattaccttgattatactctagggaatgacaagcaccccactctccaccctattcccatcaatatcaagcccgaaattggcgctatacgatgtttctcaatcacctgccgttcctcttcccctccgattaggagatatcaacatggatggataccctgatgttctccttcttctctcaccctcgtcaggtcatgttcaggcagagatactggtctcttcaccttgttcagcagcgagatgtcagggaaaagcggtggagaagaaaaggagagattggaaagtagaggaaaaaggaatggcagtcgttcgtgggataacagatgtcacccgagcaagctttctagatctcgacgaagacgtacgttctctcttcttctattcctttcttctggattatccaaaagtctcttaatcctcggccaaaatccacaacagggctccttggacatattaattcagcgctccggcaaacaagacggaacaaggatctcattcattcaaaacaacttttacaacgacgctttcttcctcaagacaagagtcctgacgggcgtatgcgacggagtctgtcaaccttccaaccggtcgtttcaaccgtaccatccatatggagtcgcttattctggagcttccttcaagtttactatattggatactaacggacgaaaggcggtcactcaggtggcccagttgccgcagacagcttacatggcccttcagatgccatacgctctatttggattgggaaggacgaacaattatgtagaggtttgtttccttttcttttctctcatcgccttgctctctgatgaatacaaaagtgaccggttctcacctctctctcacttgattgatacaccgaacagaacctgttcattgggacgacatcccattcttccccgcattggacgtcgatcgaaggagtcatcccaaattcccaagtcgtcatctcccctccgacaagtagtttaaacccagacggttcagaaacaacaggcagatggagttggcagttgtatctccatccgggcgaatacgtgccttgggtgacggcttccaccgttttcgcggctttgatcttggccggtgtcgtcgggtttttgcatcttcgagaaaaggtctgtctctccctttttgttgtcacttcatatggtttttactttgatcatggattgatcatgtccgcgttctcgtactctttattcagagggaagacgagatagaacgtcggagagcattacatcgattgaacgtaggagccatgtaaacgaaaaatcgatgctaaatgtatataccaaatacatctcatgtccatatctatacatgatatatggtacataatacacaaaaagacaaacgcttcatttcttgtattggacctcttgagtcttctcctttgctcgttcggcagcttcggctgttagatcagccgctgtcgaggcagcgttatctttctctccagtttcttccttctgtaagctatctttctgtgtgttttcgtatcaagttttcgttcagattgggagaatcatcaagtcaggaacaaattgctcatagagtcaatctatcaatatcgaagatgaggaaaaaggagaagaaattggactgacaactttctgagatccatctagggcgccaaacagtgtatctccagctttcgcactgatctgtttatcagagagaagagagatcgaggataaaatagacaggactagggtttaataccgggttctttcttttctagattacagaactctcagaaggagcggttgcttacattggcagctgtgtcagaaacaccttgtgcggtccctgcgagtgcgtccgtagttgatttagtccgaacttgaaagtggttgtacgtcttgagctgaactcggcttcgaacagagatggtcgagatgaatgtccttttgatcatgtttatcttttatttgtcttctttgactcttgttaatctttgttctttcttttggctgtcctggttgattgagtttgtgcttgagaaagactgggtaaaatagagaagcaacgacagacggagtatgatttccgaaaagagatcgggcgattgattctccccagatcaagcgttgctgacgtcatgctctagacgtgtttccctcaattttaatagcattctctccatctcttgatccttctgttctctctttcttcaaaggctcaatatgatgttctatttcactctatcttgactagcaccagttcttagccagatggacgtcgatgtcacccgagttttgattatttgttttccataaaattcaagagcaagcgctcattcatcttcgccctctgctacttcgtattcttcttcttcgtcaccgccaatctgaacaagtcccgaggcgactgaacatccgaggagagatccatgtttttgcaagatcaatagaaattagagatatgtcgacgtgacacgctaacagaaaggacaagtataaggagaaagaagagggaggaagggttacttacagacgtaagtgatgaacgtgacgccaacgccggcgaaccaaagccagcgttttcttgtgaacgcggccttcttcttcgactcttcgatctcatctgctggtctttctctaggcgacgttactccgaacaatgcctttcctacccgagggaccgcctcgatcgtccgtttagcatgctcccacgcggaaagcctacccaacgaagcatcccgatggggccataccgttggggactccggcgggaaacaactcgagaggatcctaagcgtgtgagcttgtagatttgggtacgtcgtccggatctggttcgcaatgacagactgcgtgaacggagggagaaggatgagagatagttgggcaaataggtagaggtccaacgtggttggtttggacgaatcaaaaaagtagtcggctgagccaagaaagttggagagcaacccaagggtgagacttgactgttcaagtaaccgttgggttccaaacttgccagctgtagcttctttgcgctcgttggatgctctctcaagtggagggagtactcgttcggtcgacatcacgcctagcggctgagtcttccaacgggaaccagcgggtgagctcaaaggatcgtccgtcgcgcggagcgcccacagtccgacatgttctaatcgggcttggtgcagcgctcgaagtcgttgagggacgtagtgggcttgagggaaaggaagagaattggcgagatggttgaacaaaagatcgtaatctttgtccgagctgtatagagtgaatgcctggaggagccaaaagaggaggacaggttagggtaacagatctagaatttgttgtatccgcactaggaagagacatggcatgacacaagtagaaagagaaaggaaactaagacaaaccgtcaagtcggccagttcactttggattaccgatttccaggcgactagctctgctttttgtgtcttgctcaaatctttgtctatgtcttcacctttgcccagagaggccgatgtactcttttgatcgtaatctccatcccgaggggctggttggggtgtcggcgtggttgaggaaggagacaaggtggaaaggtaggatatgatggatggaagggaagagatcttccgggagccatgttctaggtatggaagctgccctatttgaaagagtaagtgaaggggatcagcgttgtagatcgggccgaatcaaatgtcgagagtccagtgagttcttaccgttcggagaggcgtccggatcgttactctcgctcaacgtccatctaccaagcagagctagttttcatcagaaatacatggttagtatcaatagcgctggttttggttgacgttcaaaacatctgacaaggtaattgagctcacttcgctgcagcagggatgcgacgaacacagtatctgggtcgatcgcaggtagaccccaagcatccggtccggaccaggagtgaactggaggtgtcgagataacaatattacaatatttaataccagactacagcgcaaccttcagcctatgtacgtacgaattaatgggtgggaggtggccattgaaacgagttctctttgcctttttgctctatgctgatgaacaagagaggagagagacgaggaaagtgaatgtgcagggagaggatactctgggtgtaacctggtgatggttacactgcaggtgtcagcccgcccgacacacacatatgcacaaacacgcacacacacactatactaaagacactctaaatctcctagtacatcttgatatcagatgagctatcagatccaagtatgcactcttcccataccatccatctggtatgctctaagagggagatcatgcgcaacagtgctgagtgagttgacttggagatactactcatagaggttacacgcgtctcgacgcgtcagactttcctcgacgcgtctctcttacgcgcccacaaggacaagcgaacatccattcttttctttctctccttctctcatatctctgcaacacacagctctctgttcactgtggataagcatacatccagtctggatacgtcatccatcgattcatatcgtcctgtccttcaagatgtcggtcccagaacctcaggtgtatctcgcggaagggttcgatccagctagcctcaaggtcgctcaactacggtaagacacaaaacaacaaagacagctcatcatatagattctgccgtttctgatctctaaaccgttctatacgctcttttgcgtttcaacaatccttcatccattcacacagatcaatcctgttgcagcacgatcggtcattcccttcttcggtccggaagcaagatctggtcaatgccttccagacatacatactctcacagcggaagagccttctgcacgaggcccagcagcccgtgaagggttcccgtcgggggattatcgatatggagactccatccatcgcctctaccgactctcaacctacagtaagtataaatttccttagatcttggttctatatctcgagaccccatcggattctgatcatatatccttgttttgatagctcggacctgaagccgagccgtccagcccagatctgaaggaagaaacagtcgtgagtatctcttcctctctcctttcacgtgattcatctttgaggtggtgagtgttggttgagactcgaatggcttttgggttttgaatgaattaagaaaaaacgaggacgacctcgaaagtcggtcgccccaactgctccagtatccgacgaagtcgacattgatgacgagcccagaaaagcaacggttagtggtgatttggagccccttccagagagtgctatcaagatcagttatcatccaggctcaacgctaacttgttttggccgtttgttctatctatccgtctgctttctcagcctgcatcaaaaaaccgacgagcttcccggcgatcatctattcttcctgcttcctcaactgttgaagagatcacctcttctcgatcagcttccagaatttctgaccatgtggctgaagatagcgagccagaagatgtcctgcccgctcccaaaccatccgttgcgttcgcgccttatgcggatgaattggaggagagcggattctcagactacaatgctttccagagtggaaattcctcaccagaaggaaaacctagagaaaagaaggtcaggcgcaaggttggtcctttcccactgttcttatccattggttgtctacagggatcaaatactcttaggttgtacgcacgtctagctagctcacatttatatacctccttgttcatcttacgtaatagtcctccctgggtgtatcctctgtcactgcgcctgcgagaagacgaaaatcggaaatgcctcctagctcacggtcgcttgtagaacctacttcgtttgaagaccatcacgtcaaacctgttgctgacgaaatcactctggctgaggtagcccctaaagccacgacgcgaactcgggcgaaagctcgtcagtctcttcctgccaacttggtcgcctctagtttcatgcccactatggataccctccagcgaccggtaaaagaatggagagattcaaacgcacctgttgctactccgagaaagtccagatcaaaggacaagaaggaagaagaagaagaagacacgtacatcatcgaacggaaggaagaagagatcaagacagaggaggaacgtcaaatggagaactcgaacgcaggttttgttgcccagaatcaattgatcgcccggaagttgtcttctataatccccgcctcaccgacgagcccttcttcgtcgacagaactatccgactacaaagctcttgtcaaaaaggaagatagtcctgattcggaattgtcccatcagtcccttgtcaaacgctctccgtcctcctcccttgttggagctcgaccggtgaccacaatgtcctctctcgctgttcttctcacgatggtcgtctacctttttcaatggacatccgagtcctcattaatcggctactgcgatacctcatcgaccaccaaccgcgtgctccaaactcggcatcaagcgatcgccgctgccagggactgtgtccgacgaactatcaccgacggcgacgactttggatctccagaaggctgtaacgcttccgccctaccccttctccctttcgtcccccggccgacggagtgtactccttgcccggcccacgccgtctgtgccgagggcacgattgttgagtgtgataaagagtatctgttgaagtcgtccgggctcgaatcatttggctctgtcttcaacggacttccaggtctaggtagcgtagcatttcccgcgaggtgtgtgccagatactctcaagagacggcacgttggatttttggccagggcgctcgaggcagagttggccaaggagaagggagtgttcttgtgcgagaccggcagggctggcgagggcgaagttctgttgtatgggcacccagagaatgtgttgagggatagattcctgaacagacgagacgtgcgtcgctctgtgttttctcgagaacaactctcttacctgaagaaaatccaagttgtactgatccttttgtcccctccatcactatgtatctacagccctcttttaccccggagcagttcttcgagatcttcgatgctgcgttgagtgatctgttggcgcataatgatgctgtcgcggagactgataccgagtttgtccctcttgtttccttccttgtttgtttgttttttccttatttatttgttgatctaactttcattgtgcttgctcaatctaaagaggaaaccgtcggattggagctgttcgatctgagatgaccttatcgtgtcgggcaaagctaagcgccaaggacaagcttgacgcgtggaagagtcagctcggaggtgagatcttgccgtttcttctttgtcttcctcctgagtttcagcagagaatattttggactgagattcggttgagaatgctatgtaaaggtgcggccgccatgttggccgctatcgcctatgcccggtctcagctaaaaacgtcctctcaagagaaccagcgggtaaaggagctggttcaggttgtgttagccaaactccgagagcaggtccgtcgttcactcttttctggatttactgtcttttcggcctatctctgacgttcattcctcgacgtaaaatacgcacaggagagaatgcattacgtcgatcccgctcaagctccccaagtgacgatccctgttgcccatctgagagatggcatccttgcttccgaaccttccgcggctggtcgacaaagattatgggcgaaggtcgagaaggtcgttgagggcaacgcaaacgtccgggcgggagaggacgaggtcaatggcgaggtttggagggtatggcaatgggtcggattggttagcgccttgccttctaactagcgttcttgtatccttgctctttcttatttcagcacaaaacggggctgatgcgcagggttccgggtcatcgagattgatttgatggttgggatctcatatttcatatgcatacttcgttctataccttttttttcttcttcttttattgttactattgtttcctatttttcgaattcttcttgcccttctcctctttgccaaacgccttcttcttttgtctctctatacgcccttgttcgattattctctcttgttatcttacaccttaatcgcctggcaaccagtggtgtatctgtgtacgatctttcctcgatggctacgcaggccgttatgatggctacaaatgactacgaatgctagatagctcaccagttaccttccttggctgccgatcgagcctcgaattcttcaaatacctttgagtgacttgcccatccttaatcgaaacctaaatcaaatcaacaagttacttaagcactccgatggctagttggacatagaaaagaactgagatggctaactgagcgtggtaagatgcttcataggggagtatttcggccgaaagacgactgtcgaaacagaagacgagaggagcgccttgtaggagaagagtggtgaatggcagagcaagcatgtttctgcatacagctccggctcctctttctcctgtctcttcctcatcctcacccccccctcttcctctcccagatcacctctcactcccgccaagttccttcgaccgacaccaccatgaccagtaccatgatcgcccccgccgtgctttcgctcttcgctcttcgccgagcctctaaccctaaccgtagacacgtctaaccctaaccggccaacccttttgtctcgtttagcttaccttgcaatcatctttgtcctttgcatgcactctcactctcttcctctgcttgctctctgatagatctagatctgcaaaccaacgaacatacaaatacatactcgatggcttcggatagaatcgatcatgtgccggatccgccggtcgctgaagacaggccaaggctcgatcgtgacgccgttgctgtacataccgaggatagtattgataagacgaacgggatgcgtgaactgtgtacggaacaagcaagagggttacggagatcgtgtgccggagatgtggatcgtcaaacaggcagtctatctgaagacagccataagagtcgtgctagctctcaaccaggtgtgttccaattcggatccgttcgagctatatcattctatgtatgtttctgaacgctaaacgtttcatctcttgggtatggaactggcggtctttttcagacgcagcttcagatccggaaccactggttctgcctatgatacccaacttctcgagactccgattgtcgtccaatctatccatcaggagcgattctagcgttaatgaatacggagaaagcgttcggagcttggattcagagattgcgtcggagagcgaactgttgtcagagggtcaaacgatatcaccttactcatcaactacaatttcctatccaagtcggatagaaagtccctttgaaccagtcgacatcgaatcttcgacgacccagaaccgacccgctcctttgacgcttgacctttcctcgctgtctacctcacccaaccgacagcttcacccttctccttcagcacccaatcttcggaatgcttcgactgcgtctctacatccgtctcaaggatgggcagcgccccctccggtgttccattatcctccaggtcgcgccaaacggaatgcaaaaggacttagtgtatctatcgggttgaacatgtccctagccggctcatcaaactcaaatggacttcctccagctacgccaataatggcttccactggatcatctctacctaaacgaaccagaccagctttgttgacttccatcccggctacaccatcctcagtttcacacacccagtctcagtttgaaatgcagcagacacgcttgacaggatctagtaggaagacgcctagcgtgatgggtctcttaccttcctcagaacgcgatccaacagatatgttaggaggaggtatcgattcgggaaagcaaccttatcaagatggcccgatcgagatcatcccaggactattcatcggttgtgaggagaacgttcgagattggaggagtctgactgaacggtggaaagtaggcagagtcgtgaacgttgctaaagagttgaaagacgtcttggatgaggtttcggatgaaggcgctcaaaagacggatgaacatgtgggtgggccggcaaactcatcggatcgacaatcaatcttgccggagcggcctcttcggaggaacacggtttcaacacctaatctgaaagacccaatatcctttagatcggtcacctctcccacgtcaacaaccatttcacagacagccgatggactcacaatcaccgaaaaaacatacgtcctcccgaacaagaagacattggattacctccatcttccgtggagtcacggtcaggccgatcttgtatcaggagcaggattaggtagaggacgaggaggagctggcttgatcagaagtggggactggatagccgaaggcctggcaggaggcgtcggagtactggttcagtgagttcttcctctcctctcttgtttttgataaagtaagtggggaggctgaagagtcgtctgacgcgtgaacaacatctccatgctcattatcagttgtcaatgtggagtatcgaggtcggcgacattggtgattgcagtcattatgcaaatggctgcaaaaggagagatgccacatcttctgggagacatcaggggaatgcacgatgcgtacgagtttgtcaaggagaaaagtccttggataggacccaacgtttcgttcgttctcttgaccttggctctttcgggttctataatctatgtttttatagagatacactcatagactaatcattctaaatacacagactgatctaccagctcttggaatgggaacgatatctggccgcggctacttcccatcttccgcatcgtatgtcttctacattcaatacggagcggggatttgcagatgagtctgtagaatccgaagaggactggtctcgccgtcgggcagcgctcgaggctcaggaggaagctgagcagatggatcgccaaatggaagaacgacaacggattcgagagtcaccgtcaaagcctcgtcctcattcatcatccgggacggatactcagacacaatccgttttagttcaatcgagttctgtttcttctccaaacaacccggatattctcctgacagagcctgtgaaggtcagaaaaagagtcagtcggagtagtatggctagcgtggttatgactgaggaggatgagggtcaggatggactggcgatgggatatgagttgggcgcaaacaacacaccggccttatcgtcgatatcaccatcctcttcttcagatacagacccttctcaattcgagcctcaactttcgccaacatcgccatccccctcctctcttcagcacgctataatcaatgggcctcagtctagtttttctgctagacgaggacttcgaaaaaaatctttcacgttgccgttcttaccatcccttgatactctcccttcatctccagggctgtcaactacattcgagacaacatactcagaactatcggcttcgaccctgagagtaaacaatgagccaatggggctctcatcccaagtgcttccaacacctcttccgtctaatccggatgtttcgatcgtctcaacttcgagccaagtagtcggatcgcattccatagcgccgaaggcgttaaagtcttcttcatcgccgtcatcaacgccagccttggatctatcctctggaaatctacaatcatctgatactccctcttcttcgtcaaaccaactttctaatccggagaccctggctgaatctgatttcaattccaatatcggcaggccttgtcccgttctcttacctattgactcaattgatccactttcttcagcacctttggcctcctcatgttcggatccggaggttgaacctttctctacatttgtcttctctaaaccaaccactacatcaatatcagcaccgtgcatgttatcgtctctttccggaccggatctcacatcgtcatctcccaagactcggtttggagattatcagtcgcctaggcagcgccgggacgctcaccgacgagcgttctcagtcgacatgccgatcatcctcagtccgcttttcacgaacacaacctctacagggacgtcaacgaattccaaacgattgatgaccgaggggtctttttcgattgggaagaccagagaagaaggaaacgaaggaccggacacagtgatatccaccaagatcccccctccttcggaagatagtactcgaatacccatacacaagatctacgctctcagtcagctttcttcaacgtaaaccatgcacaagatatcgtgattttttgaagttcgatacttttgttactcaatcttgagcccgatcaatcgcttttcgctctcaaggacctttactttatcttcctttcattcacttcacatattcggcttccttttttttgtttggtcaaatactatccgtgttcttgtccttccatttgtatcaacaattcttcagcactacttccatcacacatattacataggcctctgtcttcttaggacttttcttttctatctcccccccttataccaggctcgtttacgatctttcaagcttttcattcctattctcccttgtttctgtttatatgaatatatattgaaaaccgcgaacgttcagacattcttcaagccctccccttatcatgtctcgtgttttcaggccagggtcacatggatatgtcagaactacagacgaggcctaatccatctctcgagaaggataggaattcaaaagttcccaaactctgactattctccttcgttcctccactccagttttgtgtgttgttagtatgggtattggtaggcaggaaattagaagaaaccgaactaatacggaagaaggccgagatggaatgtattaagaagaaaagtagaataggcccttttctcgtgccagggccgaaggaataaaccgataatgagaagataagaggatgtaacaagagtagaaacagagtagacaaaactgatgtaatcgaaagagcagattatatgcaaaaaaggaacagagaaccagatgacagagtcgagcaaaagataggttacgaggtagaaagacacaaggaacccaatcatacacaggcgggaccacacaaaaaaaaacgggtgatgacggagatgaaggaagagaagagacgaaagggactaacctgttttgagtcgatgatcacacaatcacaccttcaacacatctcctgtttataacaagagattttccaagcagcggcgagacacacaaagaccaacagaaaacaaaaagggccggggagaacaaaagagcgggattcttgaagtagtagttgagattgattgattgatagagacggatcaacagcaatcgaaataatggcggagaagagatttatccagggttgctgaaagctatgcatacacgagttaaatgctgaatcggtggaagggatcaaacattcagattggctcagaacaagatgactcgaagtgatcaatccgatcgtaaacgtttaagatctttgagaagaagaacaaatgaattcaaggcaaaaccattagtcaattgctgaagtgaagacgaggagaggcaaagcgagagacgaacctcttgaggtatcctcagattcctccttagcaccctcgtcaaattcttctttgtcgccgacctcatcaaaccttcttttccccacctcttcatcttctccctcctctgctaactcatcttcaaattcatcatacccacctggctcagactctatgatcaacaactcgctttctgcgtctgagccctctcgttctaatgcgtctgacagctcatgatcgatgccgtctagatcagtcaccggagtcgtatcggccacgggtgagagcagaggtgaatcggcataaagatcatttagcgctgtgtcggttgtgagtgaatttcgagattctaacacaggtgcggtgggaggctgtaagcgtgttgtagcttcggcaatggcggctccttcaacaaagtcatcagtctcaggctcaactagaaaagaaaaggagagataaataatcagataaacgcttgaaccgagacgaaggttgcgatcaggaaaaagatgataataaagaaattaccaatgatttcaggcacgttcgacaaactttccttctctgcttcctgctcttgaagctcggagtcctcttcttcttcgacctccggcgcatgagcaaacacctcagggataggaatctgttcgactgcatctaccgaacctgtcgccaacgctgcctccatctcaactttcctcgccaaatctttctcagcctccgtctcgtccggtaactctgattcttggtcatgttcctctgcaagagctgtttcatactgcacaacgtcttcagtacctgtctggtcaacggctgcggcttcgtcaacatctccatcagaggtctcgacaacctcggctgaaagaggaacctcgatatccgcattcgcagtaatgataagcttggtgtcctcaacgatcccggattcatctcctgtgccgactccaaccgtagcagtcactattaaacaacgaatgacacaaaggcgaaagaaacaagttcaaagatggtgagtaatttgattacaagaaatatttaaagcagacgtacactcgtcttcctcttctgcgtcattcagcaatgtaggggtggcgaatcgatcattctcagttttgggtgatgagtcgttatggtcatcgaggcgatctgtgttgaacgagacgataataagcttttgtgtgaatctgattctataaggccagaaaactcgagacagagaatgaagacactcaccttcatcatcttgatcgtcttcgtcttcgcctgcacctacgatttcaactttgatcacctcatcttgatcactcgcaagttcgtcttctgaagaagtaagaaacgacagtcagatagttatcttttgttgttgtactcttctgttcgaggatcagtagaacacgtattgcttaccttcaatttcaggatcgggttggagattcacgtctgtctcatctgcgtcaccctcgatttcatcgtgatcaccagataggacaataacgttatcctcatcttcctcaccgtcatcatcttcatgatcttcactattgatctcctcttcgtcctgtgtatacagtatgcggaaaagatatgagtaaccactaccgatcaagatgtggaaaacgtactttagaagaagagtaagctactgaccatctcctgtctgatagcttggatcttctgaaaacgaagcatgaacctaggctgacccgctcgaaggaccagtcgtaacggagggggaagatcacagcactcgtagtgaagcctcgcgagatccgataaggatgtctgagaagcccagacattgtcctaatagagggaggatccgagtatagttcagcacgcgttgatactcatcaagaatagtaaaaagaaaccgatagaaaggagataaagctgacctctccaataacgattcctactttctcgtcctcatgagcaagtaaccactcattgttccctcctccatcatctatactcagcaatctcccatcagtggagaatgcagcctcttctctcaaagcgtcgaataattccagtaaaggagcctcgaacagactcgaattggatgaaagcaggactggtagagcaggcgtgtctagagcctcaattccatcctgatggtcagaagatgaagacgggataggattgaagagggagtagcttttcataaggataggagctgacgagggtgtgctagagcgaggttggtaactaataattgttgggaaaaaggtgctttcagatccgtcctcttcgtcgtcttcttcatcattggggtcatgatcctctatgtcagatgaggcgatctcgtgttcggagtgaaatacgatctgcggagagccataatcctcggggttttcttcgcgatgcaaatcaatagcctcggtcgcttgttcttgttcgtgttcgttgtgggtggtatcttcggttgatttctcaacatcgtctgttgactctgatacgaggaagaggtatggtatgagtaatgttggtaacgtgggtattttactaggacagcgaaccaacctggtttgtgttcagccagcggcagtgaggaagcgtcttgttctgacgatgggagatgaccattgtctgtgggtgtacaagtataagatagtaaaatagccatcaggacagtgacttcaaaagagaacggatgatatggatgggtttcagcatacctaacacagctattttagtaccagacccgtcaggcgaatgcacctcgatggggtctataccatcacccgttggtagagtctcgataggaagagtcaaagcagccggttcatcaccaaccggtgaagattgaggtgctaggcccaatgattgcacaggagtcgtgtcttcgatgacgcttccggtgatggctagggagtctggtttaggcgatgaagccctcgatataaaatcaatctctggtactgtctctacaggttgctcctcttttaggaatcccagcccatcagccacagtctcgctgacttctgtcctatctgccatgggatcgctaaggagatcgtcaagaaactcgtcggcctcttcggtccctatcatatcgatttcttcgacatgttcaccttgatcagagtccaatgggatcatcgtttcctcaggcacatctacagtctcgacagacatgtctacgtctgcctgtggggatgtggagatatccatatgtgtgtagggagcgggcgagatggatagggtgtatgtatgctggataggacgaaagagcttgaagagaaaaagagggaacagtttagaaccgccatctgcatgttcgcttagtcagcagccagtcggctcctcccttatgccgcttgctagctagctcgctgtgttcctccactcgtccactcgttcattccttctatcgaacatcgcctgtgagagagaccatcaaaacgaaacaataggcatggcatctagaacagcatcaaaggcgtttgattatatccagagaggtttctctgtggcactggttgtgctctccgtacgtcttgattcacaccagcttttttgattgtgactttcttggtcgaatgggtctcctctatatccaccaagaggtcagccatgcatcgactgcatctcagttgaactgaattctgtatattatatctggtgcatctaaaacctgaatgtcggatgtgtatagatctctggagccaccgctggatatatgattcacagcgagcggatgtcgattgctggcgaggttcgtttaggtcgttcctttccgtttcttcaattgttgcttggagactgatgctcgagtctcgttgcctcataacgtcggtgcaatcgtctccttcttccttccgtcgatacagtatgaaaaacgcttagcagagtacaacgtcgccctcgctaacgagaaagcggcggacagtgtggccagtgcgcttccgacaacgaacgcgccgacaccgattactccttccccctcttcgtagacatacaattttctctttcactctattaatgacgttcatatcgattgtctgcctgttcatactaagcgcggtgatggtatggtggtctatggagctgaccaggaagtcatgctggagcgattcatcagagaggacaacttgcacagcttttcaaatctctcagttcttccgcacttctgttctctctctcagcattcatcagctagctttaatactgtcctacatcgaacatttctcacaatgagttcccaagctgggtctaattcactgtcagccgaggagcaaaccgcccaagatgctattgccagagcaaaacaggaggaagaacaggctcaactgccttacaaatggacacaagatctcgacacaatcaccatgacgttagatctcccacaaggtactcgggcaagggatttgaatgtcgttctgaaacgagcagagatctcggtgagataacctttgagatgatattcttgtttcggttggaataaatcagagacagctgatattcgttcgtttgcttgccccattcgtcttgatttatacgactcaggctggactgaaggggaaagagtcaacatttgctgtaagccgatcaagcaatcatcagaatcgacctcgatcaaggtgttatactgagtccacatctatcttaatcccagggtaaactctttgcgcccatcaaagaggagggttctacctggacgatctgtatgtctctcgttatggagtctcctccggtttgaccaatcgttctatcgcttatgactgatcaatagactgaaaatcacatcgtcagccgactctgttttgaacgtccatctgacgaaatctcaaacgcaacaatggtggccgcatgtgctcgttcatcatccgaaaatcgacactacaaagctgacgccagaaaactcgaagcttgaggatctcgatggtgagactttggatctcgtttatgtcttttgaatcttacgaatctcttgatcttctcttgggagaagaggaggactacaaattcaaacaagtgccgtcctgattcctcttaaaatgatacgattaattatcaggtgaaacaagaggaatggttgagaagatgatggttcgtctttcatttgtttggttccatctatatgcacaagttctggttctgattgtctaacgatactatggtacattttgtcggagaacagtttgataaccaacaacgcgtaaagctctctctcatctgttctctctctgatcgttactgccttcttatcatcaatttatttctgctatctctatagcaaatgggtaaacctaccagcgacgaaaggaagaaactagaggtaggcctctgctgtttatctcccactccgacgatcatcgtcacacacagccagacgaatccgagattgatgttgtatttccccttattttcgtctcaacaaaccaacgaacgacttgaaaggcactagagaactttaagaaggcgcaccccgagatggacttttctaatgtcaagatgacctgatcgttctttttttcctgacaatctcttcctataagatcatgatgacccttctgcgttcgattgtccagacacggcgttcatcttattcgtgttgaccaagagatctattccatttggttcgagatgctctacaaactgaagttgagaaaagagatgaaaggacgttcttattctcctgttaccaagctcatgagacctacgccccctagcagagctgcgaagttcgcgatccaaaccgagtgatgtcaacgggatgagaaagagagagggagaagtaagcacgatgtcaatcttcgtgttatattcgagactttgtaaatcaacggaccaaatttgagctgaggataatcgttctgtgacaaaaatatcggagaaatagcagaatatctcatcagaatctgtctggccgtgcaaaataattatagaaaggacagtaactcacaactatatgccaaaggaataatgcatcgtcaaaaagttaaaaattaatccatgaaccacctaaagcatctgagataaagttttgttgttttctcacgtactagccgaaaagaaaaagatctaactgttagtgaggggttcaatttgaggtagaaaggatacgactatctcacaaattgttccataacctggaccgatcatgatggtagcccgacgtaacaacaaagacccatcagacatttctatagtggctatgcagaggaaaactaagcttgcactcaccgacgtaaggcaagaatctgaatgaccaaaggatacaatgcgcgattcagtgtcgaatcttccaaacgatgaagatgacacgaagaggaactcgagactgaccccgagacttttcccaggatgttgctcttcttcagccacagagaacccctatagaggacaatatcatctccggggttgctatcacctttggtcagtagtagttggtcgttgggtctaggaagaacgaagaaggcaagaggtacgctgagctcttatcgcgagtgagcgactgagaaaagtcaaggaaacaacaaacatgtcatggacttcgatcactcggtggacaatagggattgattctccagggatgttatacacggtgatctatgtggaaagacagagtaaaaggaatcagctcaataagatccctcctctgtgaagaataactctgaatatggacgcacatctccgatctcgtacttggctggtttggtcaaaaagaggacgtccccacgatagaatgccggctccatagacccgctgtcgatagaaaatgatcagtattggactgaaataaatgtgcttgtatcccaaaacgccttgtgaaaaactcacgagagcacgacgacgacgggtgattccgagtctgtcaacagcgacaaccccttgtacatcatgaggcctatttggaaacacatatgagtatgtatcaaggtcagatcaattctccaatacaagcgaatggatgtagagtatcgagcagtaacccaccggtagcggcaacggaggcgagattgagggcttgggtcaagcactatgtccagataggaatgaacgatgagctgtccaacatttgaagggcaagagcggaatgtgatgaggctactcactcctctaactccaagctttcgcatctttttaagttctgatccaaacatcgtcctactgtgtgtgattgtctatgtgtatgcgttgagaatcccgggagacagacgttgagcaagatgccagacagtgttgagttccaacagatgatgtgttggctgaaatggctggggcgtttgaccataaaaggaaaaagactacaaaacttctgtaatcatgattagagaaatcctgtaatctttttttttctaccagtctacttcttttctcttcctcacaccttctaacgttcggacgctctcacacgcatcattcactcactcgctcttacctggctcatcaggtcctagccatacagatcgaatcatgtcttaccatggaggatacgttccaccgtgggaacttcctagcaatcactataaccagacatctcctccgaatctacagccgccaccacttgtcaacgccgatctccggtgggacgacttcaacgtgagtccggcttgttcattcgatggagcacaagacaaagacgtcgataagcagcccttttacgcgttcttatcctgttattttcgttccatctatttgatctgaatatgatatcatacctttaggccactttatcgatgataaatactatcacggtcgccaacaagatgtcactcatcaagcagcttaactcttcgatgaatctcaacctgaaagcgacccaggcattgaaagcagaactcgtttccaggtaagcctatatattcttagtctcgagcatgatggcctctcgaccatgtgtgcggtggttagcaagaaaaatgcacgcgttcctattcagtcgggataaaccctgactggcaggcctggcacgagcttgtgtggaaacaagacgtgtcttttagtgctttctttgttggaaccaagagattgaatctgccttggccttcttctccgcactactttcttttgtccacaggctacacacatatcttcgaggtatcagagaacgaaatgatatcgcgtcctacattcgattcaaagagatagccagggcttatattccaactcgtaagttccaatatggctttgtctgtcaacctgtatctgtgactgatcttcgggacgtcaataggttggaatactacttctcagtacaagcccattcagcaatatccggtctccgctcaagacgcccatcatcctcaagcaatttctggcgcatccgggatgcctcattccaatagctggacagctagtcgcgctactccctctacgccagctcctcctcctaggagtcagtgatcctctcttcttttgttttcattgtagaccgagtcgtctacggcacctcgactgaacagacttccatcttgagtaaatctacagagccatacaaatggaagaactctcctcttttcactgtgtcaacacctctcacagatatgattctggtcaaaggcgagttggatggcatatatagagtagatcacgtcttgcaaacatgtgtctaatttatctcaatctactcttatcagagtctcaaagttcaaccgaccgggtagctgcaactgccaacttcataattcctgatgatataaggtcgaagatagaatcctccaagttggtcaactttcttggtagatactccaacctttgatttgcgctctgaccatagatcactctcttttaaaactttctcatgaaacagtgccaaccccaatagctcgcccagatactcggtccgactattttgtacttcaagcactcattattcgccatcctatggacaaacagcagccgcttcacaaggccttcctgtagaatttccgttgacctgtgaagtccgggtgaattatgaactcatcggtgccagtctcaaaggtcttaagaagaaacctggttcctgcccaccagcagatctgatgaaaggaaagacggccgtgcatcccttgttgagaatgggatcctcaaatcgactagaactcatacatatcaatccaaatggacctgcatccaaggtgcgctcatcggccattgaattctgtgttgaaaccaatccttgatagtgcatatatctgattttccatgagatgcgttcttcttatcagccgcgatactacatgcaagcttgcctagtcgagaccatcacgtcagacacgcttctccatactgttcaaaagggtcctcgacgacctgttgaaaaagttgaagactttagtaagtccatcagatcttgtggctgctcttcgagttcctcgactgacgatgccctggctttgcctaaagtacgacatatgagcgacgacgcagagattcagatgggagcttcagggttgagtttaaagtgtccggtatgtgacccagttgatatcatttgaatgcgtagctttcttctgacacgccctcccgtcttcaatattttctcaagctttcgtacgtgcgtatgacgacgccaatacgttcagaaacatgtgaccatatccagtgcttcgaggcctcaagctggctacagataaacgagcagactccgctatggagttgcccggtgtgcgagaaaggcttgacgctggactccatgttcatcgatgagtgagtagtgatgtctttcaattctaatgtcgtacaaactgttcatatcgaattgcatgctaatgatgggacatcaaactttctttttaaaatagttataccgattcaatcctcaaggcctgtgattcagatgtggatgaagtgatcattgaacctgatgcagcatggcacacagctgaccggaaacacggaacaccttcgtggttggaggccaaccctgtcaaagcactctcggatgcacctccttctcaccaatcgacgcctatgccttcagaggacaaagcgaaagaggctgagatataccttctaagcagcgatgacgaggacgctgatcatagtactactcattcaaacgacagatcggctactgcacccccttcagcggcacctccagtagctccgaccaaccctggatactcggcgcctacccatccagccacgagtaacacagatccgatagacttaacgttggattcggacgacgaagacgacgaacagcctacacaatcatacacacctcccttgcccgtatctgcaccgttgccgctcttacaacgattgagctcaccattgccatcgttacatccgatagtcaaaactcaggacagcaccgagttgtcatctttagggccgtctttaaagcggaatgctcctgattccgaagaaccgtcgcagccgcctgataaacggacaagagtggatgagaatgggacatcggaaggtacgctctcttgctcatgctttttctttctcaaccgatgtctataaaatttaactctgaactcaaaaagtgcccacgcacttttagatctacagattcgtggtcctgacccaatcgttgaacgtccatcatcggctcgtcgacgtccctcggagcaagcttcatctggcccttctccttttcatagtgttgtttctccggtccccgccccgccggcgtctaccactgcttctgtaccaccagcctatttatcacagccaattcctccttctcaccctcagccgcccgtctccaatcttcctcctgtattccgtcctctacaccctgccccttcatcatcatcatcatcatcatcatctgatcgaccgcgtcaaccacgtccggtccttcctcttatcacatccggtcgaccatccatccaatcacggtatcatccttctcgaccaactcacccctcatcagcccatccctcttggtctgcgaccaagcctacatcttcatcaagttttccgacaacctcgtcgacggatgctagactgccctactgtccacggtcaaattcacatgctgtgccagatgagcgccctcatcatccaattcccagacgaccacatccatattcgttaccgtcggacgagccaggaaaaccaggtgaaagcggaagtggaaacgctcccactcgttcacagccagggatcagcaccttaacagcggattcaaacaagtctcctcctggaccgaatttagattcaggtctaggtggaaatagtcatccatcttattcccacagtcgacttactacgactgccagaccatggttctacccggaaccgactgcaaatgtgattggcgctggctcaggaggaggaggaaatcattactctctaccccagcgtcctcctccgcatgtatctccgtattcatcaccgccgatgaacagaagcgggaatgagaatgggagctcgcatataaatggaaacagaaatgggtataacgataggaacggtgggcatggttggcctggtacatctcatgatatactccgaggcgaaaccgatcgacgatgatacaattctttctcaacatttcttctttcttgtggacgtatccctgctcttcgccttctcttttgctagtattaaccttcatcctcttttctttcttggttcatttatccgggttttctctctatcatcttcgtcttttccacttttttctcctaattttttttccatattttaatcttttctctttcttcccttccaaaatttcatcaacccttttcaacacacaacactgcgtctttctatttgattcaatgtatgcttgattgtgtttgctccaaaaacttcccgtttcttcggatcagagggaaagatcaaaagcgcttctctctttcattatgtattgagtttaaatgtccgacgtataccgacgtcaaggtcgagcttatcgggagactttcactctttcagtaagaattagccgattacacgagcactgtgagcatgtgtccttttgtctatggatgtttgacgaacaatgcaacgggtaaggttaaccgatgaaccataagttgtagcagaataagactccataacatccacaacgaaacacaagctaaacgatcggggaccaaagaccgaaacaagagaaacggttgaaaaggaggagatgaagaatggggaacagggggaaataaaagggaaagatatcaagattgaacataaactcagatcaaagaacgtatttatgctcctccggagtagacctttccgaacatgagctcctgcatcttgtcgtaaagggacaagactccggctccggcaactcctcgaagaatgttggctccagctcccttgaagagagacttgacaccctcagcggcgactgcagacgaggtaaaaaaaaaagaagattagtcataagatcttgaaaaagcgatcactacgctttgacttactgatctgggatccggcatcaatcatagacttgtagtgggtagtagatccagaggtcatcatcattcgtcgtcggatagtatcaagggggtaagaagcgagaccagctccggtggtgactccccaaccgagaaggaaggaggccaagaagttaccctcgaggggaccgacaaggacaacaggcttaagggagtcgtatcctccgaagtagagacctcggtagacaacgattccgacgacggagggaacgaatcctcggtaaagaccggcgataccatcagaggcaagggtcttcttgtagacatcaataagaccgttgaactgtcgggatccacccttaccggcagacttgttatcgttggcaagtcgggttcgggcgtagtcaagggagtagacgaaaaggagggaagaggctccggcggctccaccagaggccaagtctgaagaagagatggcataatcaggtcagcgaggttgcttacaccgcaggaagatctattcgccatcaactcacttccggcgaaccacttccagtaaccctcagactgcttgaatccgaacaaggacttgaagtagtccttgaaggcaaagttgagggcctgggtggggaagtatcggatgacattggcggtgtttcctcgccagaaagcggcaagaccctcatcggcgtaagttcgcctgaagcaatctccaagaccgttgtacttggaggcaagtcgaccctgcttgatcctgttgagttgagtgataaaaaaatatggttcaggaattttgatttaagatggaaaaaggaataggatggattaaatagagggaaaaaacttacatctcatcctggttctggatgaggagcttgattcgctcaatgggggcagcagcggtcttggagacggcctgttggtttgaaaaaaaaagagaacaaaagataagtactttgataaaaagagagatgaggaaaaaagacacttacggcagacactcctcccatgaggaaatcagtggcgaactcctggggcgtcttagctttcttggtggccatcttgaaaaaataaaaaaaggctgatggagtaggcacaatgagagggaaaaaaggacaaagaaaaaatcgagatgggagccaagaaaaaagcacgataaggtcatagttagtccaacatgtcgcttcccagataatattcctccggctcgaccaacaacgagataatcatgatgggaacaccagacggtcaaccaccactacaatcacgacgaaagatctgtactgacaaaagaggatgtgtggtcgaagggaaagagaaaaaaagagaaaaagagaaaaagaaggcgaggcgaaaaaagacccgctagcccaggcaccccagatgaatcgattagggccggtcgagcccggggaatcatttcaaatcgaacgcgacctatacacggaaccccgctacccggttactcccgaaaatacatctgcttaagtaagtcaagtcgttgtgtgcctatgtgcctatgtgcctgttgtatacttgggttcctgggtttctaggtccttgagttcctgagtccttggtcgcgttcgctgacgacaccatcagccttcgcccacactcgtgctcatcagcatgtgtgtcttta

SEQ ID NO: 1983 - DNA, 1968 bp, Xanthophyllomyces dendrorhous
atcagcatgtgtgtctttacgcgtactatcagatacatgttcatacgaccgatcgcatacaaagaactgaaccatagtgatatgcgctggtaaatgtcaaacacgaagagatctctacttttgttttctctagtcttgttctaatacaaaatacaaagtatagaatatacaccatctgaactctaaaatggctggatctatgaaatattcaccagaacgctcgtcaaccttcttcgtcaaagctcaagagtcctttcttctccttgatcttcttttccttcttctttttcttgctcccctcagtgctttcatctgcatgagatttatcttcggcatcctgaccgaccgccatcgccttccgcttatttgtttttggcaccggggggtttgtagatgatgtttttgagccattaggggtttcagatgctgcgttcgatgcgcctaacccagattgtttactagagatggatgccgttttatggattggtggcaaacccttggctgatgagcgcaaaaatcaagcacagaccgaatgtaaggtaatggtcagaatgtgcagcaaactggtttgctctgaagctaaagaagaaagaaacaaacgcaggctcatcaaagcaaagcgcttataaacatagaagttattgggagagagtgtatttgagcgaacctatccgtctatcatcttcaatctcctctctcgacagatgtttaccttccttaaggacgactatttgaggtgcatcatcccctccctcaccccagcccagctcgtcaccctccaactctctctgccgttcctcttcttctctttcctcacttgtctgtctggctccccgttcgggaagagcagctcgctgatttccttcccccagctctagagctgacctggacgaagaatattcgtattccgaggtcgagtctggaggtggcccgccttgaagttgcgcctgaaaagcggccagaaaggatggcgtctttggagcgacgtaagacagacctctgcgaaaagcagcgttctctcgaccagaattattgggcttcgacatcgagcaggaagagcaactgaggatgcgatcaacaaggtggtcgttgtataggtagagcttgatagctggctcgttatgcctagaaatgaaacctatcccgcacgtgacgcgtctgaaattccgtcagcactcacccatcggctcgtcctattcgtcttgcctgtctccgtccaaccccactcagccctttacatcgaatctatcgcacacatcgcaatagtatgtgaacactttgttttgaaggtataattatccgattacagcctaacaacctatctctctttttacctcctcgctatcgtacttcacaaacgcagtggtggctgatacagcattctgtcagtcaagctcttctcattggcattcataaaacagtccttagttgtgtacttacgcacctcgtatgtgcttcttcggcattgctatttcagacgatcttcttggggtcgatccttcttgcactgaaactgaactcaaaaaggcttaccgagcaaaggcaagtcgtcagcttcgagttatgatactcatcctgttcatcatgttaaatattgttcggtgttttacatttgggatatagtctcttcaacaccatcctgataagaaccttggcaagtggaaatatgattctcaatcaaatagctatattcccctgacctatattattatctgcacccacagatgatcctgagggagctcaagctaaatttcaagagattcagcatgcgtatgtgccaatcatgtcttgtttgtaacagctagtctcgatcactcatatcgttcattcaacttcaagcacagttatcaaaccctctcagacccacaagatcgagcagcttatgacaactatggacccagtttcaacgatcgtcgaggaggaggaggaggtgcttatggtcagctctttcctcctatctactatctg

SEQ ID NO: 1984 - DNA, 6355 bp, Xanthophyllomyces dendrorhous
cttttgttctggattaatccaggtgcagaaagtgtaagggagaaaagacaacgaaagagaagaaaaagacaacatggcacattgagaagggaatgatcgacggtcagcgagtcactttgagggaacacggtgatcaatacgttcgttttttctcattttttgttcttgttaattgttgtttaacatcgcttcctcataattacattcgaatcccggctaccaacactaacaaaaactctgtctctcttatcccctttctgtagccgggcgcaccgacaggagatgtagtgtttattttaaaacttcagcctcaccaaaccttgaagcagtcttccgagtatgatctcttggcaacagtcagtatattatcctttgttgcatttcacgtctatgaatcaagcattaacttgctatcatatcctcttcctgaaccttctcaaaggtttctgtcaccttatctgaagcgctcactgggttctctcgtgttgtcttccatcaccttgacggccgaggaatatctgtgacggtgcctcctggccgggtgatcaacaatggtgatagcttcaaggtcgagggggagggtatgccaattgagcgatcagagaggaaaggggatctttggttgaaatttgagttggaaaaaattgatgaagattgggcaaagaatgtggatttggaggtatgtgtcattcgactttcatttctatctctcgagttcaatacgttctcaccgcttgtctctttgcttcaaactcccgtgacttgaaggctcttgctaagcttttgccttctaaacgtcaaaacgtggtcccaaagcctgagattattgatgacgtgactttgaagcttgatgacaacccaccggtgagtttctagatcataactttccgagaccagatggttagattctgtagctgactgttgatgtcatgttaaatcaaatctcggccgggttacgtacgtagcaacctcgagaaccaagaccgcaacagtcccattactatgaagaggaggaagatcaggtttgtcttatatgtcttgacttttcaccccctttgtcggcatacactctaatcgaacgcgagaaactgacgccgacaacttgcacgaattgatctcaacagcaagattattatgatgactcggacgatgacggaggtatgccagctgaatgccagcagcagtgaaattagtagcataactatcaatgaatgtgaatcctgccatcgcagtcaagaatgatagatcgatgtggatgtgaaagatcaaggcacaggaaccttatgatgccctgagaacatgagtcatacgacggttacacaggcacagagttttgtaaccatagtttatccggtcaggccgacgggctttcgcttgccattggtattccacctgttcttccgtccactactccgactggctagttcttttgatcgtcaactggatcttgctccattctgtatcgcgatctcgttggctcaggatggcttctgtaactgagcctatagtacctgtggaagagcactccaagattgttgacgaccatcgtgggatcagcctacaatcgcccacctcaatatccacacctcttctcattcctctgacaatccagactcaagccgacgatccaaggaatctccaagggcatcatcaggaagaactggtatgtttcttatttatcttgtatcttctgctacggctcagtcaagtacaaggtgttgcgtagaagtttgatggagtatgcacatccgagaaagaaggtggatgggatattccaaattcattagagtcctcatccccctcaatcatcatcatcatcatcatttactggcgaggcacttattccctctttttatgtctgtgcttcaaactatcctacagccagaactctcatcttcctcttccacatcctcgccagcttcctctcaaaagctagcatcctcgccagaaccatcatcttcgacatacatctcgaccaccgctccatcactacctccacctcgtaaaaaggccaaacggtcgtccttcgtccaaccatcgtttttctatccatcagatcattcagtcgatcgtgattactttgacaacataccaggatgcgactgggacaccttcgtggactcagaaggcgttcatcgaagatacatgagtcctgaagacgatgaagaggccaagagagggattccggttttcaagcctgatatgaaggtaagtctttactcttctggattttatattgagtctcatgaacccaatcagatcagaatactagtctgcttgaagatcactgacataactcttctttgatcttaggaatttgctgattttgaggtaagactgagaatttgtagaaaatatatgatcaggcagctaatctgataggacacctcgtctcaaaccgacaggcatatatggataggatcgatcactggggccgaaggtcaggtattgtgaaagtgataccgcccaaagaatggtctgtatatcgttcattcatttcacgaagttagatcctaaatctaagtcttaactgctcttgttcttatgctcaacatgtaggatcgacaaacttcctactattccatcggaagccctagccagagtcaagatcaagagtccgattcaacaacacatgaaaggaagagcagggttgtttagggttcagaagtgagtgctttcatcgtactttcgtatctgccatgtgatcaacgtgcattattattgatatttgattttatttaacagtgtggaaaggaagaaaccgttatccgtaaaagagtggtatcagaaatgcgcactacccaactttgcgttcgtcacattttcatccagccgtttttctataaaggaatgtgatgtactcattgttcctgatatcgtacgattcaattgcatagaacaccacttcttaaagagaccgaccgaagtgaacgaccgacgaccagtgtcatgaagcgcagacgcaacaaacaatcaggagatcctgccacagatgaattggcaacaaaaccatcttctatacctattgcatcatccgttgattatccggaaccagcaacactcactaggatggacgaaggtagaactcaacccagttcagggctgatagcggtgtctgcgtctgtcgcatcaaatctgggtccctccgcttcaagtcccacatcaactagcacgcaattaccaacatccaacttaacatcagagccagtacagacacagatcacttctgtggactcagagaacgtagcttccgtcgccgaatcagtgtcgcaaaaagaacaagggtcaaatgtaaacaacgaacctgtcgaagtcgatccgttctacgacactttgttgaacgatcagccatggttgccaagagacagcaagcaggaggacttcacaccagaagtttgcaaggagattgagcggaagttctggagaggacttgggctcggagattcagcttggtacggagctgatttaagaggtgtgttcaacgcatttttccatctctatccaagtcaaggaaatgggagtgctttgcgagcaaaagcatattgatacaactctctttccttttcatgatacaggttcattgtttacagatgagactaaagaatggaacgtggcgcatctgcctaacctgttgaatcggttaaaattgaagaaacagttgcctggtgtgaacacgcctgtgagttgatattcagtcgtcctgatattctcaacaagtcgacaaatacattgttatctttactcatcgagttgcttgtccctatgattgggtcatgtcagtatctttactgggggatgtggagagcttcgttcgcttggcatgtcgaggatatggatctctacagtgtaaactatcgtacgtcaaaagccctcaattcttatgcttctcacaacatacttaaccaaggcgcaagtccttactcatctgccgtgtgtgtgattttcatagttcactttggatctcccaaatgttggtatgctatcccgcaagcacgagccgaggcatttgaaagagtgatgaagggtaatttttcaataccgtgactaacggcagctatgttccagactacgtactgaattctgttgaaacacattttctctgtatcaggttattttcctagcgatcataatggatgcgaccagttccttcgccacaaatccttcactgcttctcctagtcgacttgctttggattcgtgtcaaccaaacgtccttgttcagcatcaacatgaatacgtctttacctatcccaaaggataccatgccggtttcaacatgggattcaattgcgcagagagcatcaactttgcaatggaaagttgggtcgagctaggaaggagggcgaaagtgtgtcaatgtgtatcagataggtatgtgtaacagttgtgtttgacttaatttgtctttgtcgaaaaaggctgaccactacaagtctcgaataaaacccagtgtcaagattgacgtggatgctgtcttggccgaacacgagctgttgacagctattgaggaagaaacacggcggaaagctttagcccgagaagagaaagcccggttgaaagtagaggaagtgaagcgtaaggaggaggaggccaagctaaaggttgaggcagccaaacgaaaggccgaggaacccaaaccacttaagaagagaaaaccgtcctcttccgttcctccttccaccaaggtcgaagatgacaatgagaatggcttaggacctagtccgatgggaactgcctcaaaacagaagcgggtcaaacttcaggagaatccaaagccgaaagcccccgtcgtggcaaaaccaaaggatatagagtacccgtgtattctctgtccgtcgttagacacggatgatttgttgcctgtcggaagtgtgccttccttcatcgctcacaagtcaaaagagagagaaaaggtttggtatgcacatacgtcttgtgcttatacaattccagaggttcatccattctttgatttatatttttcgcttcctgctgccatgtatgtgatactaatttgttccaacacaccttcgtcagacctattttgtggacgtacccaatgacgatatgacggattcgtgtgatcaatcctttacccagattgttcaaggaattgacctcattccaaaggatcgatggtccctagttagttcacatcaaagtcttcatttcagattccaatcactttcatcattgtatcctgacagtgcaactcctggttgaattgcttggtcatcgctagaattgtgctgcctgcacaaaaccgaatcttaagaagatgggcggcaaggttcagtgcacaaaggggaagtgccctcgggcgttccacgtcacgtgcgctctgaatcatccggatacagttcttagagaacaagaagttgttgaatggaccgttcatccacccgatgaatcgcatgtagctgcataccaagcggagactcgaacgaccaggactgagttgttatgctcgactcataatcctgtacgtacaccaatgtctccctactcattgggtttgctctattttcatgctgggagaaagattctttcataatcagattacacgactgataaaccatttcctcgactacctcaggcgacaagagagcgaaagaagctagaagcagctgctaaacttcgagagttaatcctgggcttcatgcctagtcaaatcattcgcgtaaaaggcaaatcgggaaacatatacgcggtttctttcctggcagcctcagaacaagctcaaacggttaccgtccattgggtcgagtaagcttctccctttctttcatcactgagtcaccttgtccatttctgacttctgtattatcctttttctgccttgtctgtgtcggctacgtattagtggtagactgatggacctcccatggtcttcggtattggatccgatagcttctcttcccaagcccaagaaagaacgcgccgccacaatatcaaacgcgtctagatcatctactccggtctctcagcagctcgtgtccagttcatccagaaactcaccaagtttgtcaatgccggcccctccttccaacccagcctggggtagtccgatcgtaattgatgagtctttgtcgaaactccttgagggcaatcccatcatcgcagacgccttccgatgccttggttggtcaactaccaagcccgtgccgcccatttcgaatactccttatggacagatatcgtccgcgatgatgtcacacccatctccagtgcaacaacctattcactcattctctgagttggcttagcccgaacatcagtcccatcaactagcccctcgtctttagggagttctttctaggttgatatcgttttatatcttaataatatatatgttc

SEQ ID NO: 1985 - DNA, 2422 bp, Xanthophyllomyces dendrorhous
atatatatgttcctatccttgtggtatatcgtcttttacttcttcaatatcgatttcagaaggtctatctttgcctcaatctgtgtttaggaaacacgactcctgtcctgcggttagctatcgttctctcttttcttctgtggtgcgtatcacgtccgttcttgttatgtaactcttagggattcttttattgttttttccagttgatttcgcctttcctccatttccactgatggccttttatattcgggtactggttgtgttgttgattttctttcttgttcgtatcagttcgttgtttgcgagtgaatgtcaagatgtttttgctctatcatatagggaacaaaagccgttctagtcattatcgtcacattgatcgtaccgtacatgacgatcatgatagatcgatacatgaataaaagtcgattgtcaaaaggtcctattgaatgtcttttaccagttgttccatacctcgacaggcatgatttctctcatcgctaccaaccagaccgattgctctccaagaatcagtaacaagcttcgacacactcagagaagaaagacaagggacgaaggagaacaagagaaggacatacctttccaagtagccagcgctgcctccgtctgaactacatctagtctcttaccggcaaagcccctcctcaagaggccctgtgaggcagaatctccagtggaaagtctgtaagcagacagatcaacctcactgtccatcaaagttggcaagactttatgacgaagttgtgaatggaggagatcggccgccacatcgatatctcggaacgagattgatggagttgtgaatggtgtacagaagatgacctgccaaggttgtaaaagcaaggaggaagcgatatcatgttagcaacagaggtgataattgcgagagtttccttctttctatctattctgtcttggagtagataacacaaaccatgtttttcaaagcaccatcattggaatcttcactctctcccatgacatctctgaaacctcgacaagtagggaaggcgtcaagtaaggtggaaatgacgaggtccgccgatgttgaattttgaacgcctgcaaagttgaccgatagaacgctttttcaaagcgcgcatccacccacccaaaagaaagaagaagaaaaaaaccaggaaggggagagaaagtagtgagtatctggagtttgaatcgttgacggcaatgtcaagatatcaagtcaaaaaccaacccatctggccggaggatctgtttcaaatcgtcccagaattcctatcggccaccaacatacgtttcaaagttactgaatgccttctcaaatagactacaacgcctgaagacaactggagaaagtggcagatgaactcactaccgtgaataattcaccagcgatccctccacctgtgaatacgtcatgcagcacataatcgtatcctcccttctctcccagatctctcttggcgacggcagccgcacgctgaacaaagacattagcatcctcgatgaagactgcatccgaagaggggagatggaagtatgtccgagcagcatcgtacactgctggatcatactctacaatctattcgctcaggaacgaacgatcgaccaagtttcatgttcagtttggtgctcgaagatttccacgatcgaacatagttgccttaatagtacagacaaactacatacggtggtaaggcagttatgcactatcatagctcttgcggcgattcctgcaccaagaccgctgatgtgataagatgcgaacaaaaggaaagagcaggatgtttcatcagccaagatgaagatggtgagcaagtttgtaaagagttcgatcaggaccaacatgatcaacgctttctccctctccgaggaggaaacagctcgaggaggccggttaatgagtcgaactctattttgttttcccatccgaccgatcagtgaagagagagattcagtatccctcagccatgtcggatgaaacaccgtgcatcgtcggaaggggcaagtttcgcgcttttgaactcacgcttcctgcaagacaaacgccgagaagactgaatctcctatatctcccacaccgattccctcacctaccattcccctctcacctgcaaacctcgccgcttttccgatccatcgaccgcccaagagcgagtggtccgctctgagatacctgtaggtaagatctccgtctatgctctcaccaaccacgatcaaacctgagttggaccggactcgagacaaggttggaaacgaagcgagttgggccggggtggacaaggggatggcgaagatggcgagcgcaaaggagataacgaggagagtttgaatgaagcggcgaagagggtaggacaaagtcaagagagtcaggagtaggaaagcgatgcccttgagctgatccggtaagcgagttgtaaat

SEQ ID NO: 1986 - DNA, 2419 bp, Xanthophyllomyces dendrorhous
atagagaaaaatagaatatttgagtatgatactcaagtatgacatcgagctggaacttgttgggatgaggaaaagtatcacctggtcaaacaaatcataaactccaagcacgacagccgaagcagagacgagatcaagtttttgaagtcccagatatacgatacaagagagtaccggaatgagtgcacttcgagcaaggctcgagattttatcgagctccgttgaactttgtgttcccaattttttcttgttgataagggagcgcaagagatgattcaacaccgaatatgagcgccgttcgtaaataaggaagttgatgaccacttacaacgtggatcgcagatatcatagctcccagactccacccagccactccaactaatgggcccctgacgggtcctagttgtccgctctgagcaccaacaaacctgacccaccaacttgccgaagcgaacaatcctgctaaaagacttgcaagaccaacatctatcttccctcctaccggaacgccaatggatacgatacacgccacgagagctgctgtagaagtataacgatcaacgagtcgggaaccaaagagcgggtaaaaggcttcaagaagaagtttagagccttgggaggtaaagattaagacgaggatagttgtcagcacagatagagggttcgtctgtttgattttcttgttcgatgcagaagatttgatcggtcgctctttctctggagggcttggagattgctcaaccgacttggctcccttgggactcatatttcttttggatttaggggagggctcgaccatcctgagagatcgatgggatggttatgatggtgaagatcatgagattatcgaatctggacgtgtctcagtttgtgaggtttctctgacgcgtgtttctcttaaagtacgcgcagtcaactctgtgaacaagagcgttcatcaaacgtggcgaagaagaccagatagttttcatcatcattccatcgtccttggtaaagatcttacttcgaattgataacaaaaaaaggacaaaagaaaaagagctacgcgtatagaagattgaaatgacaatgtacactacaccggacgagtgaaagcctctggaggaatttgatcctttgaagcagaacaaagaagaaagagttaacatcacgtcctgagtcttggccagaatgaaacggtctttcactaaaagcaaggtaagcttaccttcaattccataaagtttatccaagccctatcaagatcccatccgttcccatccaggcattgtacagtaaacggaatcgtcaatcctgacttttcagcaaactgggacactcgaatctccttctcagcatcggtctagatggtcaaaagttggaagaaaagaaacggaatgagcgagacgtaggccaagcatatgtatttccaattgaattacgcacgagaaccgtcggtggggcacttcctgcaacaggtccgacacccaatggaacagccaccagcgtcgtccccggctgaacgggaagagaccctcctgagaacattttggatccactatacagcctgacagtgagcatatcggagagaatcacgcagggccaacctgctgcttgagctctgctcatacgtagtccatcaacgaattagctttttacaatactcaccgaacagtgagagaaagaagaaaagacatagaattcagcttacggagaatttgggggagaaggagagaggatgaaagatcgatcgaatgatctcattcccatggacggcactgatcggacaaaaacagcatgatgcacagaacattaaacacaactcaaagctgcgaaaaaaaggagaagtgtatcgtactctcttcaaactctccatgcacattgaccattaacagcggtgtggctccttccctttctatagggaacgaatccacactccacttgtcggcttgatcaatcggatgcttcgtaaacggtactccctcaacaacatccttcccattcttactcttgtccccaacaaatgctttcaagatgtcgtctccaccgacgtgcagtctggtgatccgatccgccagcttggacattcgcataagattccgtgagtgcgcggtataagccttccaggtgagggatttttgatttggtagatgatcgttcaccgtaccatacctcactcgatgaggcacgttggtagagattgtgagagaaaatgtggaagtgggaagatacacaggcgcaagagagatacgcgagttgtcgaacaaaggaaaaaacctaaagaaaagtgaaggtacgagtgaaagtcgatgcgcgtcagaaagcgattacacatgacacaagactgaggtgcgtcaaacgagcttacttggccaaaaaagcattgacgaagtctgcgtcgcccaagataaagttctggttgatgtctagagggaacgac

SEQ ID NO: 1987 - DNA, 7751 bp, Xanthophyllomyces dendrorhous
tgatgtctagagggaacgacggcactggtcttgaaactgcgtcttgcgaattagaagcggtagtagaggacggaggcagggatggtgcaaccggaacttcgtcggcagtgagatcaaaggtgattgaaaagatgggttcagaatccagcattcttaaaaaggggaagtgtgaagtcataagactattatgttatgatgatgatgatgatgatggtacgcgtcagaataaagacgagttcaagtatggccttgcgccagcaagaggaatgataggaggaagactaacgttcggtatccctcctcgcctctagccgttatctctttgtcccggaagggagtatccacagtgacaagctctcgaaggttatccagtccagacttgaggctgagaatgcttttcacggcttgtagatccctcaaagggtttttgctgatcgacaagtttcggacgctaggtagaaactggcccatatactccagcgactcaagactgttgaggccgttattctcataggagacagtgacgaccttgagaattgatcgaggaataaatacttcatgttcttggaaattttacataggtttatgattggattgaagaaaagactaacaggcggcttcaattcggccgcaagcttccagatgaccttggccatggcggattttgtacccttatggcctggaggaaacacacttcgctccaggaggtaagaatccgtgctcattttctgtgagatcaccagcggtcacgtatatctaacagcgaacgtcagtactctacctcacatacagaagcgagcatgcatgactagagtagagaaggggacttaccgaaaggtcaagcatagctgctccagcattccatctgccggccatccatgtgcgcaggatttcgactgctcctactctgggctttgcacctgccaaagggttggctctatttgatcccttgcctccctttccagcaccgctacccgatccggctctcccacctccgtcggaccgaccatgggctttgtctttatgacttcccgaactacctctgatactatgtcctccaggatcagccatcgttgtgtctgacggtttgttaggaagcgagccctgtaaatggttggcagcaacaggtgtcatacggataggcgggagaaatagtcaccggcgatgagggtcaatcgggcgcatttaggggcaagagaggagaagggagagcaagagattgatcaaggtacaaggaggagggaaggattcgaggtggttgagctaaagaagatatgcatggaagaagtaataaagagtgagtcaagaaaggggaagtcaattatttaccggtgcatgctgtaggtggtttgtgaagagtaccagacgaacccgaaagacgaccaagacaaggagagacagaggtaaagcagaaatgcacatatgattgattagccatcaccagtctcgattgagtccccttatatctggactgatgcccacggaaaagaaagaacgaacgtttctgccgctgacggctcctcgacgaccgcctttgcctcgtccggagggtctcgtaccagaaccagaaccagaaccagaaccaggaccaggaccagagccagaggtcatctccattctggcttcagcaatagacattatgtttctatccgaccaagttgtacgaagactcgactgttgagcctatccaatcagagaaactaggagagggaacggttgatgatggatgatggatgatggatgatggatgggagtatcgttggtggcaaggagaggggaagcgagagtaagcgagagaagaactttctacccagagcttgaatgtaaccaggaccggtggatttgagtaacaatgtagccatggctacagacgcgtggcactcaatatgtcgcgtggcgcgtcaatcgaccgaacgcgtctgagttgatgacgacacgacaaaagagtttcatcattgaactctcaaggtcccttgactccgtgttcttttgtcccggttcgttccaaagatgaatcaataggagtgaatcagggacacaggggaagcaagcaggaacaaagaaatcctacagagaaaacaccagcaacaccaacggcgatggcgacggcaacgataacgacaacgatgacggcagcacgacacaaaaccacgaatgcaggcgggaggcgggaggcggatggagccctccatggtgccgattacattgagtttggctagtaaactaagtattgatgttcccgccctcgttctaaacgtatgctgaccgactgggaaagatgtttgaactcttaccggctatttaaagaccgatctgatgctcgatgatattaacttttaccatggcgtcaaggcagacagactcttgggctgatttctcttccggagtttagttgcatgaatcggaaccttctaatatctgggtccctgtcgtttatcatttcgtccctcgttcatcgcgctgtagcgctgatccttcttcagatgatcctcgtaaattcagccacacctgaatttggttccctgcctgagaaaaatcctccgcgacttgctgtcggctgatcgtcagccaggcgaagagactaaacagatgaaagaaaaaacagctcacatcccacaggaacggaagcggttaggcaggaatcggataacctccacattgatagactgtgtagcagtagttttgctcttttaggtttccttaacagacgcaagaaggtaatcactttgaggtcgttctcttctcctatctttctcttctcacttgttcttttctctttcaaggtcttcgtctgcttactccccatttcatctttttcaactcaaccattccgcctatgccgttttcattgtatctcatggagggcaataaattatccgtgtcgaacccaatagctaatgctgactcaacgtatgctcaggctcacttcgaggcccctgcccaggtctccaaacggactttgtctaaacgatcgatcttgccgagtcccatctcgatgccctccagcattggacagcctgatccgtctttctctcgggcaaaggctgggaccgtcaagccagtttcgatcgattggcaagctggcaggccaccacatcaagagtttcaacaatttgacgttctggaccctcctcggccttctctctcgtcgcataagcttaatcagcttttgacagatccgcctaaaaaaacgttttgcgacacttccgatcgtggcttcatcgtgcccgtcccccgcgctgctacacgagtttcctacgccgattacactggtcttatccgtcttgcaggaacataccgttcgatctccgatggagtctctttcgagggccaggccaacatcgaacacgcattggaaccgggtagacgcaagagccatcactccagacgaggttcctctagatccattctaccagggagcactcggtctgtatactggtcctgagatgttatctctgactaagtgtggctctgtcgatatgaacgacatggtcgaggcaatcgaaaactgtcctacttggcttcctcgagcatcattccgagaccatgttttccctcaaggaagatctgctcaatcagaactatcgtcctctttgtctgtcttttcgttcgcggagaccgcgctcaatcagtatcttcattcacatcgccagccggcggacatggcctccaccgcctttaactccatccccaaaaaacgaaagagagaagggctaggattaccctgcccatacgatcagcacgcaatgaacacggagagtgattctactatcaacgatgctatcaaagtccatgaggacccaccctgggcgacgttcatgaagaaagaagaacattcagatatcaattttatagggggttcgctcggcagatcagcatatctacgtcaaccaaggagaaacggaaagttttgtaaggtctgtcttccgatttcactaccatagattctagaatcctcgcctgccttggctctgcgccgtcaaaacctgggctgatgatccatcttgtttgggtatctagttgtgacacaagacgtgccgctcatggattgaggggtcaaccttgtgaactcctgatgtcaatcctatccttcctctcctaaaaagggaatgcttaatcttctcgacaagtttcaatctaccttgcacaacccacctctttgtattctcctctaggtctcatgcgaccgacactccttcatttaatacgtttgatgtatactctccttttctcatacagactgtgtggcacgtaccttgatctttcggctcactttcttctagtccattgcattccatcatgacgaaccctatcacgttcttctttctgatgaagtatctcatatatccttcccgagaggataatttgggcagcgccttctgagccgcaacgatctcttgattgcgtgcatgttttggtttcgttttgtttttctcttttcttcagattcccccgtatgaaaagtgagtcagcccgtatatatagagaaagttaacaggaacgcatcatgtaatcgatacagataaaaaaacaaatgaagggaaagaatggtaagagaaaaagtagaactcttctctcgttcttgatgatcttgcagaacggaatagatctgaatgtttgaatcatctacttgggagtataaatgatacctgtcctgaaatcgtccgatcagacaagaggaagagacgccaaaagagaaaaggaaacgattcaatatgaggtcacatgagaagagaacgggagcgccgcgaggttcatcgagaagaggtgtacgcactttgggcaggtagatccagatccgacagatggcgcaggctggaatgatccatctgccacggatccctggactacatagtgatacctttacgatcccaaccggtcaatcgaccgacaagatcctttgagcttttgcaacgctcgcccgtgtttcgtccttccttctcctcctgtttgtggtatcgaacccagacagaaaaaaacttaccagagttcgttcaacttttttccttggcagttgatcgtaacgccacctccgtgtttcccctcgagcgcagccgagatctgagcaagcgtgtatgtcttggtcgggctaggtgtaattccagcagcagcaagccaagtgtaagacggaagcgtcttgaacaactatagagggaggatattggaagtaagatttatcacggtcaatgaacgtagtcttcaaaatgaaatgaggaggaaggggttcaggtcgactcacggaaacagccttgttaaagaacgtaatagcgtcttgttgagggtagaacttgagtcgacatggttccagatctcagttaggcatagttataagcgagtggatcaagattcgtcggagacatacattgttgaagcatttaggctgcagagttgagagacacgttctgattgaaaacgacaaacttttcgatcagctacagttgagaattcaggttgtggtagaataagccacctacccatgcttattgaactgccgcaccaatcggaaattcaaggtccagaattcggtcaacagagactacttgccaatgacaccgaagaaggatttatgagggaacagacctcatgctcccagaagctttcatcatcaccctggtaatctttccagtaggtccccatgtatttcaagagatctgtctgttttgccttggtcagaacggcggtgatattgttcaactgtcgagctggatcgcagctctctatgttctcacgtcaaacacacctccgaatgaggacagcgcaagtaaagaaggaggttgaagttggattgtgtcaatcaggtgcgtctaaaagtaatcaggttgacagaaataaatgtacaaacgttcaaaagtgccatcacacttgtccggccagaggccatggacagtccacgaggttgtctagattcagtgtgatcaagccaattcgtgtcaggttgtcgatctgcgcgcgatcaatgacaagagagatacatctagattggaggactcataaagagagatggatgtatacgcacaggtcctgtagcaggagcggtatcccagaactgagtctggacgatatgaccccctggagactcggtacagcatgtgttcgagggtgttccgacagagcaagagaccgggtaagtagctcctgagttgtttgaacagactgtaagaccggtagctctagattccaagggtgaagctccggcagaaatcccgtgaagcgcggagaaaataacgggcgacagggtgatggcggtaagtgtggaggtcttcatcttgttctgtgagagaggaaatcgacggggagatagaagcacgtgttgtttttcataagaatgtagcaaatccctgggaatttatacatctccaaagttcgctctgttctaacagagggacatttttttgtctaccaaagtccatgactcccatcaggtggtcacctcatgttacgttcgtttcggttgattccagacgatggctccgccgatggccggtaatgaacacccgctccctagactctgggtctcgatgaatgtccaacgtgtatgtcaggtcaagagaacaaaggaatcagtaccatgcgtctagaacgtgatcgatagactactatcagctcttttaagatttggcctaatgaccagaatgcgattgttggttctaaggctggcctatcgggtaagaagttagcacgaattgaataggccatgcggagattcataaatgggggctgatgacccatgtgtgagccaaaggaacagaacgaatagatgagtaacgggggattaatgttttattaagctatctcagtaggaacaacagtttattcaaagtttgatcgccgagatttgtaccattcagttgagattgttggaagatgaatgagatattcacgatcgcgtttcatattcgatggcaacaacaacagcagcagtgaagtgcaaatcaggagaaaccccccttctgctctctgcacgtttcctgtgtttctcttcttgcctggtggatctgatttagcacacatcataacccagtcacgatttgataaccaacgttcatcatacaatcaggaagacctgatgaacccaaaaatgacccaatgatctatacaaccaatatttcgcattcgctatcatgcgcagctgcttcaaagagttttgaactgcaaagtcaaaggcaatgctttgcccgctcctttgtaaatatcaactttgtcagttccggaaggaactttgtcggccgagaagacactggatcctccgagggtgagggatccatcggtgctctgcatcgtagaaggacgaatttaacccgattttgaattgcttgttaagatacattcaactcatactcattgaatcgtagacgtacgctgatgaggaactctccaggagtagccacggtggaagcgcaggtgaagagcccgttgctatcaactgcacaaggtcccttagagctggtgattgtgtaggctccaccggtgacgaaaccgagggtgaaggtagcgcaagttccacccttgtaccaggatcctatagagagagagacaagtttgatatcagcgacgaaagacgaaagacgaaagactcagagccggatgttaaagaagcgacagagacgaacccgcagagattacacaagtagaggcagggacagttccgttctgtgcggcatagatgtatcccttacccgaggtggtggtgtttctattaggaagaggggtgctgaggatagtcgtgtacttgggaaggtacttgatgcccg

SEQ ID NO: 1988 - DNA, 3373 bp, Xanthophyllomyces dendrorhous
ggaccatgttaccgtcgacggcagatccttgggaaacgtagtgatacctatatcaagccgattcaatgaaacaattgagtagttggtcaaaccataagacaggaaccgttctaataaaatgtacataccacaactcgtccaattcgttagcgctcgtacactgaacattgacaccacctccgtgttgggtctcgagtacttgagtaatctcggccaaagtgtaagtcttgtcaaggctgggaacgattccagcggctgccaaccagtcgtaagatggaagagtttggtacacctatgatgcaaccaaaaggattttaagtatcgaacgctgatgtaaatttagggcatcaaacgtgtgtatcatagggagaggagagccagaacggacctggacagctcgcttgaaataatatacggcgtctatttgaggttggtactaagaagaaggctcaaggtcttgttagacacatcgactttaagaacagatgggcgatgatgttcaacagacaaacatacgtttttgaaacacctcggctcaaacccagagatacaggttctgtttgacaaaagtcatgatacttttgagccatcaactgaactatggagggatatgagatattactattacacacccgtgcttgttgtactatttccaagagccgaaggatgaatagtaagttgtcgtcacattagggaaagtggaaaggctgaattcgcgctcttacctcatgctcccagaaagtctcgtcatctccagaaccatccttccagtaagtgtccatgactttcaataattcagtctgaccggcttgcgccaaaacggcggtgatgttggtgagctctcgagacgtatcacaatattctaagcgaaacaacctcagcaggtaagcttgatttgatcccaagtatcgggaggaggcatgtggtacgaacgctcgtaagttccgtcacagttatcgggccaaagtccgtgcactgatcaagttggaagtatttcagcgccaaacacagtcgtacggagagtgaagatctaaaccaagccaacaaatgaaaaaatagatttacaggtccaagagttgttcggtccagtgctcatagatcctgtatcccagaattgagttgataaaagatgacctccgggagtagttgtacagcaagtgtcggtttcgcccgcagcggcagccgagcacgacaaagggaaaaaagatgccggctggtaggaacaggtagtgactccagtggcagccggtgcagcgctagaggaggaagaagtagagggagcaaagacggaggaagaaacgcgagcggaggcagacgaggccgaggaggccaaggacaagatagaactggtcttagaagcagcagagctggaactagagacagagcttggcttggaaacagcagaactagagacagagacagaaacaaaactctagatcgatcatgtcaagaaacatcaataaaacgccgtcaggcaatacaagaggagagaaagagaggaaaagacaaacgggagtagcggagacccgagagagagttgagctcaagatcaaggtagaggttcgactcatctttgatcaaacaaatcatgataggaaccgattggtcagatattcgatgaaaagatgcgcatatgtaacaaagccaaacgcacagaaaccgaactggaacttgaggtcgttccaagatacccaggcgggttacgtcctccgtgcagaagtctgtaccaccagagatcccaagcactccagaaattgttccaccattccccaatactggttgaggacgattctgtcgagcttgatgaagaaggggcagcagaggccacttgagggagaaccacaaggaaggcggccatggccaggatgaccgggatggtggcgaactgtctcatgatcgaaggatgagaatatacaaggaagaatgttacttgatgaaaaaggacaacgagaaagaagtctatcaacctgatggtcaacttaagtgaagtgcgtttatatatcgattagcatcggagggctgaagggtaatcaaacgatccggagagttagtttcacggagtcctccgatgtgagcatgaacgtgaagccatgcatccttcatcacaagaaggtgatggcagtcttatccatcgaatcttccttctcctccgagagatcttgcaaataaataaataaaacattgaggaaaacccagaagaaactcagaacgtttaaccagctgctatcagtaagaatgagttgaacttaaaaacggcaccataaggaggttacgaatgttgatcgataggagggcccatgcggtccaaagaggcaaacgtgctaaaacaatatctggtgtttcattccttgtgcgacaacacctgatagacgcagagaagactttaaacgttccccatgcaaatatttactctccaatcaaaaaagcgaataatcgtggcaatcacagagtgaacgttggtcggatggaggaaggaaaggaatcggaaagatttaagcggatgggatcgacatgaaaccggatatgatctaccgtgattatccgattagtaactttcggtgatcaaattctcttgcttagatttcagcctcggtcatgcgagagagagaagagaaagagaggaaacgccgaaacgctagaagagatttcatcaccatcgatacatggtacaggccatatgatctttccgatcccatcttcatacagatcggccagcagcgcgcgcaaaaaattcaattcggcttgccagtcatcccagcaaatgacccaggaatcccttcatcatccatcttttgcctagctaaatcgcttttgatttcgacctgacccaaacttcccacaccaggaatcacagtgaaagttgtgcggtcgtgtggctgaggctttagctcgcccgaccggaaggcagcttgtcatttttccaaatcgaatgcccacctgaaagcagtcgaacccagggcgcacgtatcagtataggcagcccacacaataggtcaacgactgatcaatgcaaacacttacatggctgcaccaattcgattcgaaatggagaagaacatgccgatgaatctgtgagagtatggattcgtacatcagtcgatagtactcgttccaggtaaacacatatcgtcatatacgcacggtagagattcaagcaaggccgaggtaaatccaaaagcgtagtaatcatactttcgctcttccacgaatacttcctgttgctctagcgtcatctttttagaagcaaaatactttggtgaggtacgaaaggcacaaagagacgttgatttagccttttctctcaagacaccagaaatggcatcaattcagataggaacggcccgctcggtgacgtacaggggcatgcagatac

SEQ ID NO: 1989 - DNA, 74396 bp, Xanthophyllomyces dendrorhous
  misc_feature (18204)..(18213): n is a, c, g, or t
gtacaggggcatgcagataccgagcggttcccagagccttgacaccggaagatatgacgattcctacaaagggaacgaagttcaaggggaaaaggacaactaaaggaagaaggagaaaaggatgggcaacgtcaggctcttttcgtaagggatatttcgactacttcgacatacatttgtgtagtataaatttctagaagagtgggttcaagagtcagcaacgccaacatggatgtccgggaaacaatgagatctaggctcacccctacatatccgaccgcaaactttctcagccaagctttcttgcgagccttggccgccttgtccataggaggcgatacccactcttcaacgtattcgccccagaacgtgtcaggttttccacgagattcaaccgtcttttaggcaaaaataatgagacgttgttcagatgatcgaccgtactttcgaacatataagtgaatgatatgacgaagtttgttcatcacatacttgagaccatgcccttgctcgagcgatactgatgtttttggagagaaagaacctaagaactgtccgggtttcaatccaagtacagatgaagcatacaatcaatatttcggtatacacctagttttcattctttgttggacgtactgtaccagaattgcgacgacagaaggaaaatggttgcgtagagagacagagggacgttgtactatgaacagaaagctcagaatgacatcagcgtttgtgagaccaccgaggcaagcaagaatgaacaagagagggtctcactccaaaaacactggtgtccttgccagcgaacctggtcacaaccttagtgcccatcaagaatttctcgatgaacccttgttgagacctccaactaagaaacacccagaagccacctacgaggagacctctgatcgttccatgtttggtctttgaccagaccgcatgttgcaatcgactatcggtcaacaatcggtatattccaacgactgaataagtgggtgagaacgaaaggcggagagaacgaggatcctcgagaagagtcgtatgggatataggattggtaagtggatgagatggactgatgttggacatgctgatcagatggtgatcggttgaaggcgatgacgattaaaagatggatttatcacatttcgttcgacccagccaggtatttcgttcgatcttccatgagataccgcttggcttcacttcaacatccacctatcgtcctatcatatccatctctgtttcatctctcttctttctttgtgagccagttgttacatggcattggctggtatgcttcagcctgttccggccccgtccggtctgcctgcacggaagagctcgaaccagtccccacctttaaaagctagagagagcgtccggtcggtagataccgttggagatatcctggatatctactacaatcgagtcaatccaacatccgagacatcgcaaaaccctacagacccccagcctcctctagcttcggtcttgaatccggccaagacggtcgtcgatggatcttgtcccttgggccttcctttggatccggccaacgccgtcactcctcctgccgctactccttccaaagtcgaaagaaatttcaaggcagaaactcctgtggtccagaacttggcttgcgaagatgatgtcgaagaacggatcgctacgacaggacattcggatgacaatcctgaagggatttctcagagtctgacgaggactttgttgagtgacgcaagtcgagcaacgagtatgatatccaacggggggagtgtcagaggcaaagacgaaggtaagcgcccgctcgtcctgttctctgcactcttttgactttaatgtctttgcttttatgtgtctgtgaaattctgtcattgacctttcttttgtctggaaccaaccattcactttatagaggaagattcgtttcatgtccgttcgacttacgctaggctggagatatcaggggttgcaggagacgggtatgaggacggggtagaaaggacaagagaacgatccaaattaggcaggaccagtgtctactttccagctaaccatactgaaggtttaagtccagcagaaatggctgtgagaagcaagcttgataggttggacctattcttcttgaactcagatagggctcaccttttgaactcgtactgactcatccttctatctcgatttctatagatatgggttcttctcttcgccgttgtccacacgatcagaatcacgcatattctcgatgacatctatctctctgtccaatccacccacctctatgtctctatcaagaccgcgccggaaaccaaataatacacctcctttacctcagccattatctgatttaggcaaatttcccgaggatctgagtaaagaatcccgtcggatcgacaagtgggagagaatgttggataagaagcagaaagataagggagggaacaccttggcatgggagtgggcaaaaggaaaagaatctaaagttcgttgcgctcaactttgtctttcatcaggatattcgaactattatctcttgtatcgcgagctgactcgacatttttgggcaattacttgtcagatcacaagaagggtctacaaaggaatccccgatcgttggcgcgcggccgcatgggaaacactgatgcgtcacttcgacagctcgggtacgggcggtaaaagaagagctaccgatgaggaactgatatctatatacaaggtcagttgatctgatgttagtagtaggccggtagattacagctaatatttattgtttctttgcttatatccacaatcataggatcgcatagaccgaccgtctccattggatgttcagatcgacttagacgtccctcggacgatcagcggtcacacgctctttcacactcgttacggcatggggtaagcttgcccatcgcatactgactgctccagaatagtttgaactttctcttacaaagctctcttcctatgatatctcttagccaacgagcattgtttcatagtctgcacgcgttttcgttacactgtcccgactgtggatattgtcaaggcatgggctctattgctgccaatctgttatgctattactcagcggatgtgagttttcagccttctttttgtcagctcgttgactctatcaacaattagctcagttacaattcaagagtccaatgaagctaaaagaagttcttagggccatgtggcggctcagaaaacgtgctgtcacctcattcggctacatgacctttatggaatgcacgatctgttcatgcctggttttccaggcatgcttgaggcattctatgttcaggaaagattggtggaggtcttcctgcctaatgtttttgccgctttggtacgtctgcatatcctcatcacctcctagcttcttctcgttctgtggttgtgccgactgacccggttgtattcgaggcttccacagaaaaaagagatggtgtccacgtcgtcttacgcgacgaaatggtacatcacgttgtttacaactacgttaccgttccatactcagctccgggtatgggatatcttcttccttgaaggaagagatagccttgtgatcgcttcgttaggaatcttgtggtctttcagaggtaagtgtcgagattgcttgaccttcgtttccaacccaatgagcgctgactcgtctttcttatcgaaatcatacatcagaccaacttacttcggccgaagcaagctttgagacgatgctctccctcctttcatccttctttgtcccagacaacgataacgtgtttatggcgttcatccagacgaccatgtccatcagaggaatccgagctcaaatgggtgaatggaggagggagtggaaggatctagaatcgaggggagaggcgatggataaactcttataattaatcatgatctagaacctccccagttctatttgctatcctctgtttctttcatcggttttgtgctgttatgtgtggtccttgtttttcatgcttttttattcgttttgttccttgttgctcatcgtatttgtattttatgtgattcttcaagaaagtaggagatgatttcatgatgaccacaacctaatatacaagcaagctgagcgaggagagaggagtggcatgtccgatatgaagtaacggcaagagtaaataaaactatttaaggatcaaaactgtatacaagaggttgtaaagcaaggctaagaacggtcaggtgtaaaacctgtaaggaaagtgatcttgtgtccgaaacatagatgtgattatcaggagatcgtacagaaacaagaacaagataactagaatggttaaaaggataatgtgtcttttgaggggcgagactgttctttcacatacgtcttgctagtaaggtagttcatagctgacttggacatccctcgtccttgttcggtatctaatccgccggcagacaagaaaaaaaaacccggtcaattttagttcatgaaagtaagaattccgagatcccagtcagtcatggtcattgagcagggaacaatcaaggcaaaggacagactaggatagcaaaataatcgtcggagaatagtatcaggtacactatcgtcactcgtatcttcctttattgagcgaggtttcgtcgggatcggtggtggaggaatttctaagatgtccggaacggcagatctcagtctagaggcttcaaccaggcttcgacctagctcctctccactctagattctcgggcggagtcagaagaaaaacgccaaagatgactcttaaacgtcagaaccaaagactggaatagtcgaagggttagatttgacatacaactagcggctcttgagaatagatgaactcgtccgcttctgcttcgttcccgactctcccagccagcatgaagcgcagtggagaaatctcttctgtggtctcggcccagaagtcgtccatctctccgttgtctatcacatcctcttcataagacactacagtctttcttctcttggaggtccgcatgacacctgactctggggtagcaatgtcattgctggcaggagcagaagacatggcgggtttagcaagaggagagggcttggagagacgacgacttgagcgggatggaggtttttcaggggatatggatcctgcagatgttgattcattgcgggaagtggaaggtgggatcctgatggatttcctggtcgatagaatgatgacctgagacgaagaatgagtaggagaaagatctgaagatggctgaggtactgccagtgtaggatctatggcaagattctttgtcactccacgcatcacgaagtcagaactcagagaaggtgcacaactaacaactttgtggatatatcagaatttgagaaggatatctttggctcacagaatccattatctcgctcaaaacgacctctaacccttggttctttgccacaacggccattgcgtgaggagggatccaagtcccttgcaggcgggaaatgttttctaatcctggggtgagtttcccaccacatattgcttgatattcagaactctcaatctgatgatccatcatgaatcttttccgttgacctcgaggaatatcgaagactttcatgagttgggactgtggtaagagatgattgagtgagatcagatcatcatttggactgagagaacacaagtgagaatgagtatatacaatgttgtagaatctatagggagtaggcagaaaacctcagggttagtgtaccttgccatggatggtaacaaacctcaacttgctcacccatcagactttcgcctcagaaacggtagtccattcaaagtgaccatccagacgtgctcgttgtttatcacaagactcgataacggtgcggacaatttggatgcagcgagcgcgcttgcctgagggaacactctatacggcatctcgataactgcagatgaatgagcaaggtatcatgtctgaggttagtgagttgtaactgggtaagagacttctcgatcagagtcagcaagaacacgagtaacattctctttctgttgtaaaacatccagttctgataaaaacagatccctcttggcttactttctgcaaagtaactagagggtctagatgagaatcttctgttagatatcgttactctggatcaatcagcttttcgtcgatgttctgttatattgccgagagggaatgttcagtgacgagaagtagcggatatacgttgaggcaaccctaacagaaggtgtgcataaaccagttccgttggacgagttcatcaaacatcaccatcgccatcaccatcaccatcgccatcgccatcgccatcgccatcgccatcgtcaacagcagcatcccagcagaggtagttgtgagatcagaacgcgaagaaggaaaagagaatcatgtttgacgagtgcaagttccaagctgtttgttcctgtgtctttccgcatgcatgctcactcactcgtcacctttccatctacagtcgtagaacactcggccatccctccgtcggatcagccgttcgtctcaccttcggtcgctcgatacgatcaagtctcctatgaagggtttgaacaaagcccgttctcagatgacgacgagcagcgtccgccaggagtcgtggaacctgtctgtattgagctattcgtttcaccgctcgtctagtcgcaaggtctcatttgattcatttggtgtccattcattaatcacatcagatcgaaacaggctacatatccacccaaccaacatcgtcacaacccaatccaatctttactctaggtcatgttcagatcacactgccctccacacttatccaccttcgggtggcttccaacatcctgatcatggctctccatccttttacattaatcattatcgatctcgcccgcccgacagacttaattaccatcgagcttcctgtctcaaagcctaacaagacatcgtcaaatccttctgcaggacaaattacagtagaaaatatttggccagatgacgaaggaagacatcttttagttggatgctcaaatggagaggtctggtatctgtcaaatctgccggtcgtcgcgtctaatagctcaggaccgtccgggaacgcgggtacagccggatcagggactgggtctaccacaaccggttggaagaaacctaaaactcccctcaaatctctcaaatcgcaacggatcatttctgtagcatggtcgtccaatgcacgctcttcatcaaacaatatcgccaaggactgtttgatcggtacccaatctggccagatacattatttatcgctccagccatctgaagacctgttcaagtctcaggagcgcgaatctgctgttgtctattcattctcgagtggagaaaagattgagggagtcagatgggggctatcaaagagtcggaagaagggttgggttgtggccctttgtgatggaaagggttggatattcgagggcgcattgagagaacaagcaagctcaagcagtggaaaatgggcagaggatttccttcgaggattcaaagattctggacccagtatgttgaacattattttgccttcttcctgttgaacacgctaaaactcttcatgtacgcacactgcttactatctggtatctaattcgaagaggagtttcctgcctctcagacattcatcaagagcttgccaacttcatcttctttttcttcgagtcttcagctcatactagctcctccactaactcctacgaacctgtccaacgtacagactctaacttggttttcccgtgggtttctattgctttgtggtaatatatctgcgcgagaacctgatacctctctttcctatgtcgattgatagcaaacggagtgtacactgcatctctcaatccctccttacctctgcttactgcacccgacttgattccattcccgacgacatcgggagagtctgctggaatccctattgggtttgctagtacagattttcattggttgtttttgtggaaggaccgaataggagcagtgtcgaggctgagcggcgcgctcgtttgggaggaaggcgtctttgttgttcgtattaatttatacggcaagatagacatatgtttctcacgtttcccatatctgagatagaccactgactgcatcattcgttcgtctgatgaacgtcttatcttgatattttctgcagaaacccggagaaaagccaattggtctggcttcggatttgaacagcaagacaaattggctgtacacgaccgggtcaattttcgaggtcgttgtcgaagcggaagatagagacgtatggaaaatcaagcttcagcagagcgattttgaatctggattgaagtttgcaacagttcgtccctttgtatcactcagttacctctatcatacaaagccatcggctcgacgaattgataatcatgtttgttttcatctcaatagaccccagcacaaaaaaatgtcatactatccgctcaagcggactcattgtttgaccaaggacgattccatcaagcagctgccaaatatgccgcttgcacaaagagtttcgaagaggtggttcttaaatttgtcgacgctgaagaaagggatgcgcttagatattatctgggatctgttctagacggcttgaaaaaatcagtcagtgttctgtttctttttccccctttaaatattgcgaaaaagaaagttccaaagtcggagctggaattgatcacaaggcatgcgttgtttgctgaaacccgccttggccaataggatttaactcagcgactgatgctcgctacttggcttgtggagatgtatctgagtaaatgcaacactctggaggatggtcagtacctcattgcccctgactaatatcggaagttttacaactcgtgttgaccttcatgattctgtcgatcatagtggtcgcggcggagattgcttcccaagatccggaaagcttgaagcttgaaaaaacgatagtcgaggatgaactgaagcagtttttgctagattatcaagtatgtctttcgtccagttcaattaccactatcgcttgccttgactttcttacgttttgcgcttgccatctgcttaggaagcattcgatcggaaaacgacatacgatctgttccttagtcatggtcgaacggatttgtacattcattttgcgacaatcgtcagggactatgctagggttgtcgagtattggattctagaggaagaatgggtgaaggccatcgaaatgttgaatcgacaggttcagtcctttctatgtttctttatattgagtatttgcaacagggctgattcactaccatcacaacaattgtctgtgtacagaactcaccagagctatattacagattctctgctgtacttatgcataacgctcctaaggaaaccgttgattcttggctccgtcaaagctcactagatcctcagcgacttatccctgccttgttgcagcagcagcatcgtcgacgagatccaatgtcaacaaaccacgcgattcgatacctccaccatgtcatcttcaacaatggaaatgttgatccaacagtccataatctgctagtcactttccactgttcggacgccaatacggatgatggtccgcttcttaggttcctctcaacctgtccggatgatccggtaacggagaggccgtactacgatctagattacgcactgagactttgtatggcacattcgaggatacaaccatgtgtactcatctattccaaaatgggactctacgagagtagtgtagatctggctttggagaagggggatcttgagctagccaaggtaaacgcggacaaagtcctcgaggacgatgttctaaggaagaagctttggctcaagattgccaaatatgttgtgcaggacaagcaggacatcaatgcgtgagtatcccctacttgttcagccgatatacgctagagtaagatatcttatttatcttcgacatcttacattttccccttgacttctactagtgcaatgagattccttgaatcaaccgaccttctcaaaatcgaagatgtcttgcccttcttccctgactttgtcgtcattgatgaattcaaagatgagatttgttctgctctggagagctgtggtgcccgagttcaagccctcaagatggagatggacgaggtcacgcagagtgccgaactcatcaaacgagacatatccaacttgcaacatagatcgttgacggtagaaccggatgagacatgctcgtactgtcaattgctattggtgaccaggccgttctatgtattcccttgtcgacacacgttccatgcggattgtctgatcaaacaggtacgattgtcaaagatctgtgttctcgatcatatcatcctgatatcgcctgacaactcatctttctgcttttgttctgaacactttggaacattcgatagatcaaggaatatgcgccggcaagcacgctccgtcgaattgtccatcttcaatcatctctcgtcaagtcatcagcatcaccctcggccgaactgacctcatcttccaacacactctctttcaacccaggcggcgctagaacgctgctttcttccgcttatgcaggatcttcattgactgctctaaatccgttcgctggagcaggtgataaattgagagagctgatcgtgcctgatgcattggcattcgcgatgggtggcagcggaaacgaaaacggagcatccgggtctagaaaaacccaaggcggaggtgggaaaggaaggaaagacggggagaacgggccgttgggctccggaaaagggcgtcaagaaaaaatcaaagaggaattggatgagttgttggccgggagttgtgtgttgtgtgatgcagctgtcgttcaggttgacgcgccctttgtggctgaaggtgagaaggaggaacacgcgtgggcactttgagcccgtagactttctctctttctcttcgttcagctctctcgatcatttgtcaaagcctctctctcttctcacaggctctgcacaactctctgtgatgaactttctcttttgataccctggaggtccaaattacttttttcaaaactgaacacaccgaaacaagcgcgagaagaagtaggaggagagtcgaacgcatccaataatctaaactatcaatgaagaggactgtggtgtcgctcttttccctttctttcttcgtcttcagtttttatgcatttctttctactcgattcttgtttacatgacgctctcgagcgattaaccctctcgacgtctataggtcagtttccaaagaaacccaaaagagatgggattgaatgggaatagatgagtttgagtatgtcatactagcactcgatcagaacaatatgcggaaaagacgaacctcggtgctgccctgacgatgttgtccactctaaggatcatctccgccgcttcggacgcgctagagacgacctgtcgcttgagcttgtaagattcggtgataccaagctttcgcatcgaaccaatctcgccaaggttcatgtctatttacatacaggtggaagaatggatgagtagccgaaaacgatttctgagtttaataggacgacagggcaattggccaaagatgaagaaatgagaaacgaagaacgtacccaatccggcatcacttcggccctcgtagtgggcggctcgcaatttagaaacgagatcagccgagtcgtatccagcgttacccgccaagatcgtcgggagctgtctgagcgccctagagaaagcctcggtagctatcgccttctttccgctgaccttcctggattcctcctcaacagcgttactcatcaacatctctgagcatcctccaccaagaaccactcgagactccttgacggtttgggaaagaacggagagggcgtcatgaagggatcgctcggcctcgtcgatcatctgggatgtggctcctcgaagaacaacagtacaggcctgaccagcggcgacaccggagaacttgatgagctgttgttcgccacaggtagaagagaataatctagtcagtctctcgttgttacagtcagccatcaccacaatatgacaaagaacttactcggtcctctccgatcataatctcctcgatcaagtcacactttccaatttgaataccattcaacttgtcgaagctactcatgatctctcctccggtgacgagagcaagtcgctcgacaccttcgaaatcggcgtgctcaatcgacatgattcccttctcagccaacagagactcagggtagttgtagatcagctgtcggttgacgaagcaagtgattccgtgcgcggcgattcggtcgaccttctccttcatcttttcctgtgagcggaggaaggggttcaggagttaggctagaaatagctcagatagataaagaaacacattaacacgaaccttctcggctcgttcgagctcggccagtttgccggtcccatcaaccttgaccctggctccaaagatcttgatcttgtcggtatccatcgaggtgttggcaatcatgattcgggcgttttcaattcgcttcggcgagttgacagcgatcgacttttcaaggatgaatcctgttttgcaaaagagatatatgaaacaaatttagttcataggataagtttaatatggaatagacggagtaaaaaagtaaaaaaaaaggaatgaacaaaccctcatcaaggtaggaatccgtgagctttcctccggccttcttgatgatctggatgtggtcaaggtcggtcgatccctactcggccatatggcaagatgaagaagtttgtatcagaacgcattctggcaggcagtggaaatgaaaggggaagatcaaaccttgagtcgaaggacggcatcgacggcaaggttggcaaagtagtccttgttctcagaaagaaccttggacgagagcgttgttcgggcaatgttgacaagatccgttcggaaggcggcagcatccgacctttaggtgtttgcaaggattagaaattagactcgctacactctctcttactgaaaaggttgactagaacagaggaacgaacgagtgatcctgggcagctccctcgagtgcctcgagcgccttcttgctagcgattcggaaaccttcaatgatcgtctggggatggatcttcatgttgacaagtctctctccctctctcagaagctcggaggcgaggacgcacaccgaggtcgttccatctccaacctcatcatcctgaaccttggagatgttgactaggatcttagcagccgggttatcgagcgagatcgatttgagaattgtagctccgtcgttcgtcactgtgatttcacctgtcgtgctggactctatatggcgtggtcgggagtaaaaagacaaagaacgatggttagtcctgtgtttttatttgtgaatcgttgaagagatagtagagccagcagaggagctcacgaagaatcttgttcattccctatgaatgtgtaaatgcaaagaaaaagaagagaaagcatgacaaaggatagcacatagcaatgttaaatcattagtttcggatagcttttgtactctcagcctatggacagtgatcgtccagcctcgcatcagagagacatcatctaagtgtatctctggtcgaccagaaagatgcagaggaagagtttgagaatgagggaagaggagaaaaaacgaacctttggtcccaaagtgctcttgacaagatctccgagagccatggctccgacgaaactgctcaatcgagcgttctctcctcgctcttctccggccttatgtgagaaacaggtgaatggggtgtatatgacatggcgagaaagaacagatcgattcgatatgattcgacgaagtaaaagaaccatacgagttcaaaacaggagaaacaaccgacaggtgtcagcgttgtgtctggacatatatgcggcccaaacggccagctattccaacaacctggaaacaacggcaaagagtaaagaaactgacctcgtctgcgaatacgttcatgatttagatagcaaagaaaacaaagagatgggctgcaaagacaacggtgagggtggatgattcgaggtgccggtcagagaagcaaagcgagtgggattgatggaggagatcccaaaaaccaggcacgtaaccgtcggttacggcatgtaatagtggttacgatcacctccgccgataagattgtgtcctctcatctgagaccttcatctaagactctgagaacatcatcaaccatcacatccaccatgctgccacactccgttcttgttgccttgctggctggaatcacagttcagatagccaagggaaaggatgaccatcttgtgtcctcagactatctttcatccaatcttcacaagcgacactgggacgaccagggaaactatgtgggcttacagtctattttctttcccgtctacggcttccttcgctttcgtggatactgatctctgtccgttcttgtgttttattcgagtctagaacattacattcatccatgtcaatgatgtacatgcccatctggaccaatacagagcctctgggacagactgtccgaccgatggatctgtaccctgcctagggggttacgctagaatcatggacaaaaccagagagatcagatctcaggtccaggacagtctgctcttcaacgcaggggatgaatttcaaggagtgaggagttttttttttgtttgtgtcctgcgctatccatccggtagaactgttctgatagaagaaacatttcttgcctctccaactcgttcagacgctcttctattctttctatggaccccaaaagatcgccgagacgttgaacctgatgaactttacattgggtactcttggtgcgtgccgttcagaaattattctgttctcttgattgagtttcaagcttatttgttattgtcctcttctttcactccaggtaaccatgaatttgataccggaaacgataccctgcttggagaatatttatgtagacactatttagttttttgtttctcgagaatcataactgtacgaccgttctttcagcaagctaaccattctcgttcctttttttacatctcctttcaaacaagccaacctgacctttcccactatatcgaccaacatcaaaactgaaaacactctgcttcgttcccagctaaagccctatcacttgttccctaaacatgagctcgccgttgtcgcgctcacaactgttgatacgcctgatatatccaaaccaggaaagggcacaacgttcggtaaagtactcgaggttcagaaaacggttgatcaacttttgaagaagggtggagtcaaacgggtcgttgctctgactcatatcggttcgttgatgttcatctctcgatgacaaggtagttactttaggctgacacacgctcctcgttcggtcatcaatcataccttttgtgcataaaattgcataggctacgatcaagatattgaactggcgaagaactccaggtatgctcccatccatacaacccagacgtctcctcgttgtggtgctcatattagaaacggttgtcttctctgacgtcaggaatattcatctcatcattggaggtcactcgcatactccgctcggaggagaatcttggtattctcagggcccttatcctactatagttcgaaatctagatggagaagaagtctttatcgttacttcctataggtccgtcaccatcatgcttcttgctctcctcatcgtcaactgatcaatatctgtttcctatctattggccgatgaccccacgtcattcagatggggagaacatttgggtcgaatcgatgttgcgtttgagaaggattctggaaaagttcacgcttacactggaggagctatcaggatgacagaagacttcccgcaaggtaaggccagatattggttactgcgtcatgaagagttttcgtagtgaagtttgcgtctatctttgctttatcactgtttaatctttggaaaaaaaaaattaacataatatgatgttgatagacaagagtcttcaaaaactcattacgtcctggcgggagcctttcgaagaatttgctaaggtcattgttggacaaacagttagagacctcgaccagcctacatgccaggtcaaagaatgtgagtctattctccgatctctgctgctcgttgctaccaaattgacgtctttatacatgtcttggataaccttcgcggaactggcttgaaggcaatttgggaaacgccgtgaccgactccatgctctagttggttttgttttgcttcgctctcgactcgctcgaattttaagatcctgatttgttctactattctttcccctgcttccgtcttacaactacgcgacgcaaacaatagcggccgacgatctttgggagccaaagtcgacgcagcgcttcacaactctggcggacttcgagctactattcctgcacccaacatcactcaaggtattctaatgacgtctttcccgttcaacacccagctagtcgatatcaaatacacaggaaaagaactatgggagatctttgaaggtgtctgcagcggagtaaacagcgtcggcaaggtgtgtcctcggatatttcatgtatgatcttgaagtttcgtgctcgaaaactcatgtgttgaaggtattgggttttggggggagtgactatagacagtgacgtcttccgttcaggtcgctggaataaaatacagttggaatccgaagaatgcgcctggctccaaactgatttctcttcagattggatcgcccgaggtggaagacgtcgattttgaaaagacgtacactattggttcgttctccttccatttattcacctccgagtccctatttgtaccctctttcttaatctctttttctttctcttccttcttggcgcaaacacaaaacagtcactcttgatttcttggcaacaggaggtgattcgattcttcctcggcctttcgagaagtctccgccacctattgcttcccaggatgaggtttttatcgaatacattcgtcggttctctcctttggacgtcgatgttgaaggccgaattgtcgtgacggacgaggaaactccggaacatgagttaggacaattatattggcgagaaaatacagaggtagacgcagaggaggtcacgctgaagcagagtctgaaatccatttgggagagttggtggagggggagtatcaagttcgccaagtgggaatgagagagaacagatccaaagattatattcttgttctctctgttgcatgtgctagcacatcgcgtctcaatgttctttcattctttccctcgtcctgggttgctctgccgagacccttcttgttcaccattccacagcgggttcacaactggttttctatatggatcaccgggtgcgatgaattacacaatcgatatgatagcaaacggatacatgcatatgtaaagctcgactcccgagaacagagagcctcggtttcggaagaagataatagagaatggcagaggacatatgtacaaagccagatgagatagttaagaacgagaaggggaaacagaattaattcttgtagccgtctccgaactccccttttgttcaccgagaagttttgcgcgtttaccaagaggcaaaaaaacaaatagtcagtgtttcggccagtgacagtatcgaggagataagacaaagaaatcgacgaaaagaatctcacatcgataacaatccacacaatcatcctctctctccggtctcggtacaggcagtcccttcttttttcctcctttccctggcttattcgtaccagggtcaggattaccgtcagaggagtttgttggagggtctcctttttcgggaccgtcaccatcatcccagtcaacgttgaggatcctgttgatcacttctccaatcctgttatgtcgtttcaaaggaaggttatgagagagacagattttatcaacaatccactcgtcgttagccgcgcagctctcgtcgccgacatctcaaaacacaaagaggctctggtagaggaaaataaaaaagaaagtaagagcgacaggacacacctatgagtccgaatgtcaaccgaccatcctagtttatttactgtgtcgtagagaattgtttctcctagatggcatctagcttctaatgcgaagcccgctacatagcaagaggagagtttgcctgtgcaggttcccattgggatcggatctaggttgccacaaagatattcgatcgtcagaagtttaaacgcgagggagggaggaaaaagaaaaaagaaaaannnnnnnnnnagcagatagataatggtatgaattcgagattaaggatggtggaggactcaccagctgtatgatagacatgcgttaatgcgccgatctcgcctttcttcaaaggaggcggtaaaggtaagtgcaacctctcggccgccattctatctcctggactctcgtaagctactacgggtgctccgaacgtggtgccaatgagtgaagccaatgcgcctccaagtgagtggcctgtgagccaaatgttggcgtgtggataaaggttcgaaatattattgtataaattcgtcctatatatgtgtgtgcgtgtgtgttatatgaagaaaggacagtagttgagtcaatcgacaacaacagatataaacgagaggagaagaggacagacgcgataggatagtaaactgattcctcgatcaaggccttctcaacacacgtctgttcgcacttccacccaccagcatactgaaacggacagattcagtattcctgatcaggatctctattctaagaacaacagtctctgctgaaatacgactttgatgaatcataactcacgcagtcacatactgggaaccacgtgaaatcaacccgggcgcaacagcacctgatggaacgcagagcatagcttcagaacctactggccttttttatcgttctctgacctgatgtcaaagacagatcaagtgagaacttacgagctaccgattcatatccggatgaacaatcccaaggtgttgtggacatcagcagatgggtgtatatcaaaattgatgtttacacgagaagacttacaacaaaagattatcgttgaatcgatcctacgaccctcagaatgattccatgcaagttcagagaggtcagagaaatcaaccttgactgcaagaacctcaatatgaatctggcacctgtggtatactcacgttcttcgccgtcggtccgcctgaccccaagagtcctgcactcgttcctttgagagagatgataaccgtcgaattatcgtccgacgcaaagatatgacctcgaagtctatccgcatctggttcccagcccaccgggacagactgacaagccatgatcaacagatcatatttatgaaatcagtttcgacgcggatcggttgatacattgaacgttgagcggtataaggatacgcacggtattgtatccatcgataggaaaccattcactatctgaagggagaacatacctaatttgataaaagagccatgtcgtacagaaatcgatatcagcgctcaatacttcactttcgataataaactaaaggaaggtaaaggaagaaaacacttgcgcattcgacgtcatcttcgctagcgagctcagcgtctccctgtccgtcacgtctagttttgagcaagagagaattatgaaacgagtaagcccatcaatcagtctgttcggagatttctctccactcttgttcatcctttaacagatacacataggcggggtttgagacataccgggtccttcgacttctactccttcccactctaagtcttggtctatcctactcgtccttgttttaaatcgagcggcctgatacgtttcctgactctttggtttgtaaacttttaccttcctagttctgactatcaaaggatctctacttgatgttgaagcgaacgaggagggtgaaagagtggtagaaaggagaagagcagaaggatcggttggatggtgggaatgatgtgctcgaagtttaaatgatacatgtggggattgaacgcttgttgctatcggctgattaaacagaggcagatagctcaagattccttgaacaagcgatgaaaccaaaaccatcttgaaggtgagttcgaatagtgctggtagtgttggtgatggtggtggttgttaatctgactggatggacaagcttcgacgggcaaaggcgaaatgatcgtcatcaaccaaagtcacgtgtcgcatcatctttccataaagacatcgtcgagataatatctagtcgagacagatcagatgcagcctggtaggtcgcgcttgtgcgatgatcaatatgatgacaacatccatcatgtgaattcttgggaacttaatgaagaaagattcatgaataaacacgaacagtggaaagagaacgatgataaggatgaaaggagagaaggaacattatggtcgtaagaagaaaaaacaatataagataaatacgaaaataaaacaggtaaatacaatagaaagggaaacgaagtgtgctgtgggatgaatggaagaacatgagaggtcaatagtagcacagaattgatggaaaggaaaatataaacgtatggctatcgataatacagctgagtagtaaacaaaacaggaagatcattgtgggtgaataagtgttgtccaaagaagccaaactggtactcgttgcctgagcggtcaatgaaggtgagggaaatacatgctcaaaaagaagagttgtgaaatagaattcaagccctcagactgattgcggtccacatttcaagacggcctgacgtttcgatctgcatatgatgctcttgtgacttcctgatagtcaaatctgaaggcggaagagacaaagtgatgctattggttcactgtccgatactcttatgtcgggaaagaacctcgactcctgcacaaagcgcagttgtcctgcgcaaatatcgaaaagaaagaaaaagaggtaagacttcagctcgttctgaaatgttgctcattggaaatatgaagatcgaacgaacctggcttcctctgccaaagcatcttcatcctcatcatcgtcgtcgtcgtcatcatcattgtcatcctctccatcctcctcttcgtcttcgctctcgatctcgtcgctaaggcttgagcggacgttcccagctgcaccagtgatcggcatcgcgcccactgctgagtgcttacttcccttctcatcagcaacggtcgacgaagcgtggccttttccagggatggtgattgcctggattttatgcatgtccagggtcgaacccgttcgactgggccttggggtaaatgcaggcgtcgagactttgctctccaggattggtgtcattcgctgtccatccggagtagacgtcgaaggagagggtaacccaacaacctgctgaaggggtgtgtcgagaggggtcgccggagcggaaggtggagagaattcaatatttggagaaggagccaacggatcgatcgaatcctcgattgagctatttgtttgggtggccgctcgttggcgctcttgttcttgctcctctcgctctcgctcgagtcgtcgccgacggacccagcccatacctattgcgtcaaaaaagctggttcaagatctgagtcgtcagaaaaacagaaaagaaagcattataacttaccagatccgtcgtcgtcctcatctcggttgtaattgttattccccatatcgcttcgtccaccccactcgacaaattcagggccttttctggcttcttcgtcaacttttttggcaaggttcattccggcgacgccgtaaatcttcccgttcaacatcctcgatcctgcaaccgacgatcgagggctggtcgataaagtgtttctttctggaagttcgagcacgttggaagaggctcgtcgctgatgatcgaatttactaggtgaggatgtggcggccgaggcagagatcgacctggagagaggttcaccagtgttggatggtgagagactggcgagcaacctagagcttttctctgacaattgggtcgacggctcgtgagatgttcgcctggtcaaattcgacagcgttcgagcaaggtcaagactctttccaccactagaatcagactccatcgaggccgttctcgggacagtgttctttggcttgaacaggtttctcgtccccttccaggaggaaccgaggatgctacttcgacgtctgccgtttccttcgtcatcatcctcatcggtcagaccgctcccgtaggacgatctgacagatcgcttgtagatatcagcatcatcatcagtagatccgtccggctgagataccccgtcgtcctcttcgaatactgggttgtcgtttccgaactcgcctgagaagcgctcagagtcagtatagatggagtccccagtggagagacttcgggaatgccgtgggtttggtagcggagcaaacgagatctttggcttgactgacgatgggaatgaggctgatactttcgaactcgacggggatgatccgaacggctcggaaacggagggagcggtagtattcggactggcttgttggatgtgtacaggttgagatgcgaaagagcttccgtttgaacgtccgggattgaagatctgggtattgaaagatgaatggagctggcgaatgacgatcgggaatgattcttgggtcagcgcgcatacttcgaaggagacataagcatttgtgaagagaaccgagctcggtaaagcaggtcggcaaggaaggatgtgtttggtgaacgattcccgagagagattcccttctgctgtctaacgagacgatcgatagaagaggagatatattcactcacaaggattcctccctttcgaccatgggaagggaccgtccagctattagcaggcgtggccacagacattgacgaacgtaatcagagagagagttgtgctgagatctgagaggaggaggatagggagcaaggagagagatggatgatgatggtggtggcgaggacaataactgcaagcacagggctgaacgtgatgtagagagaccttttgaagggagatgacgagggtagatgattgagaacgtagtctaaaaagaagagatcgcctgtgctggtgcgaggcttaggatgccaaccaagccaagagaatctgaacagatgctgtggtctgggggaggtaatttaatgaacgggggcgatgaaggatgattaggtcgaccccagatatgtgagatctggcttgtcgataagacgaaaagagcaatcaagatgtcagctacacgagatgaaaccacgaaggcaagatggatgggtgctttgatgatctcgagtgttctgaaactcttgatctttgtccgatagactcatcggaccgatagtcgatcttccttccttcctcattccctcactcactcagtcactcgcataaataagaagactcacgttggatgaggtgctttgtgagatgtatgttgtgttctgtgtatgttctgtgtgttcttgtgttctttgtgtatgtatgtgctctgttggcggtgctcagatccataacggccaagcaggaacagggcggaacgagattgacgggtaacgaggcgccccatcaaggaacaaggcagaggaaaggttctctccccgttcctgtttcttctcgaaatctacatgtgcaagcggcgattaagcggtcctgcacgtcaacgcgcgagatcttgcaggtaattctgcataaatatagatagcttagcctggacttccgatcggtggccaatcaagaacaaagtgagcggacaaaatcgggcagtgctttcgagtgcctgccatcagacgcctctgctcgcgcgctctctctatgtctcctatcttctcctttttttttctttttttcttcttctttttgattcttggcgctttgcccgaacggctctacacagacagtcctgctcgaccgcttcgctcgcttatcctcttgacttaatctagttcgatcaccgtgctcgtgtcgttcagtcagctgatcgacgaaacccgcctatttattctttcatttgtacatagatcttgatgaagaatccttttagagagaaacaaaacacccgagttcactcttgtttgtatgaacactgaaaaggaaagcgctaaagaaagagagaaagaaatctcaaggtcgctctgaccaattctatcccgtgtgcttcttgctcgcaacttggacagggtatgatcattaaatgctcagcaagggtatctaatctattcgtttattcattacagattctcgctgtcgccagtgtttagctctcgagtccgactagctttctcctttggacgatcgactcctctctagtatcccaactttggcctcggccgtgcctaataacctgttcaattcgagaaatgcatctgacacattcgagacctgttttcccaagatatcgatcgaatcaaaagccggtttgaatggataaaagagagagaaaaaacaatcgggaagataacagaacgggtacaaaacattagaagacatcgacgcctcatctagaagaataaggaaagttcaagaaaagtaaacactcgcatagtcatcataccgacctaacagatcgatcaatcggttctccaacaaactgatagattccgaactttcttcttgtctaggaacgagctcgcttaatcgaggtaacagtgcatggtgcgctagaataccatacaattttttccacaaatatgtaaacaaccggaagtcgggttcgatgttcgttttggttccgtcagttgatccctgggggttttctttcatggaatgtacgaaaagcaggaaaaggaggggaaaaagaaagacataaacagaaggaacctacaggataaatcaccagcatcgaccacgcctttccgatccagtgcttcaacctcttccagacctctcgagaccgacttaaagtcatcctcgctctccatcagcaatgagatctttgtgtctatcgataggacttttgaatcggctggactcgcgttcaggtttgagagtcggtccagggagaaaggtgggcttagcagatttgcgttttgctcgtcttcgatcatcaattttgtcgtcgatattatcccatcggtccacaagtcatgattatatgaatagaatatttgaggaaaagttcgagtcagatgatacagaatttaacaaccgaactgatagatgtatatgatggagaaagaaaggaacgtacagccatcgacaaatcgttccagactagacgtcccatcgacagctctgtccaatgcatcctgaacatccatcacttttctcatcagacccggtccagtccttccatttgacccattcaaaactctttgatttccgggcgaggaggaagaaccagaaataagatattcgagaagtcgaacccgaagctcgagtgtcgtcagcggagtgatgtcctcagctcgggcttgtccaatctcggacggatgatatataggtgtcgtactatctactgatacagaaccatccgaatacgtggtcatggcttctgttccttttgttttggagttgagatgaagatgtaggcgattactccgggaaactcgggtaatggtggtgatgatgatgatgatgatgacgatggccaggtaagatattggaggccggtgtaatcataaatggaaagcctggaggtgacgcgtgatgaagcgcaaaatgtcaatacgcgtttcatatcgtgtcttgctgtggttgactttcgtcttctggtcttcatggatgcacaaaacgatgcctctcctttctctctctctctgtttctatagtattataggagacgaaagaatgacatgatcacattataaaacacaaatataacctagagatcaaaaaaattgaactcaatgaaggaaaaccaatgaagcaaacaaccaaaaacaaaactgcagagcataaacgacataaaacgatatagaaataactgaagatattgatttaaaaataaataaataaaaaggtcaacattaagacacccaaaagaacacgcatccgatcaaagttcttttttctgtttttccctgatggccttgttgtgagcaacaatgtactttccagattcattttcgatctgcttcttcagttctggtcggtagtcgaaagccaggaacagcacctcaaagaatgtgaagaatggtgcaaggacaagcgctaaggttgggattttcgatcaggaacgatgaacatcatcaacgcatgaaagatcaattgtgggtctcgatgaaagatcaagatcacctaaaaaggcccaatatggaagaaagacaaacctcctacaaggttatcaagcaaagcaggcgctttgccttcaaagatcttatgcgaaacaatctgcgcaaccctacatgatacaatgaaagaacggatgttagtacgttcaacaaggtgggccaagatcccatgttcaaatctcaccaggaagcgacgctgttcgaaagaaagacataaaatcgaatgttagttgatcatgtgagatgctggacttgcaaacaaaactcactgtaggatcagcattggataaagaacctcgggcttgaaggcagctaatccggccgaggttcctcccataagcacgagcaggggtaaatacaacgtctactcaatgcagagatcattccgtttagagagaagcacactcgattagttagttaaggtttcgaaagaggacaactgtgacagatacatacggccgtctgagcatcaagcgcaaagtaataagctgcatagagaattgacacaatggatcctccgctgagatccaatcggaacggtaaggccatcccgatgtgattcattgtgtatggttctagtaggagcggtgagggaaagattctagacatgaaaaacatatatgtccaaaagatcgtaggcacaaagactacactgtgtagcgaacgaggatggatttggaagtgtggtaaatatgtagcaaacgcattatcaaaggcaaaagtgaaagaatacccactgaacggccacgtttcgtttttctgaatagtcaaaagatatcgagtttcgtcagcttctatcgaagcaaagggcacagaaacaggccgacaaacctgaatggtaagccccactgaggataaagaacacgagagggcaaggaggtaagaggtaccggagatcgaacaagataccatcagaacaagattcaaatagagggatgctggttctccaacaagagggagaagaacaagaaaaaaaagaaaagaacttgctagaatcctagttgcttctgaaggttgagaagatccccggacgtcatgtttgatcgagttgatatgagcagagtgtaagaagaggttgtcgtaagagacagaggcgagtaacgatgagcagcgcaatgcggtgtgaagtaacaagctgatgaagagatccagcacctctatgctttatagaatcaacctttgaggagggtggatgtgcaccttaacctcatacggtcatctgtcagctctctccacctccggcccgagagattggtccactgccggaggatgtttcgaaaggtgttctgattacgtaacacaccgcgcacatttcacccgacatggctacgccgtgcctgaacggacacaggaatctactgaaggcctggttacgccccactcgatttgccccaacgcataggatcggcgatatcaggaaaggcgggttcttgatttgatagcaaatttagataacacatttatttgaatgatttcatgaatatttaattggttttcgctccaattttccctcttccccactcttctcgatctcttttctttcgctggcggttcgttatttctcttattccatctctttctcccccttccttctctttccttccttccacccgactcccacgaacgcttgtttctctacaaaggcaggtttcttcctctcctcccctttctctctatccagttttcagccatggccgtcacccagcgtccagtcagtgcctccgatgtgaccgagaagtatgaggctacgaccgatatggagcacacgaacgagaacaccttcatcgttcctggctttactatcaaagagtaggttctctatcttttctgctctctcgatcttcgtatccatttatgatgtcttcaatgctcattgcaaacatgctgatttgacgaacctcctttcgttccttaatttttctctcgcctcaggcttcttggagccattccgtgagtatcggtcgaatcggccctgagtccttcttgttcgatttattcctcgaaaagtggccgccaagactgaacccaccgatcaacctttgctctatacagtgcagagtgcttggagcgatccgccctccactcatctctgtacatgtaagtttcgttcgacttagctttgtcggcagctcgattatctttctgatataatcttgcgttcttaattcttcttggaaccactcagcgttcaggatgtcatactcttggctatctttgcgacttttgctgctcacatcgacactatcgtccaagctgtgtaagtccgcacccatataggcttcttgatgttaccgcatatcttccagcattagcacatgtccttaccatacctctactctagtggtcttccccactacggctctaaagcgctctcattcgctttgtggaacgtttactggatagccgctggacttgccggaactggtatctggattcttggccacgagtgcggtcaccaggccttctccccgtccaagacgatcaacaacactgtcggttgggttcttcactccctggtcggtgttccctaccactcctggcgaatctctcacggtcgacaccacgctgccaccggacaccttactcgagacgaggtgtttgttccccgaacccgaactcagcttggtctccccgcgtttgatcccacacaagagaccttggatggatcaaacattcggaaggaaaagcagcttgagctacgagaggctattggagacgctccgatctttgttgctctgaacttgttggctcagcaggtcagcacatgagcacatccatacttactttcgtttcatgcaaaatctaatttgactttcgttcttccttctttctatagcttatcggttggcccatgtaccttattcgaaacgcctcgggacagaagcactaccccaagttcaccaaccacttctcgcccaactctgtcatttttgataagcgacattacaggcaaatcgtcgtttccgacattggaatggccctctttatcggtgctctgaccatctggacaaaataccgatcgttctccgaggtcgtatcctactacttgattccgtacctttacgtcaaccactggctcgtcgccatcactttcctccagcacaccgacccgttggtccctcattacgacaacgacacctggacgtttgctaaaggagccctaactaccattgaccgaaactgcttgagctgggtcggaccgttcatgcttcacggtatctgtgagactcatgtttcccaccacgtctccagcaagatcccccactaccatgcctggaaggcgaccgatgcgcttaaaaagttcctaggaccccactaccagtaccgagatggaaacatccttgtcgatctctacaagaactacagggactgtgtatttgtcgaggacaacggcgctattagattttacaagaaccgatccggtgtctgcaagatggtctccaagtccagcggaaacacttccgactcgggagtcgatgtttctgaggagtctgtcaagaccaaatagaaaaacactgaatcatgaacaactcccgatcaagagaaattggtcttatgctccctcctcgttccttttatccgcgtgcttcttcgtatatcttgttctcattcgttctttaaatattcatctatcttttatctcttggtctcgatttggtctctcctttttgtctaactttcgtcgcattcctttctcctatgtgctggtccgtttcttaacgctttttcacttataaatgtcatcacggtctccacacgtacacacttgtctgagtttattctttttatagacatggcgaaaacggtgaatttggtcaaaagtacatgaaagtagcctcattttcttgaatatgagaaaatatcggaaaacttagtaggagagaggagtccaacagttctcttgtcggatgcttgctccacaagtgtttcattttagcgcgattctgacatgatctaaacgaaacgagatgtgaacctcacgtgacagatgatggagcatctcatcatcttcacatgcataaagaaagagccattccctatgcacataacgaagagatagaaagagaaaaaacgtttgtttgatagacttgatgaatgggtgaaggaacgaaaaaagaagaaagggaataatagaaccttgaaaagaagcccggaagaaattgttgagaaagtaaaggaactgaaacaaaagaaaagaccaaagacgtttgcaacggtagatgaccggagttctaatcgggggaccggagacaacagaaagatgggttgagtttaaagaggagatgtgtcaagacgggagagcgacaaaagatgagtaaagacaagaagaggagaaaaaaaatggttcaatcgggtcgagtttggacggaactcgatccgaagtgataacgaaagaagaagcttgaatgttctatagattttcttcggaattcccttccttccgaaagcttctttttcttctctcttttacataacaattcgaggctcggtaatgctgctggagatctgttgattggaaggccaaatgtgaaaataaaatatggtcagaacgttcaacgactcaacatgacggttccaaatacacttacactcttgtgaggaaggacggaagctccgttgacgaagagctcatccttgatggtgacgtcgtctccgagaacggtgatgttctcgactcgagtccatcgaccaacaacagagttccatccaataatggagctcatgatccaggagtgctccttcactttagcgttagccatgacgacacatcgctgcagacgaacgccggcgccaatcttgcaacccgggccgataacaacgttggggccaatcaaagcggtggggtcaacctcggccgtagggtcgatgaggacgtttccaccgttgatccacttctccttggggtcggtaaggaggctcgacgactgagcggtcaagtgggagaggtacaagcaagtaccggtaaggtaatccttgggctgtccaacatccatccagaaaccctgaagatcgaaagcgtgaagctggtgctcggcagcgacctcagggaaaatttccttctcaatcgaggtaggcttgagctcaattcgatcgaggaccgaggggttgaagagataaataccggcgttgattcggttgccgacaaactcgacaggcttctcgacgaatcggtcaatcaccgacgagttgggcttctggacgacgactccgtacgcggagggctcggcgaccttggtgaccatgatggttccctctcctccgtgagcaagatggaaatctctgtagatggaaggccacatcaggtcagtatgaaaattcaagacaaactaaatctaaaagaccgttgaccataccggaactcctcgaaggggtacgagcaggtgacatccgagttgaggacgaagaaaggagaatcatccttcttaaggatctcccgggcgagagccaaaggtccggctgtattgattgtgacgaaagttccatcataaaggtaagtttctggagtagttaagacaccgtacatgctaaaggagaaagacagaccagttcccaacggctcactctcgacagagaaagtgattttaataccgtactgagcctcagtttccttgagcatggcaaccatgacctcaggtcggtagttaacagcaagaacaatatccttgacaccggccttgacaagagcctggaggcaagagacaggagaaacgcatcagtttaagatagcggagaacataagtaggatcggagaagcatggagcgagaacgcacctcgatctggtgaagactgtcagggcgatcgattcaagatggaaagggaacaggaaaaaagtaagttttggatcgtttgtgacgcggatcttgctatcggagtatgctgattcttacatcatagccttgttgcagactgtgtacaaaaagtgtagaaaacagtgtcagtgggatgctgatataataggcaagcgagatatgacggatggaaaaactgacactcgaccaagggcttggggagagtgagagtcaaaggtctcaacctggttccgaaacctatcgaaatgggatgagcatagaaaagttagaaaaggatgtttcaagatgcagtgtatagacaaggcaggaagagaccgtgacgaacctccgacaagaattaaagcctaaatgcgacagaacgttcagtcgagagggatcatcgggagggggaaattcaaaacaagaggaaaaaggtggggaaggaaaagagaacccgaggcgacaaggacgaattgcgattgcgattggatcggaagaagccaatatggagatggaccatccagaaaagcaaaaccaggttattattccagaggagtacgagtgtattagagaaggagatacaataaacaaagcgggaagagtattagagatgggagaggtgattgaaaaaaatagaaaaataaaagaaagccggcaagcgagattgaaccaaaacaaacaatgacaagcaacccagtgagcgttgatcttcaaaagcattccagagagtaacaggaacgaaccttcatgatgtaagagagagaagaggagtaaaaggaaaggaaagagaggaagaagagagagtgggtggttggtagatgtcaagaagaaaaagaagagaaagaaggttaaacctgcaaaggggacctacaaaagcgggagggaccgaccgagaccaagcctaccgggtggttacagagatcccgaggtacatccgcagtcaggcacagcagaggtgcccacgttcgccttgtgcctgtatctgtggcgttggtgtgcacgtgaagccttccgtcaagactgtgcaagtcccccccggggctctctctcccttccttcccccgttgcccggcatctctggccgcgtcggcattgagagaaagatctcgctttgatttttctttaccttggtcatcttttttcttttcttttttttctttctgctttctcttctttcttcctctgctggctcttcgttcgcacacacacactcaataaacctctcaaggccctccatctatccatcatgtcctacgcgacaacacttgggcatggccatgaaactatcaggttcagaggcaaagcaaaagagcccaagccagatgcagatggtaactttacaaagcctaagcgatgggtggacaggcacaccactctgatggtcgaccaagtcagaaggtaaattgccttctttttcgttttcgcgcccgtccgtgttgctaatcgctttcttgtcctttttatcgctccgacggtcggtatcagatctgctcagccgccatggattccgtcgctgtcgctcgcgttcaggatattcatcttcataagattcacttcggccatgtacactggaataactgattgcgacgaaggtaagtgtgacgtggtgttcgcgcggaagggagttcatgcatatatgcgcatatactcaatactctatatgcttcgtctagaaagcttcactttcaatcggtattgatctatcatcgttctttcctcttatctgtcttgcctctgttcagtcttcaatttctgggaaccgttgcattacctttcgaaaaataccggatttcagacctgggagctctctccccagtacgccgtcaggtcatgggcctatatcgcttcgttccttcctgccgcagagatcattccatactacatgaaccttggaaaggtcagtcctagttccctcctcctcttattctgggttccttgttttcgacatcggccgttcattccttggctgagcacctaccttggatacatcagcgacaagcatttttctgtgtccgaatcttccaggcgttcttttgcgcttatgttgaggccaggttcttccgagccatcgtccagcacgttaatgaccgggctggacgatactacctgttcaccatgctcttctccgccggcatgtggaatgctgctacaggtacatcttccgtcttggttcttttcttaatttcattctaccaaacactcagctctctcttctcgtttctatcatacagccttcttgccctcgaccaccactctgcataccactctacttgcctattcgttctaccttgagcccaccgcttcgaataacaaccggcgggtttacctagcaaccttcttctttgcttttggcgctctgtttgcctggcctttttccttgttgcttgctttgccgttcgtagcggaagagctgctccttggagggaacgatctggtgtttgccgacggaagagttgaatggctcactggccgaattatcagactcatcaaagctggtcttatagccagtttaattgccgtgagcacttgatcactcgacccgtcactcgttcgtacgccgctgatcaaatctccttttatcctttttcgagaatagatccccattgtactcgtcgattcgtatgcatacggtcgaacgacatttcccgctctcaacatcattctgtacaacatcttttccactactggcggttcccccgacctctacggaacgtctcccgcctcattctacctccggaacttgttcctcaacttcaacttccttctgcctcttgctcttctctcccttcccgttctcgcgatcacccatcggttcgactacaagcggctcggctctaaacagcgaaaaccccaggagggtgagaccagcgcttacgccctcatgttcggcaggctctccggcttttatctttggctaggagtcatgagctggcaggcccacaaggaggaaagatttatgtatccagcttatcctctcctcggtttcaatgctgcagtcacattattcttgctcagaggcttggtcgagagggcatacatcaaggttaccaagagtccctacagggtatggcgcgtttgctcaagtcctcttttaccgagacctcgctcatactcaccctctcttttccttgattccttgctttctctcgattaccttcacaacaggcctcagaaactactctgtttgcgaatttcaccttgttgttcactctgggcacgatgatcatctctgtctcccggatatttgccattcagacatactatgttgcgcctcttcgaactaactaccacctcgaatacaccgagcttcctcttctgctctcgtctctcggacatgttcccatccaacacaacggcacgaacgactgggacgagtgggatcttcgacctatccaagagcttaaccaaggtgccggtctaagattatgctacggaaaggagtggcataggtttacctccagctggctcaccccagacgggatcgaagtcagatgggtaaagagtgaatttgatggagccttgccaaagagatgggagccgagtcaggaagttctcggtggttggtggagaagacagggaaccagggctcagaccgaaggtcttaacgatctcaacaaggaagaactcgtccattacgttagtgttcctctcttactcttccgcccgcccgcgttctacccatgagtagatcagagactaatgtcatgctgttgatcttggatacaggtcgatccatcgacatgcgattactttatggactctaccttccctcttcgaaagacatcctcactcgagccggcgtacacactagacgccgagacttgggaacgactccactgcgcacccttactcgatgccgagaactcgaagaccatccagagagcattctgggccccgggaagttggtggggtgcgaatgatagattggcttggggagaattctgtttgttgggaaggagaaagggcagggacgcgttgagagtcgattgagggggaggttaacgaatcaaagaaaaaggaaaggtaggaacaagaataaaggagtagtagcagagctttgcttaggcgaggcaaaaagaaacaaaacctagaatcattgattcattccaagatggaaaccaacgaatgtgtgttatatgatgtaaacctcctgttctcctcaaacatatgtgatcggcagataaaacaatccattctgatctatttgattttggaacatgaacgacaacacgattgactcaaccgcaatcatatctcttgccgcaaccgaggaagacagaaatcattcctccatagtctcagcttctaaagcctcgaggtcccatcctacatcgtactttgagaactttgtagattctaactctcgtcccagttcgatccacgtttgatccctgttgggacatttacgaagaaaacaggaaagaagaagaaagcggagaaaacatgaagagatcagacgttagatctcggggtgaaagatgaatccagaatgggaaatataaaggggaaaaaaggcagggcgtacaactgagtttgatttatgaacgtgcaaagatcatctaaccaaatcttagagaacacgttgaaatcggcactatcgtccaggattctttcatgattgagccaacatcacgtacatcagtactttgcccgagaagagcaccgaaaggaagcgcgataaaagatggtcagagagagggagaaacacacttcttcattcctagtaagactcttagaacccgtcttcttccaccggacaggacgacttgcacgtcggctctgaccctctcagctaactcccaatgtctatatagtggccaggccaccattctcctcgtccctactcttaacgcttggtgtaccgtttggatagatccgaacgaaacaagggatgtaaagaagggcaggagggaagtcaacgtccatggtgattcgggagaagggtcagactgagtcgttcgggtctcgtaagaggccgagaggaggaaaagaaggactgtcggtaggagtggactagacggaagagatgagtctattcccaaagatttgttagacgtcaaccaggatagatacgataggaaacaagatgaaatgaagggaaagagcgaacaatcggttttcggaagagagaggatcagttccttttcctctgctgagaaatacgtctcgtctgtcaagaatctcggatctgattcatccatcaatggtgctctccaatcaatgatatatctgatctcatcgttatatacaaagtcgcctcttcatacgtgtatattccagcagcaaggatcagcaccagttgaggaaattgagcaagccattgtaggcaaggtaaaagactgactgatattggctagcgtcaaatttctcatcctctgccttcatggacctgctgaaccgctcctcagctgatacgttctcgacatctttgccaagtccgtcgagttcttcaggtagagaacttccatgtttgaacaatccagaataccggtcgttgaacccgtaagggtaaacgggtagaggtgctggcgcagggatgatgtttcccgttgttggtgtttcctttgggattgattgaggaagcctccatgagtttgcctcagctaggtagaaagtacaagcgatcagcgaccatttcagctgctcaatccaaaaccgaaagcaaagatccaaaggatatagaagagagcgacacctaccagctaggaagatctctcgttctttcttgagctctatcagcctttcactttcttctacgctcaacccttccagattaggcatctcaacctctacgatctttgcttcctttgcctttcccttgttcgcagtgtcctgtgagatttctcccttctcgccgacaccaaggagagcctcgatgttctccagcccaaggaacgtctcgcccttgttcactttggatagctgaacagtcaacatcccggacgaagagtcatactcagcagaggcactatcatcctcaagcaccggaccgggaagatgtaaccggagaaagaaaggttctatgtaaagcgatacgtcgttctctgtcgtgtgaatttcaatctcttccggctgaagaataagtagaaaagcaaggaaggagcaatcgaagcatacgtataacaggaaataagcgacggatatggcgcttgtaactctagattttaagacaacagtagctagctcttacagagatatctggacaatggacattggcgatcagaagctcatccgtctgtgagagagtgaaccgaggggtcttcatggtatgtgtgtcgtgagtgtaatgattttcaacgcgaaacccagtcaatttcttttgttgttttcctcaccatctctagagtgtgcatcccatcttgtactctttgacagccacccctggtctcttcatctacagacccgtacacacaaacacacactttcacaacagtcatgtcggatacggaggcctcctaccaggcatctcgtccaacggacagccaggacaatacattggatagcatggacacacctccagaagacacatctctcctgtcaaacgaactgcctccccaaggaacagccgaccactctcgttcatcatcttactcgtcggaacgagaaatcaagccgaatccatcgctcttggatgaacatgaactttcgtcctctcgtgatgctccagaagaagatcattccaacctggccgtatcttcttccaactccctttttgagggagaagttccaaccgagagtaagccgtcagcaggcgaggtcaaagcaccctcacctacaaccaatcaggcttctgctcctacagggaggccggctattagtagtagcaacggcgccgctccagctcgatctagagtgacttcggtcgatactgctaacagagctagaaaggccgaagacaagtcgaaagccggtaccacgatgacggctgctcaaaggcgagcttcggtcgctgtcggttcgactggatccggcgctgtcaagcgagctctcgatagtaagatctttggaggtgagtgttttgtacatgcttgatgcttggttgtgttatgcaaacatacaagatcctcaacttcttctctctgtgtgcatacaggggctacaagatcaacggcaaagacagctgcgactacgagtacgaccaaaactcctgtcctgtcgactgcaagcagcgctgccaccaggccttcagcatcaacatctgctgcagtgcgcagaccgacggtctcttcgactaccaggccagcctcaacggctgccacgactgcaaggaccgcctctgcagcgaccaagcctactacttctgctacctctgctgtcagaaggtgtgtcaatcataaatctaagcctgtcaacgaatcatagatgctaacaatttctcaatcacaccttccaaagaacctctgtgcttccttctaccaccactcggcctatctctagctctgttaccagacccacagctgcttcaagtagtatgactgctaccaaaccttcgagctctctctctccttctccttccctcaatgggacccgtaagactgtgacctcttccactgttccctctgcggctacctccgcccgtcgtcctccctccggctcctctgctcctacttcaacagagaccgctcgcgctcgaccgggtcataccaggcagagcctttctgtttctcatgtcggagcatcccggaccgggctatcaggcaccagccttacctcgagaaacgcaagcggaccgatctcttctagaacagccggcacagctcggtcggccgctaatggcgtttcgtctactggtgcagctaagccagaaggtagaaaagagctggaagcaaagattgctgcattggaagggacagttgctggtctcacgatagatctagagaacgctaaagcgacggtgactgtcagctcagagaacagtgatgctacaaaggacattcaggagcaactggaggcccttaaattggatttggccggaaaggaggatgagttgagaatcaagaaagacagggaagaagaggtcgaaggcaagatcaaggaagcggagagcgagctgcaggagttgagagatgagctcgagagagagaaggcggcgaggagcgccgaggaagacaaagtgaataaggagctgtgagtcttctgtgaaagataactatatgcgggtgagcagtactgaacatgtcataaatgtttgcgcgcgctatactagtgccgaactacactctcttcaattctccctgcaagaaaaattggaggctgcaacatctgctactaactccaacgcggaaggtgctgttgaacatgatctggatgtgttgcgtgagcagattgccgctcagactgaactgatcgaggacctcactcgaacatcggatgatattcgtagtgagaatgaaaaaaataaggctgcacttgaggtatgtgttcctaacctatccttctttcttctggttcatgtacgtgtcccgagaggagacaagatctgaactgagagagtgcgcatgtttgatctttacaggctgcccagcaaaaagtaatcgctgctactgaagcagcggaacaagctcgattagatttagccaaaatcaatcaagagatgcaggtaaatcactctcaactgcctgtcagcaaagctgtatatattgacttggtggctgttttgttactcatgacctcaggccatcaaggaagaaaccctttcactcgaaacatctcaacaggcactagtcgctgaactcgaatccaaaatcgacgttctcacagcagaattggcttctctgaaggataaggcagagagctccgagcaaggtcacaatcaggagctcgagacacttcgacagcagtacgaggaccgaattatatcgtttgaggaacagcgagaacaggacagacaagccttggtcgttgaacatcaagttagtcccgttttggaatgaacttctctctctttctgcccgccattaaacgtctcctgttatggtttgtccggatacgtaggctgttcttgatgatgctttagatgctcagcgatcgacacactctgatgagcttgataaactacgatcgactcatgacgactctcttcagcaagcgatctctgctgcgcaagaccaatctgttaatggtatcatggtcgaatgggaggagaaagaaagccagttgaaggctgaattggaacaggtcttggctaagctcaagaaggagcacaatgaaaaggatgcgttagagcaacgattgcaggaacaaaccgaggtgagtcttgtatctctgtctgtgaagtttcaactctgtctaaaccgagttgtttgattgtacgctttgaaacgggttggagctgcagaaattgacgctgaagcatgcggaggagttagaatctgttcgagctgctcatgcttcggagttgaacaaagccattgaaaatgcaaaggtttgtagatgtctgcacactgttgaccaaagatacaactccattgataatgatgacttcgtcttctctcaaagaacgaggcaaacagtgaacatggccaagagcttcgggcgctaagagtcaaatcggaggagtcaactgctcgacttcagtaagttgctgtcttccatctatagtattcatttcttcctctcttcgttttttcacactagaacgttcataattcttgttggtatgacacaaaacgatagtcaatcccatgaaaaagagattgagtctctcaaaacatctcatgaagatatcgagaattcagttcgagctgctctttctgctgaactctcaagtttgacgtcagatcttactggtgagtacattttcaaacttgataatacatacaatacttcagacgttgacgatagtatatcgaaacgacacagctcaacgagaagatctagccagagccaaggcggacaatggtgttcatttgagtgaactcgaagcacttcgagccgaactcgagtctactcgatctgctctcgacgaagcccgagagaagttaccttcgtccaatgaaccatccagacagcaactagaacagcagatccttgagttgagggacgatctggaatctactcgaacgtctgctcagctgacgaagcagagtctggttgaccagctagacatgctccgagaagaccgtgatagggcaatgacggatgctagccaggcacgaatagctgagattgagcgtatccgaattgaagaaagaaaggagagagagaaaactttggaggagaaggctttgttggaggaagaggtccagaaggaacgtgaagcgaagctcaagggtttgttcgaggaatttcttggttctttgcaagcatttgattaagagatgatttctctaactcgttttttgattcgcttcgtcagctctcgcccaaatttctcagatcaggacgcctcctactagccctgaaaaagctgccgagttcacttctccaatgcgcgatctacacgagtgagtagtgtattccatggcttgatccatgtggaactggctcatttatcaatgttttggctcaaccgttctctttcttcctttcctcctctggtcagagctcatagtaagaagtaagtgtataaagtgttgactaattgaatgactgatcgatcgacttacctacctgatgttctgacgtgttgaatttaattttttgacaaccgtttattctactcagggtatctgatctgcaagcgttagtaacacatccaattgtcatgtttccactgtttcctttagacttttttgacggtaacatccattcttcatatatagcgagattgatgatacaaaggccagacttgatcaagcgaacatgaaggcagaccagctgagggaggatcttgatcgtaagacatccgagacgagtatggtgtatgaagagagaaaggtgagtctctcgccctctgaccactttgatcgttttggagtgggaagaaaatgaaggctgagatgaacgcgctggttgattatttggcagagtttgaaggaggacgttgacggtttgcgggaacagcttgccaaggtgacggacgatcttcaccgtgctttggttgaaaactcggaagaattctgagagcatcctgttgttcaaagcattgtttgatgctcgctcctctcgacatctttctgtgactgtgcttgcgatctgttttcgttctgtcttttttcgtttctcatcttctcagtccattctctctcgccacaaccctccttgttcttttgtcttgtccaggatgtatattccgttaggcataccttttgatttaccggcacaaagaattataaacaagactgttttctcttgctctttttcatatgtccgttgttgataccgttaaagatgcggggctttttgtgtgttacgtaacgcgtttctcgatcattcaacaagagacgatcagacttgagcagcagcagcaacagcaaacaaacttgtttctactccatacgtccatcaagcgagcaggtagacacggttttgactctatcgcccatacgctgacttccattcaatcaaccttgacgtccagctactgcccttcacctgaccaagccttgaaatttgaagacttgaatcccaaagatggctggtacgtgaagtagtccgcgtcattagattagccgacatccaacgcaactttcttcttttcttcctatcctctcgtgttttcttgttctcctttcttcttgcttctgtttagcgtgtctccgtggtattgattctgttctgctgtctttttgtttgttctttgttcatgttggacttgactcgcctatagctatctacactgtgttcacgtcgccttaccatgctccgataccggaccatttgcctactcttgtcgtcactccccacggttcgtccgtttcaacgttatcaagagtactcgtctcactcatcttggacataaggacatgaaagagaagattcttgtatctctttggattgatgctttgtcaaggccaggaaacgatgaagagagtagagcgcgagagtggagcacagggactcaaccgttgtgccgtgttgagtcgcgtgatgttttgttggcttcttgttgtccttcttctttgatcttttcatttggattcacatacgctttgaagtagaaatcggtcggtataacaagagtttcgttgactgataattgggtttttcaaactttctctttgtgtgtgtatggattgtcgtaggtcaacctagccatgtgctctactcgtacctacataccgattacgtatgtttggtccgctttccttgtggcctctacatggatgttcaaatgctaacagtgtactcccttgactcgactctttttctgacacagaacaaggtcaactacctcttgacgccttcaccccaaggcgatctctgcgtagccaagctcttccctccttcggccgcactccgagcagcctccgacctcggccatggtggtccgccttcgaacagggctgttcggtgtgaagcctcgagagagctcaaatggtcgatcgagaatacaggagtcagatctccgatttacaagattgtcaattcggacgaaaccccactctaccagattagcaagccgaacccgaatgcagatttctggacaatgttctatttcgcgtacgctgggcatcagattcctccaaaaagagccgaggtaagcttctctgttctctgtcttccttatgttgtcctaagctgatttgcttgtttctgttggacaaccttgttgggcacggacgaaattagttcggaaagattcaaaagaacccagccgagaaaggaggaggaaccagaatcactattaccggtaaaacagaagaggagaagaaagtttggcaaacactaggcgaagggaacgaagattgtgttgaatgggtgatttgttgtgcggtattaaacctgcttgagtatgttctatttccttccttttaggatggtatcttctttcgtacgagtttactgatcatcttgaattttgtgacccttcaccaaacgtatcgtctcgagcagtgatgagatcttgaaagccgctgagaaatcagtccctcggtccgcggtctctccaactcccgctgccatatcccctgcgtcatcctctggtccttccgctgcttcttcagcttcccgaccgagacctcctcaacagatgcatcagcctcctcctcgtccaggtcaaactccaccggcgccttctcctcggctggcgaacgctcagccaaaacagctaagagaccaagggccagtgccttcacctaatgcttacccgtctcagcaacaacagagagcagccggtagtaatcctgatcctagatacgacccaaggtatcagcagcagagggggcatgacccgagatatgacaatcaatcacctgcttccagtaaccctagacagggatatcctcagcagtacgcgcaacctccacagcagaatcggggaaagttttaacaggttgaagggaatgtttctgaagagcgagaggatgaagttgaaagtctttatgtttctttttctctctttttatgcccgacatagaaaaaattgtactaggagtttctcttctactcgctccttttctacggcttcatttattcattcatacatgaaatatgttcatcctagctcctattagttcaagctgttctttataaatcaatctactcctagataatctcagtggacttcccgtctccttcctaaatttccctcctttctttttctttttatatatatttcacttcgattcttcaccccttactttgttcgtctcttcctctgctcttgtcttgcttcatcgtttcccttgacgtgaaataatactcgagcggtacatcaaatccgatatgactctaccaaaaaaaagaaaagaaaaaaaaaagtcgacaaccccttgcatgatgaagaaaccgttgtaaacatgaatttgacaactctccttcttgtcctatccggtctctgtttctttcttgttcgaatgtatccctctatcggctctgtgtcccatctttctcgagggtaacgaacgatatggagaaacctgagtggtatcaataacgataagaaagtcaggagatttttcaaagactccctgagagctctatgacctgttcgttccacccccgagttcaaacccaagaccagggttagtcagaatagctcggttgtagaagtgaatctcacgcgaaggaacttaaagttcgcgaaggatgaacagagacgaaccaccggtacatgatcactaggtccaaagatctctctcctgaatatcaagagaaaaagagagttcccccgataatctttcgttaggggagcttattcgaacatagacatcagaaagatgggggagagagagagacggacctgatctcgcatgctttcacacgttcttgaagtcgtttcgagacgacaaacctgttgttccggattagattcccagcaaagtgatttccatcgaggaagatggcaaagtaaggatcatggttctgatcgatggtatttgtttgatcaccagaaacgagaaagagagacgaacgtgtcgagcctccatccgagacctttttctcgctgtaacgaccgcttggagtctgggaaacggatgtaagtgcacaatgagactacttgagagatacgacatgaggttatagagagagggagaaaaggcatacgaaatgaatactggacttcatcaggcccatgtatttctctccaagcatcaactagaggttggtgaccgctttcagaggacggattcaactgagacatgtatccatccaactcgtcttgtgtccatccgggtagctgtcaatatagtgagttccgacatagaacgcaagaatataagaaacaagaacatgactcgtgagaaatcagggcgcaggaacgaagagtatgttggaggcataccttgttccatcctttagcggcattcgagatatcgttgcctgacgcactatagatgttcaaccagatcgtctaattcagttaacttttgatgtcgatgacaagaccgtcaactcacacaacgtttatatcccctccccagacgacctatggatcacaaaaaaggccctcgtcaggccgttaagaacaagattgagatcccttttgagatgtatagataggcaggcaggaaagattaaactcaacacgtaccggcttgatagcgtctagttctcgaagtttcgcctcgaaagcaacgttccagtctttctttccctgcatgtttttcagtccttcacttgcattcggagccttcatttacccggtttgcggacaacaggagacaagaagggaaaacatgttgcaataaggcagtttgaactatcagttctgatatattaaaccaagcaggaaggaaaaggagaagaactctcacataagtacctataaggaacaacgaaggaaactccatttgaacgattcgacctgtgattcgttctcctttgaccaccaagtcgacctttcctcagtttgtttccagcaaagatagacagacacctttcagctgacagttcacggtgagattcaaggggtaaggcagggcatgaaagacacataccgatttagtgatcggctttacttttgagaggacagccgttcctgcgtatcctttcttactacatcaccccagatcgatgcaatttaccaaaccaaggagattgagtgcggcgctccgtcctttcatcacagcaacctcaacactgataaaacggcgaaccgcgaagggagaaagaagataggagaaggtgaggagggaaggactgacgagcagaacgcccattcctgaaacgggtatttctctttcaggaaaacatcctctgggattgggctactgtcgttcctctttgtttctgtcaagatctactcaagtgcactcatatgattgttaattctatcagttcaatcacccgagtgaggaaaagaaccaaaaaggagaagggaaaggaaaggaaaggagagaacagaccatgatatcggcatcttctttatccatgtatcctctgaaaccagaaccctgctcaagatttggatcacccagctccgaatgagtactcagataatcgccttgtagcaaagatgagagaagacaaagatgaagatctcaagacagacatgtttcttgtcacaagcggatttgagcgaggtaatgttccaagcagaaatcttcacgtcccctgtcttgggaggtaggtcgtacgacgcaggaagagctttgttgatgtattggatcgaagggaacgtcggcgggtttgtcggttgaggataggaacaggtagttttctgttccggtagccctcccggagacatagagatccagaaagatgttaagagcgatgacatcaaaccctttgtagcaaggcgttctccttaccaaaagtattagagggagagaagtacgtacggacttggtcgtctcaaccttcgccttcttcactgccgttccattctctccgtccttctcatcgtccgttttcttcacagacccactctgttttctctttggagccatctctacgagattttctttgatcagcttacgagccgtaccgatattttctaggaaagtagaggagttggtgttgatggtataatttctacgttgacggctatgaacagagtgagatcggtcgatcgagccagttgatctaaacagccaagcgcgaattgatgtgtgagcgttttggtcgagaacgatcgatctcgtccgggtcagacgttgcagatggagaaaggaacgagggtatagatgaagaggaggactcatacaggcaggcaatgtttatccagagatgtcgtgtcgctgttgcatctgttgcatgtcattaaacaatttttctcaaatttcgtcagacgcgtctcttcggagactttggaggacgcgtccagtttgtttcgttctttttgactttatcaagcacattcagatgacgagcgttttgtttcgttcttcgaacattgatatgtatagaatccaagtgatagcgcaaaggagaagatggatgagaaggagggaagaattgattaaacctcagtctttgtggggacaagaaaaagagatgagtgatgcaagaaaagatgaagcaaagaattgtacagagaaagacaagcaaactagattgctgatgaaatccctttttgaaaacagaatgtccacttagacgaagagtcgcttagtgtaagagttcaagccgtgaacaccaccctcgacctgagcagaagcagttcggagctcgaatcggacggatccgtcgagagcaccctcctggagcaaggtgatggacctgacaccagaatcctggagagagtgctggagaccggtgtgaaggtaaggaatgaacttctcgacggatcccttgtcctgaacatctccagagacaccctgggcgaccttgacggcgtcggactcggagaagtatcgggaggtggcagcgttctcatctccgacggccttgacgccggaagaagaggcggaaggcttctggtgctccatagcgtcgatggaacccatacctcggtaggccttgactcgcttaccctcgtggtagaagtattctccaggagactcggtcgttccggccaaaagacctcccatcatcacggcgttggctcccaaggacaaggccttggcaatgtgaccgatgtttccaattccaccatcggcccagacgggaactccgaactttcgggcaaactcggcgacggcaaacacagcggttccctggggtcgaccgacggccatgacctcctgagtgatacagatagaaccggatcccataccgattcggagaccgtcagcaccggcagcaatcagctgggcggcctgctctcgggtcacgacgtttccagcgacgacatcaatgtcggggtatgtcttcttgatccactggagcagctcgatctggaagatagagtttccttgggatgagtccaagacgacgagatcgagcccggcctcgacgagcaatcggagtcgctctcggtcggccggtcgggtaccgatagcggctgcacagtagagctgcttggtagacggcttcttggaagcgagcgggaagtctcggttcttgaggagatccgatcgggcaagaagagagagcagctttccttcgctgtcgacgatggggagcttaccctttcgggagtctcggagaagagcattggcctgctcgaggttgataccggcctgtccgacgacgaggtcggttgtcatgatggtgttgagcttctggttgggctctcggaactgaacatctcggccagtgacgataccgagaagctttccaccgatctttccgttatctgtcaacgcaagggacaagcggttgaatcagtatttagttgatagccttttgcgagtcacaagtggtgataaaaagttggcgtcgaagggtggttcagtggacatgagtcaagactccgcatgtacagactccccgctagggagcccgataggcagaacgaaggtaacagttgatcattttctcatcaggaagaaagagtgatgggggtttttgatgattatcggcagaacggacagggtgaaagccgagatatggagagcaggccaatttgaaaggaagaggaaggaaaagactgaccagtgatgggaacaccgcagaatccgagtcgggccttgatgttgagaacactgaagaaggcagatgggtgttatcttagggttgtgatagagatggctgtgaagaatgaagaaagaaaacctactcctggacgacggcatcctgtccaaggacgacgggatcagtgatgaaaccgttctcgaacttcttgacctttcggaccatggaggcctgctcctcggcggtgttgttgtggtggatgataccgagtcctccgagaagctgtttgatatatgaaaaatagaggaattgagcacatgcggatagggtgagcgaacgacgaagacagtaacaaatgtagacgtacacctagggagatagccatcctgtcctcggtaacagtgtccataggagaggaaacaaatggagtcttcaaaaccactcgcttggagacactgcagaatgagagattcaacaaaggattagggtcttgtctctgtcttttgaatgaaggccaagcctctaccggtcggagaactcactgggtctcgagggagacctcagaggactggaagtctacgtgtccgggaagcataaggaaatcgttgtaggtgagtcctccgtgggtagtggagtccatctgtgatgcggttagaagaggccgacgatcatagatgggttgagactttgaactttctttgctatattttattctatctgatgacaaagagaacagaatcgaataggagaaagtgaatgctgaccagttccctgaggctgagaccatcccctcgggggtactttgcaagctcggccacggcatcagcacagttcaaaacggaaggagacatgttcttgtgtgtgtatgtttgtttgtttgtgtcaaagagagaagaacgatagaaaaaagacacttcggtcgaggcaggtgggtgggtgttcccccccagaaaaaaatgaaaagaagaactgggcaaaaaacttgacgaggttttaagggctcgggtgatgggctggatcacgtggtttgtaaaaaaaaattactggtaccttaatgattaggtaagccggatgctgcggtgtcagctcctaaccctaacatccatccatttcttccggtcgttccggatgtttgagcactgaacagataggaccccgactcgttgtgttctctgtctacgtccgacacggacggcttcttggtttaataggtagaatgatctgataaggctggatgatgttcagatagagtttcgagatgggctgatttctgttagcttgaaataagaaatccaaggtgatggttcggtgtgtcgtgtgtgtgttgggtctgggtctgggtatacataagagttcatctcgggaacacagagtcgatccgtctcttgactctgtatctctctgtcctccgtgttcggtttaccgtcatcgacaccatcacttctttttattataatactcaaataaaaaaatccgttgctgattggatcacaacaggataaagtctcttccatagagaaagatcgatatttcaaggcatgcatgcacaatagagcaagaattcgaccggacggagttgcaaagacaaacatctgaaccgaccacaatctctggccacggtctcttgtgttccatctcgtccgatctaaagaaactcttttggccaatcatctgaagagctcgtccggttagacacggttatgaatattcatgcccatcagacaatcaccactaccaacaacccacgagcaggtcagccggcgtttgctttcttcgtcaacttctttatctacatctttatcctgtccaagggaaaaatggaacggaagacggcctgaaccgtggagcgggaaggcatctttacttgataaggtaaaagaatctgaccgattcgaccggatctcaacgttcttgagcgtgggtataatctatttgacggtcgaccccgtcttgatagatagagaagacatggacaaaaccgttaggccgatgacgtgtttgtttagaacaagaagagctcctcttttgatactaaatttgttagggttaccgctgtactccgaccaaatcgcagtcgatcagtcagtttatttttagattaagcctggtcccagctaggaaccaagctctatcttgaaaagaccggcgctcgtgcctgtcaattaatcgccctccaagctgcctccgaagatgtgcctgacggaagcgcgcccccttcaagagttgccccgtccagttatctcgctatcttgcggataacgagataactcagaagaaagaatatgatatcggcttaattccgttcaaagtaaagaaaggccaagaagatggatcggacgacaaagcttcaaaagagcacccgagatctgttcttccgttccttctcattcattcagccatcccgacctactcagatcttcataccctcacccactccaacaatggatctcaaggataacgagaaggacgtctacggagtgtccgaaaaggtctacgaagtcccatccgatcacgctatccagtatggtccttctcagtcttctcaggctcctccttgtaggctgacatctcatcaccttgtttctccttcatctacctcgcaccctatagcaccaacgcacatgatgcagatgctgctgccaaactcgtcgccggattcaccggagagttagacccagtcgaggccaagcgggtgcttggaaagattgatagaaacatgttgcccatggttcgtaccagagatcatttactctgtgtcgtctcagtcccataactcaccagaaaccttacatcctcgtctcatatcaccccttagatgatgatcttgtatctcgttcaattcatggacaagaccaccctcggtaactcggtcaacctcggtctcaagacggacaaccatctgacctcgctccagtataactggcttggaacgatcttctatctcgcatacttagtctttgagtacccgtgagttctttagtcttgaatacatatgcctttgattcctcttcccaatcttcccaaagaatccgtttgctcataattttgtctggtttcgtccaattcgttctgctagccaaaacttggctcttcagcgattccctgccggtcgatggatgtcgctcaacattctgtgctggagtatctttttgatgtgccgtgagttgcttgcttcctacaccgatcttgttacgcctcgcgactcttactaaatcccatcgtttgcgctcctagatgccgcctgccacaacttcgttggcttgttcatttgccgtcttggtttgggtatctgtgaggggtcaatcaccgctggtttccttgtcacgtaagttgctctgtctgtttgtatattcatcccttgcaccaagcgtcttccttatcattgtatgtcctactatatccagcactaccatgttctacacccacgccgagtcttcccgacgagtcggtttctggttcctcatgaacggaacggcccagatcgtttctggtttcctcgcttacgtacgtctcgccccgttcttcaaccttccatctcgaaccgactccttaccttccttcttctttctgacccattcagggaatattgcactccaaatcctcctttgccccctggagaatcttcatgctcaccacagggctgatcactctcgttgtcgccgtctggttccttctccgattccgtgagtttcattcttcagactttatttcatttcccaacattcgtcctcctcttgctcgatctgactccttcgcgttgtctcaaaccggattattcttcatcttctcagccaacaaccctatggacgccaagttcttaagcaaagaagagaaagtcattgccattgagcgaatcaggtccaaccagagtggtgtagagaacaagcactggaagaaggatcagttcatcgagacccttcttgattggaagacctgggctttcttcttgtttgccgccctcgacaacgtgcccaactctttgaccaaccagaactcgatcatcattaaatccctcggatttactgctttgcagaccaccttgctcggttgcgtctccggagtgatcgagatcatcactatgtaagtatcaccctctcttctatcccgcgcgtgttcaactttcctgaccgatcattcctacctttccccttcatcagttacaccggaacgctctgcgtcaagaagtacccgaatgctcgagcgatcatcggaacgatctactttatcccaaacattatcggatctgctctcatccttggccttcccttcagcaacaagaccggacagctcatcgcgctttacataaccggtgtaggaaccaccggtttcgtcctctccctcgcttggatcaccgctgtcaccgccggccacacaaagaaagtcaccacaaacgcaatcatgctcatcggttactgtctcggcaacctttgcgcgcctcagatgtggaaggccgagtactcacccaagaacacgatcccgtggattgtaattcttgtttgctacaccgcatgcccaatcatcatgttgtgcattgcttacttccttcaaaaagagaacagaagacgagatactctccccgagtcggaggtcgcctcgcaggacaactacatggacgagatccagacggacggaacggttatctccaagaaggtcgatcttggtttcatggatcttaccgacaggcaaaacttgcgattccgatacgctctctgagcaagcctatactctttgtattgcgcaccttttcactttccacttctcacttttcactttccctttttcttctcggtctttatgtttcggttgtatttcttctttttccctcctcttctaattaagtttactttatccctttgtgtttgtgctccgacgtcgttgtaaaagttttatagaacctttctcctctctttcgtactgtttttttctaggaggttgccttccctatttgttgctcttatctcacctttactatcagatcttcctacgaattttaacgctacacgtttcttctttgtctctctttgatagatatcttttagagcgtgtgttttcagtctcgaacgtgttgtgcttgtggcgatgacgatgatgattgtatgttgtgagcaacaatggaaaagctagagaggaagcaaggactacggaaacattctgccgaccggctccccctgaaagaactttgaacagaattgtttatcttccttacgcccgcgattcgacgaatcttaatcctcccatcagactacgaccatccaaacgcccacgccctcgcccaagctcatcaatcctctttcaagcaaactaatcaatataacatcgtccctacacacccgaaaaattagaacaaagatgagctcgtctggaaagatagatttgttcgatgaggatggagcgttgagggaacctgtaaagaatcttgttcttttcgtctttacctttcgctcttcatatcacttcaaacttgactgaacctgactgactggctctaactcggttcacaacaaaatattcacaaacagctctacctggcgctctgtcacatattctcaaaatacttgacacctctcccaccaacgaatcccacggcccaaggttccctacaccccccacctccaccctcatcctccctttcctcgacagcgctcgatttgttcgcaaaggacaccaacggagcaccgttcgaaaagtcaacgaaggacgagatctttacgttcttcgacacagtcaagattaacggtggaaaggaggaggggctgacgatgaaagggttcgaagagatgatgacacttcagacagaaaatgacgaggaggaaacttggaggtatgtccacagtctttttctctccctctcttccttctctcccttctctccttcgtcttttctggtctggacgtcgttctttcacgaaacagccgtccaattttggaggatgacgggtctctggctgcggtctgttgatatcttctttctctttcttgggtgaccccgcacagggaccttgcagcacacggattcgaccgatccctcaatcttgttccgtccaaaactacaacaaattcagacggaaagtagactctgatttccaatataaaaccaacacaaatataaaaaggtttttcctcagacacctccagtcgttattttttgccaccagttttaacacgaatcttggaaagtgtcaaacgacacgactcggatttcaatcgtttattagataacaaagtggatttttcaaaactatcattttcgttcgcatctatctacacctaccactagtcctctatttccctcttggtccaaaagaggaatagaacatagaaccagaggtcgtccctgtatccgcgcacttttatcttcccttcctcatcagatctttccgtgcaggagattcttgatcatctcccttcctgtcagccgaacggtgttgtacatcgttgggaagtccaaggtggaagcaaagtctgcaaatccaaagggctagaggatcgagcgcatagagaatcagaactcagttttcggtacagttgacaacgagagagaaggaatgggatgtagaacaagataaggagaaagacaaaggaactcacgagcatcggagggatccaaccttgggcgagctcaagagcccaaccaccctcgtggaattcttttgtgcgcggaaagtaagagataaagaatagacatcaaatgtagaacagaatccgagttcagtgaaagtttcaacgaagaagggaggcgacgatgatgaaaaagaagtgagacaggccggaactgactgtactgcttggcgtctcctcgtcgcatgtggtgaacttgaccagcaacgtatcgctacgtggtccaagtgaaggtcagataggaggaagagaagaaagaatgagaaccagtttcgatcagcaaacgaaaccagtcgaaaacaacagaagagatagacgaaacagatagatagaaacgaacctccatctccatggacccaggggagaaagcccactgttcacctctcaagatgttgaagtagtcgtccgcggtgtgtcttcccgagtgaccttccgttcccaacggcgttccgaacacgatcaagtactctgtgatagaagcatggatgatgaacatcgctcccatcgctccacctgcgttattgaacacccactcggacgggttcgagatatccgtgttaatagtgtaggcagggtacgttgatgataggttcgtcagaatgtgagccgtcagggcggtgatgtttgttgggtgaagcgcgacagcctcagcagagagggcgtgcaaggccgggggatcaaagatgaaccatcgctcctaaaagacgacgaagaaacgaaaaatcgagcacatcaagataacggagtaatggtcagtctcgataaagaagacaaacgctgtgtatgtgcgcgagccgcttactttgataccatccagaaagctgcatgcgccccatcccaaggcgacgatcagaacaatatatcccaagaactgagctcttgacgacttggcactcgtagatttagttgccatgatccaggagagttgtgttgatgaacgagagtaggaaaagaaaaaaaaagaaaaagatcgttcgagtttctgggaagaagacataaacaaggcagttaccaaaagaggagtcacgtgagatgcttatatgatatatataatatttgaaacattagatttactctcaatttcagatataccttaggtaaaacacgatgtcttcaatctcacctcctctgccatcttgggttcttccatctgttgtctgcccaaggtttctctctcatctctcctaacaatgtccagccttagcaaagctatcccgtccactctgaaggagcttcggtttcacttgtgccagacatctccagcttcagccggtcttcggtccgttggttttcgccagctctctcttctcatcttctccattgatggcttactttgttcttccttgttcaactcgatctctcgaccgggctctctttctgttttctttgttgttttggctgggtgttttttttaaaataacaaaatacaaactagatcatacatcaactcgaattacttgtctctcaaggcagccaatccagatctgaaggtgctcatcagggaagcagccgccgttagcccaagagcctttgctcgatttggttcgttccttcatactactctattttctacagtcgttctggagctactgggaagcaaggccatgaagttggaccagttcaagcattagaggttgagcaatgagaaaacgtgatgtgggattagaagatcagaggctaaccgatggatgtattcatctttccactctcatctctaaaaccggtgccccatattatcgtatgctacccaaatcctctttaaacctccatcggccgttatcgtgctatcaacagaacaaggcgttgagtctgaagtaggcttggcaaacttgacggagaaggacgtagtcaagcaactcgagacgctggtcaagtcttctgagaatcctctttaatttcctgctctggtctcggttccgtctaggaaatctctgttatgagcagaggtggttgtataaatataacagtggacctggaatgagctgtctgctcgtttatttctttgtttgtatgtggacgtgtctgtttgtatgtgaaaaaagagaggtcaatgaaggaaaagagaaggggattgctgcttccttctttgcttaaacactctcttattggttgtatgttcttttcatgttgcatcccaccctcttgatcgttcctatgacgtccaacgatctttcaccgatacacacaaacacagttagtgggaaaatatgcagagtaaccgttcatttaagtgaggccgacggtgaaaacaaggaggaatagaatggaacgaaaaagcgacagaaaaaaggaggtaggaaaaaagaaagattatagacacagaacgacggtggcggttttctttttaggcggacgaaggagcgaggaggggagacaaagatcagagtgttttgagatggttccagatgatgacttgtttagttgactgtgaaggaaggaattaggcagagcaaagagatgtgttacaaaattccaatcagaacacaccggccaagcagaagcaaggaagaaagggcccagattgaagggaaagaaacatactaggcttgatcttgaaatgcaaagcgatcaaagagaatatcaggcactgttaaagattcagtgatttggaccgggtcgtagaagcatgtcgaaaagaatccaatcttcagtttcggaaccattcaaagaactcgaaagcgaaagacagagtgacaaaccttgaggtcttgaacgaggtagtagaatactcggagtccttcaggatcttcggaatcttgcacatccgccaaagatcccagcttggcggtctattgtccgacatgaggacgcaagaatgagtattgtgtatgtaaagaaaactaatgatctcaaatgggggaggaagaaacacgaacctcaaaagagatatggtcgtttccaattcggatctcaagctcctgtttaccctgctgacccttcttcggccacttggcatcatcctccctgtttcattagattgtcgttagagttcgtttgagcgatcattgaagaaaaaggggttgtgtccatcatattgacgaatagataaagtcgcggagaagagggagaacaggaaaggaatcgggagttcagccgactaggcctgacagatctaccatcactcgtgcaaggctcaagaagaaaacagaatgcatactgacttgacaacatcggaggcctctactatgcgcttgagctccttgatgagcagagggctgacgaacactaagaaacgggaaacagagatcgcgaaggaaatatcgtcgaacaaaggattgagagcgaccggccatcgtacgcgtcagtttcttgttgttatctgatcaagatcgatctagctaccacaaaaccttggctagtgctttgtcaacggttgaaactgactttctttcttaatcagactgtcatttcggtagtttgagttattggcatatcggagtcggccttgggagtactcaaactcgagaaactcatgtccatgaagaccaatatgtccggtactgaggtaaagagaggtagaacaagagcaaggtttcagtagctcaatcagcgattgatacacggagagaaaggaaccgaaagactagacacactagtatctgtagaagcgagaaagagatgagtgtcagttttggacgaaactacctctgacaggggtgacgagtgaaaatcaaaagcaggaagcttctgtatagaaaccaagacgataagatacgaacctgaggtaaaacggatccttttcgacagagttggtggccatattaacagagatgattgatgtagacgtgatggataggggaaagggtgagcgaatctttgtgagagagagaaggtaagcgagtaaagggaagagaaggcgaaatgcgtaaatggttacagtaacatgtaacccggaacacgtcgacgcgtcgatgggccgacggacacgtcgcgtatccggctgtgtggctatgggtaagaaagctgtgtctgccgcggaagctgtgctaaatgtagccaaatcgtaaccatttcataaccatccaccccccatcagcccatacacgttcgctcttcaaccttttactttcctctgcgttcatcactgtgtctgtctatttcttgggttagcgttgctctccgttctctcttctggtgtctctgtccatcactctctctcagtcagaccagtcaaattgtacgtgtgaatgtcgtccttcagttctgtatgtttcctgttttgcaaaatgggcagtccatcggttgtaccagccggaatcagcaagcaaaggtgtacgtgtcgtgcacaggactttgaagaacatgtatcagtgggagaagaacatggttgagctcttgcttcccttcctgttcgaatcccatctctctctcttattagcacgacttgagaacgctgctccgtcctccgtatctccctcgtcccaagcatcgccaaactatcctatcccggtcttctttgtataaaggtgaatgcacgttggctgactgatcctacgggtgattatcgccttttctcttctgcctactggcctcgcctcagtctatctttccatcgaaagcagacgcatacagtgcacccaagcataagattattcacgactcccgtcgtttcttctttcttttccgttgcatctaccatttgatcggcatctacctcgtcgctcagtcgaatacacaaggtgagtattcattatctcgtcgctcaatcggttcatatccctttggtaggtgttcaccaacaggttcatcaccctctttcattgcctagtccgggccaagccgacaaacagccacaaaagtcaaatctcatatggctcttctaccgacacctcttccttcaatacctgccagtttccctccgagttcgcctaccgtattaggtccagagtccccctctgggactagcacctccggtgctgtcctctccgatcctcaagctgtcgctcccaaatctgtctctggccataatccgtcggattcgatactctccccacctcggcctaggtcggttcctccgtcatcctttcggtttctgccccttcgtgataaccttgtcggaggtatccgagatctggggtcatcactcaggcagagtttggacgaggttttaaactctggtcatgaattcagcgtacctgaaggagttgactgccgggtgctcgagatcggacccagagacgtgggtatcgatacgaatgatgtcctgttagatgggaaaattggcgaagatgagaatgggactcaagatcctgctacaggcgtcgtgaaagagaaggaatccaaaggcggtcggaaagtcagtctcggccttggccttttcaaagaaagttctggcagagaaaaagagaaggacaagaaggaaaaggatctcgtcagggatatgtatcgtgaattcagtgagcttggtggaggtgcggctgtcggaagcgccgttgtgatggaggaagacgaaggacatcatcatcatcgacacctccacagtcttccacaccttctttctgatgtagaaataactcctaaacggtccaaggagtctaggtccatgcagaggactccgtctgatcggccgtctcgtcgaggttcgatatcctcttctaaacatgcgttcccagtcttggtgtcctccaactcggttactacaccgagctcttcatccatgacctctactccttccgcgtcccccaagattagcaagcatcactcctattcgcatactcactccatctcatcatccacttcacacgcccatcatcgtttcccattgacgccccaagcacctcgtcgaccagctctcgaccttcagcactcgtcgacctcctctacgttttcgccaacctcgtcgttctctaccacgtcgtcacccctggtcgattccaaaccggccttaccaccttctccattagagttgcctccgaccccttctatctcttctgatgccggagttttcaacgtgtcgggtctcacctcgtcaccggtatctttgtccaacggaacagctccccgaacgccctcttcctcccaaacgtatacaccttcatctattccttcatcgagtggaacccatgttctacatccctcatctcatccccaccctcctctccacttctctcacctacaccgttcccgtcgatcgtccgttgctacagaactctcttcaacagccagtatcccctcttcgtcctcccgaccattgccagccatgatgggctctctcttgaccgatcgaactggatcaagcaggcaatttgatttcgaatatgatgaatcaccctcagtctcctcggtcgcctccccgatgcacgagcccgaacgaatctcgttgataccatgttcgtccaacccatccgacggtgaggaaggaagctacgatgaagaggaatggacagacgcgttcagcagtgagggtgatagtacttcggagggaggcatctcggactaccgaaatggagagcacgactcgtattattctcacaataaaaaccaccaccatcattcttcatatcagcaccaccattcgacagatctatcgggcgaacaggagagaggtcgaagagggtacagattcgagagtgtactagatagtgtgcccgacggggcggaaggagatgtggacgagcagggagttggttggcgtgaaggagatgatgacgaggcggatggaggagacgaacgagtcgagggagaggacgaggatgaggacgaagaagatttcgagtcggacgattctttgcctactgttccgcttcggccgttctggaaccaagtcggagggcattcagccatttacaagttcacaaagcgagcggtctgcaaggttcgtacacataccctgatatgttctctggtcaagtcatatcagaagagctatgtttaggggagagcgcgcggctcataatttgcgatgttatgtactaattttgaattgtttccccccgaaataaatctatgaaaagccgcttgcctctcgggagaatatcttctacgaagcagtcgagcgagaagctcccgagttggccgggttcatccctagatacctaggtgtcatgcttgtcaactaccgacggcaaccccgtccgcttcctacgtctgcagttgttgagtcgcctaatggcaattcagccgaagccttagatgggtcgtcgcccatgcctcagccttccctggaagcatctgccccatcttcccctatcggatcttctcgtccatcgcttcatcataaatcagcttcggcttcagcctctgtcgtcaacagtcgcccaacgcgatcttacttttcggatgacgagattcctgaggtatctcttggtaggaaccggcacgttgttccagaatggatgttgaagaatggaatcaaccgaggtctgaggaagtcgagcgacgatgagcggtcggcgacgttcggaagaggtcgagctagaacaaaagctggcctaggactgagtccgttagaaccagcaaccagagagggaagcacaggagacgaaacagacgccaagcttcagatgactggtaaacggacgggcaagaggcgaagtttgggaagtcttcattcagagggtcgactcgacttttgctcaggctccccggtcgataaagaaaaccggcggagaatgtctagtgccgacaaagaagatccaggctcttcaccttcttcaagcttcaatcccccgacagatcgacactttcccactttaatcgccgatagattcgccctcgatcgatcatccactccacaaagactctccccgtcattctcaaactcgagcttaccatctcctgcaccagaaggaatgggctcgacaatgatcaacacaaagctgagggatcacgtgtttggaacgattgctagacggtatcttcgaacgaaggaacggtcgcattggcatgtgcccggccaaccttcgaatggtcatactgggtcgggaccttctagtcgttcgccgccacatttccttggatcaggacacagatcaacaacattcggtggcattgattcgcccattccacgcgaaggagcagacttggacactagcctgttagggaccacctctttgccaagttcacctctacacacccccaagagttcgcctcagcccatcccagaggacatgccgacaccttctcgtcacaccgctaccaatccccccaaccctgccttgtcccctctttcatcattgacgacacgttctatcccagagaaatctctttcccgtccgtctcttcccccagacactcaccgatcatcccctgcagtccctatatcccattcggtaccgcctctggaggagaacgctccggtaaccaggcaggcctacttcattctgatggaagatctgactggccgattgaaaaagccatgtgtgcttgatctgaaaatgggtacgaggcagtacggttatgatgccacgccgaacaaggcaaagagtcagagaaagaagtgtgacgagacgacgagtcgagatctaggagtaaggatttgtggaatgcaggtacgatcatctttctctttgtttggtcgagatgaccacctaaggtgcgagtattccttactaaccggtgttttctcgttttttttttcttttctttctcggatgatgatgaaacaggtctggaactcggccaaagaagagttcatctctcagaacaaactgacaggccgaaagattaaaacatccgaattcaacgacgtcctcgcctcattcatctctgatgactctcgactgctcgtccaccatatccctaacactcttcgcaaactctatcgtctggcttcgatcttgcacaaactgcctggcttccggttctacggttgttctctgctattcatctatgatggtgatccagatcttcaagagcagcttcggttgacgacggaagattcaatcccggtttcgtacaaaccttcaatggacactggtccgggaccgaacgtcacgaccggaggctcggttgaaaggagtctctcgcgaccaccagtcagacatcatcagcatcacgaccatcatcaggatgtgccagaacccgtccggaaacgaagggattctgagacgttccctgaacgtcgatcgagatctgctgaaccgggcaaacctcgagagatctctacgaacctacactcgaaccgaacaggaggaccaaacccagcgactaaaggcgagctcaagatcagaattgttgatttcgctcatacgaccaccggaaaggattacgtgcctctccatccgtcgatggacgatgacatcgatccggattcgttagggaaagggtacaagacggtgtttgatgcagagagtggaaaagcaatcgctagattcccgccgacgcatccagacaaaccggatgaagggtttatctttggaatcaagaacgtgtgtgactcgttgattcaaatatgggacagagaacggctggcaagaaggaagacgctcaaggcaaaagagaaggaggagagggacctagctggtgctggcgtaggcgtaggggccaagaccgagtacgctaccgtctctggggacggaacagaacaagggaagaaggccgacgaacgcaggctgatacaactaccaaagttggacctcgaagagggaaagaaagtctgggatcgagtcttaccgccaaaggagattacggaccaggattacttttctacctgatcgttccgcctgcccggcctcctgttcttttattgattgttacttctgatcttccttcagcgttttgtttattcatgattgtacagaaacatcatcgatacatgttttcccccctttatagaaacatatcctctttgaatcaagatcaagcaattcccattctgttctctttcactcttcactttttcttttactcttgaatttcagcgaaatttctcgtagtccgttgtacaaaaactctctacctttcttttacctctccgcttctactttttacgacatatagatctcattctcactcttccaaacctttctctttgcatttgttccttttctttgtgtcttgttacatatcgaatgaagcttcacttctttgcttttcttctgtctgctcttcatgttctatattaatttaacctcggggttccaagatacagatcaagttacaaagaagatgaaaaagattcttgagtaaagggaggatggggggtatgataattacacgtagtagtacagcgtattcgaatcccagacaacagatgatagacaacacacaaacagccagaagaaagaacttcacgaagacctttccgcttggctgaagtccatcttttgcaggagagccatcttgataacctctcttctgaaactctcagtcgtttcgaactctaaattttctccttccttctctctctctttctctcttgttttgctcgatccttctacttctcgttgtatggcgggccctatcgaactcatgttcggtccagcgtctgctgtacgagctcattgagcgtcggccaaatctcatcgctcgtctcgcctttgagggtatgagtgatactagggaaggaatctccgtagtactttagtaaagggaaggtttgttcgttgtacagatcaagtcgacgggaaaacacctcctgtttaagggtttttttttgacacaacaaaagtaagagattggttggtcaaacggaaatttctctctttctctgtttttcaatgaaggaacggacgaacaggtgtgtcatccggtcgtttagtgagcgcctcgccagtgatatcgtctttcccttccaccgcaggcttgttgtatgtcgtgttgtaaactcgtccggatgggatgtggatccatcgatctgcagaaagcaacatggtagaatcagattgagcgggcgggattgattattcgatagaggtatcgtcgaggagacacagaaaaagacaacaaaccttcgattcgtttcaagatcacatcatcactcaccgctaggttgacgaccatgttcaaccctttgccctctttgatgagcgcctcgtccaacatctgaccctgtgcaactgttctgggaaatccatctagaatccaatgcgcatcattcaagggccgaagagcggagagcgcgatatcgagcatgatcttttttttttaggtacacaattaaagtagttgtcagaacgatttgaacgaagagacaaaaccagaatgtttagaaactcacctcatcggacacaaattctgattgcataaaagatgggcacggcaggtttattacaacgatcagcgctccgctagacaacatctcttactatatgggctgtcaagatcttgtcccaaagagttccatctaactcacctcctcgagctaccagaccctcggctctcttgcctacttccgacttgttcttgatttccttcctgagcacatctccgactgagaccaagttgacgtttgggtacgagtccagaaccatctgactcaaggttcctttacctgagccctgatagtttacagacaaacaaacaaacaaacagatgaaacgacgagccggtttatgagtgacgatggtagacacgaagcacgaaactcatgatgcgtccctcacaggttttccgaaaagaaccatgcgaagaccaggctgagaaacgccttcgaatgaactagaaggacctatcggggtgtatgtcgtttccgatgtgcttggcgtcgagatgatcgttcgacacgagtagaactggttggctgcacctgagcaagatattctaggagcgctaccgaaccagctggccgacgggaacctaagcatggacgatctcacagaagctgttgccatcctgagcagacgagctaaagggttgtgcaaacgaagggagaacgtatgtaggatgaggaaacgagattgatggtgagagggaagatgaggaaaagaagatggggagggataccccaaatgtggcgtttaaaatcacgtgatacaccaccgctttgggtcagattcaaaatcttagcagtcccatcctacggccggccgtttctctttctctgtgtcataacatacccaagcacacacacatacacatacacacacgcacgcgtacagcatacaggaagcgtgataccatggctcctacgtctaagaaatcaaaattgaccatgtcgtcggcttctctcgccgggggatcttccgccaaactaaagtcgaagtctagcaagagggaagaagaagtagaggaccggctgagcgatttggataggtcaggctcggacggagaggcaggtagtgactttggaggcgacgatgagttcgacctgggagaaatgagtggtgaggagggcggagacggaggaaagatggacacggacgatgagatcgaacaagccaacgagcagggtggaaagagcaaaaagacggcaagtgagtgtatttttcttcgtgcactgtaagatctgtagaaggtgatcatcatatggtcttccaggttgaccgatcgactgactgattgactggtgttcgtgcccttttgcttccttagagcgtaaaagacgagcagcctcgccatcgacgttcggaaacctcctcaccaccattcttgacaccgaccctgttacctcgttcactcaaccttcttccctccgaccttcgaaaccaagctcaaccaccgcgaacgtctcggcctctgccgtccaatctcaaaacattctttcccttgctccttccgtcaggaagacactctctgccagaaagcttgagtccagagcgaaacgggtcttacagaatgccagagtcgagaaggaagatcgaggtcgaatcagagatgtcttgaccggttggggaggaaccgagaacggggtaggaggacaggattgggaaaggtcgttgagaaaggttgctcagaagggagtcgtcaggttgttcaacaccatccttcagagctcggcccaggtcgaagaggccacagccggaaagaaaggtttggccgctccggagccgttgccagatccaagaaagggaaagaagaaggagaaggataacttgttgggcagaggaggcagagaacgtgaaggtgccagggtcactaaggaagggttcgaggctttgctcaagggaggcgcatgatgaatgcgaggtatcgtttgatcaaaatatcatttacacactccttttgcagagtttagggaaaccgctttgcgcttgtccttcctcaatgtcttcagacggtcaagacaagagaatcagaaacaactttgaaaacatggacatatatcatccccatcctgaaactcgttcgactatctatttccctccaatcttgtatgctccgtagtccttctccgggtcatagacttcccagcgcgacgctatcagacacggttgtgaggtatttcaaggaaagataacgaaaacagagttcataagattaatttttttttggaacaaggcgaacaaaaataaagctgtctataaagtggaagacgaacctgggaagatgtgttttgatcgattgtaccatgaacgctcgacgactttaccagcgtgagactgttcaagttttcaaatgcatcggggaagtgtcagaacaatagccaagaggtttataggcttgaaacacgaagaagagataggagaagaagaaaaagaaggctgacctcatctttctctacagttgcatcgtgaatcaatcgaacatcgtcgtgcacatcaaagttgaacaacggcccagactttcctctagctttgttaacaatgaaatcatagaatgtataatgctgcgaatggcacacaatcgtatcgatacgattcaagaatatatcaagaggtcaagatcggtcatcagctcgaaggaaacggggagatcaggaagagatgcaaacaaggacaaatttacatgtgggataatgagatcttcctatagacgctcgaatcatgatgccagtgaaagccaaaacagagcaggtaagcggccgtcaagtagaaaagagagagagagggaagaaaactggtcgagaatagacttgccttaatgtacatcagattgtccacgctgattcctctcagctcagggaactgcagccgacatttttccaaaaaggttgcgatatcgtctcctttcttgcactgtcgtcgcgtttgtaaaggtcagtacagtgatactcaacgatcactctcccatcgtactttcttctgagcaaacaaagggttagctggaaagatgaaggaacgtacagagaccacacgacgatgacctgctccatcccagtacgaataagtgatttctacctcctcattcttgagtttctcttgatccttcagccactgtacccgaagctcctctcgttctaatcgctctcgggcctcacggtctcgatcgggcaggaaagatgtatcgactgtcgggttcttcattactttactcttcttctttggaggggctgggtgggtggaccaagcacaatagagatttgcataggaagtagatggaatgaaagggaagagttcagctttctctcgcaaggtaagatacagtgagaaaacaagaagagaaacacaaacaatctccgttcgcagctccatcttcttcgtcatctccaaatgacagcttggccttttccttctttttcttcttgatcttcttaacctcttcaacactaagaacacgcgtcggaaaacaagcaggtcttgttcagcattcattctgaattccacattgctgcttgatcaagcgattgaatcaaggtaacgttgttcaaacagacgtacagtgctccggtctgagcggtgagcatcatttgttctgcctcgagtgccttccgcttctcttgaaagtctttcaagttgaccagtccgacggtagactttttcaatcgctcatccatggattccacatgagccacaaatctatccgcgccggcattcttcttctcggtttcctgatgaggtcaaggacgttgttcaaaggatcacatataatcgaacagttctgtctctatcagcccggaaaaaaaggaagaagactagaaccagaatcgactgaccttggccatggcggccttctccttctcgaacgcctcgagcatttcctttcgcttctcctcgaggagagcctgtcttcgtttttcgctagagtgccaaccaaaacaaacctgataagtctaaatcttaacggctgggtttaaacctaaagcacatactcgtgagaggaggacatggctaaatgaacagaaacgacgatggtggtcaacacgatcaacatgtatcccagaggtttctaggcgttctcctcaaaaagaatcctgtgggaaccccgcaaaataaatcattttattttttgccttccgttttctctccttccttccaacatccatcatctctttccaagaccatcagttcagcttgctcgctcgctgtctttatctacactcactcacccactcacctacacttactcacactctaatcagtatggccggaaaaggaggtcagtctgaaattggttttcatcggtcagcgtcgatctgcgctagctttcttgctatttccctcctttttttttttatcctccttcgtctttatgctacgtgtaggaaggtcattggctgatgcattctttttcattctcttccattttctcctcttcccatcgtcgtgccttcgaccactcaaggcaaaggaggaaaggccgtcaaggaggagaacgcgtaagtgtattcttacctcgaacattcttgttacactatgctaacgatctctatccatttacgtcatcttactagcaaggtgaactcgatgtatcctgaaatctggcatctcactagatacatgttctgacgaccttgattatgtccatatcttgtttccgttctcaaggtcaacgctcagaaggccaagtgagtttaaatcatcgttgtagtacctcacacaggatctctactgaaccattcagcctgctcgttcatttctttccaaactactcagagaagccgctgctgccaaggaagctgaccaatggaaggccggatccaaagtcaaagatacctccaaggaggaaaagcgacttgcagaactcgccaagaaggaggagcgagctcgactgcttgctgctgtacgtttaacactcgacccgtccagcacgttctcttcaagaacatgaacactgacgaaattgcctaacgtttcttggcacaggaggaggcctcgatccctaaggccaaagtgaagcccgcgatggccagcaagaccaaagcgtccaagaaggtcgagaagccagccggaccaggagcgatcgccgccggcggaggaatcgcttctaccgtgtttgttcccagtgtggaggtcgagaacgatgatgagacccctgttgctgtacgtcttatatctctttgcctaccaatacaatgtatctgttcgagtgtcaatcactcactcggttcgagtatgcggattacttcttatactacagcatctacaagctaccggtatcgacgagatgtgagttgttgcattatgtgttcagaccaaaaatctctgaaggctgatcgggatatgttctgcgttctcttcaaggctcgaggcgcttgagattgccaacgctaagagtaagctttcagaccttgtttgtcttgacttttacgatagttttcgtggactaactgtgtaatgaacgggtatttttttgttcgtgtaatcaggcgacaaagtacgttcatgtcgctacatttcatactgatatcaatgctcaaactcaagtcttcctatgatctcttgataggctgctgttggtcaaagggcggctaacctcgaggctcatcccgagcgacgatacaaagctgctttggaggcctacattgaggccgagttgcccgtgatcaagaaggaggtaagtctttttcttttgtcaggcacagtagcttctccgattcaacccgtctagcgcatggacttaccgttatgaattgcgtcggcggtgtttcagcaacccggaatgaggctacagcagtacaaagagaggctcttcaagcagttccagaagcaccctggtatgtgtatcatctttctttgtagtcttgtttcaggtttactgattcgctctctcctctcaacgcaatctttactagacaatccgttcaaccaggtctctgttaggtacaacgccgataaggaagagaggctcgacgctctcaagggttcgtagtgtttcgtcatgtctatcttgaccgactcgtcgtgttcttttcaactaattcctgatcttctctatggcatctgttcacagctgcaaacgccgcccaggagaagcgacttgccctctaaggctctttttctagcctacatc

SEQ ID NO: 1990 - DNA, 14010 bp, Xanthophyllomyces dendrorhous
ctttttctagcctacatcccctccccctacccccttccgcccttcttccattcctcgatctcccttcttccgttcgatggaagaaggaacagaaaaacatcaacatctccctatgccgtcactcttttcaaacccgctttccaattccaaaaccccaccgctgtatcacgccgagtctgatcgttttcttgaactctgtctagcttttcgaagaacaggacagagcggaacgtgaaaggctcgaacggagaggatggaaatcaggcgaaggaagacgaaagggattttgtgttcttccgacttgaggatagaatcatcttggatgtacttgtctctcgtcttttctctctctctttctttctgtttttctacttctaatttcctattctctgctagcgttcatccatgatgcagcttaaaagttttatctatcgctattcgtgatatatgaaccttttaactccactgcatcttgacggtcaaatttctcttctattcttttctacccatcgtttcgtttgtgattctttctttttcatatgattgaagatatcagaaggcacctatccgaactgctccctcatcctggtcctctagcctcaacctatccaacaagctgtctttccctaaaacgtccttccagatctgagctcttccttctggactctcgagcaaggtccgagatttagcatctttgtaggtaagatccaggaggatatacggtgggggcttgagagcatctgagagaccaagagagtatggttaacaaggcgatcaatgaagaaaggaaggagaggatgcgaaaaaagaagagtgaaaaagacgaactggctcgaataagttcaccgactcgatgaggggttccaactgccagagaaatctttgtcgtcgagagatacgtgatgtgctctgccaatttgaaatgtttggcgaacaactgtttggcgtgaacaacaaggaaaatgagcacagtcggccgattgagatggtgataaagtttattaaaaaaagggaatgtcgattaatattgatcggtcacacgttcttcaaaaggataaagagaaaagataagaactatcaaagaaaaagacaaaccttggcgatctctccgttccctttggagtctccagttgtttttccttttccttttccgttcgtctttcccttcccgtatcctttagccgaaccagtcgagtcttcgccttccaccacaggaacaacacctgattcctttgcgatgatatctcggagttcacgcacaaggtctgcgcatcggattccagaactggcgagaataagcacatgaggagctccgtttactgtgggaggactcttagggaggggcctaggaaggttttgcagcagagaggacaatgttggaggcgatggaatgctagtggatagttgaagaatggcagattcttgtattcatgaaagagatatattcggtgatgagcttgcgaagggtattggtcgcatagaaagatacacctaccaggaagttcccaatcatcccactcaagatcggataaggcgctcaaggcgagtcgttggttctttcgcaggaggctaagcaagccagacgtcgaggaagcctcggaggtcgagttgacaagagttgcttttgtcaaggagtcggtcattcgaagtttcttttttgggtatgaatatgaagattatgggtatagatacgggtgattatgtgtgcgtgtgtgcgtgcatttttgtagtgagacaagagatgaggatacgaaagatcatacggtctaggtcagctaagcgacgtgttttatccttcagtctttcttccgtcgatgacctgagagagagacaacggggacacatacctttttctccttaagcttctctttgtttcgcctctttttctccttcttcttttcctcggccgtcatgttggacatgtctactctagcagatgcacctgtctgaccgtcattctcgtcttcgtcatcctcgtcctcaccatcctgaccgccagcttttcgtttcgaaccggctatcggcttagaggtaggaatttctgggatgagtccctcgccttcgatatcggctgctccttcatcatcgtagacagatccttcaccctcggagagaaattcgtcggctccctgcacgtagtcgtcctctagatcgtcggccatggtgcaatgcatggtgaacagtcggaggtcgagagaaaagaaaggcgaatgaaattccgtgtggggcagaaatttgggggaagggtaagcacgttattttggggctgtgttcacgtgaccaacgcgttcaaagttcaacgccacaatcatccttcaacataccattcttcccttctttctttctctctttcctctttatccatccacccatccatcacccatagcattccttcctatcctcggcacccagatctctcagactcctctctactcttatgtctcaaaagtcaggcgcaaggccgtcgtcaacagctgatggtccgctctccagagcgtcactcgccaacgctcctcagcctaacggaggtccttcccgacggcaacaagagttcaatgcgggaaaacaatatgtgccgttttcgcacgatccggccaacaagggagcgtgagtgttagatccctctcagaagtaaataagacggctgttgttgtttgatcgtgtaaggaatgactagtagagatcaacgcggttcaaacaagaggcaaggaatgtactggcaaggagacgcgtctgtgaacctggttggtcagctagttggctagctagcccggccaccttagcaagagaggataaacgaaccaaatatagacaggcgagtcaacctagagattctctttaggttgctattgcactggaaacggatcagagttggttgtcttcgtgcagcttgaacaacttaagatcatgactcgtcatttcctctacgacgcgctccttactaatgccatgatgcctcttcgttttttcttggaaaatatatgatggttcatagaatcaccggaaagccaatgcctcaaaacgtacctcgtcgaggaccagacaactttgaggatatcgatgagttcttcaaatctcccgccgcaaatgcctcccgattcggcggtataaacttttccgccttgtcagacacgccaggaggtccgagtagctcgccgtacttgagtggatccatcacccggtcaggtagaagaagctcaatggatgtgaatgacgtggtcaaccaggctctgagaagggacatgagagaagggatgggagagtcactcagtccacaagagaagggttagtgctttttgctcggttgatctcgcccactaatcgtcaagtacgaatgagtatgaaaaaaccgtccgcgcggtgaactctggggtatccaccagaagattccgtgctctaaggctcattctttttcatggtcttcgttttcaacttgactcttagatacaccgtcgaagagatatatgccggtcgttcggagtacgtttatctaatttctcttcttcaccggatacatttctaatcgtgaatctcatcgcgctcttgaaactcttttttcttttttccttttccgaaaacagccgcatcagcctccacctcgttgacctctataacatcatcccgaaaacgaagtgaacctcagatttctgctgtcttccaacagtcctacgactcccttccttctcccaaccgatcccagagtcggaaatctagtcgaccatctcaagcagtttcccagcgaactatcgtttcagatgaagctcaacttactgagcggggtgatgatggtgagatcgaggccttcagaagaactgatgcccgattatctcaaggtcggcgctcgtctgctcatccggcgcctcggacgttcagctctcccttgcgagatgagttgacaaagccggcgcctgcgaatgatgcgtcgttcgcagccgatacaacggagtacatcaatggcgaggactttggaggcggacaagacgtgtattcggatgatgggattgaaggcgccatggacgagacgatcattgatgagggcgatagcaatttgtcgatgccccatagtctcagtcccggatcaggtcttggtcaaaaccaggtagaagaggaagaggaagaggaggaagaggaggaagaggcgcctgtcagaaaatacaagagtaaaggaaggacttcgactggatcaaacggatccacaaaacgacctcgggtagtcactatggacgaagatgaggaggaagaagatcagcatgctcagaatgaacaggatgattaccaaactggagatgctgccgtagacgacgtttttgatgatagtatacagtacgagaatgatgagtctgatcatgaggaggccccatcgcgcccgctccctgtccagaaggtacaaccgaaaaccaaagaggtcaaatcaaggaagaaaccgaaagttacacctgcccctactgcccgtcatagtaagtgcattctctcagtgctctagataatcttcttctgcagctgactgaccataatcgttctcttctttcatatcttgcgctgtatcagcattcgtggatgccaactctgatcacgatggagaagatgatggttccggtcaacggaaatctcgacgtcgtaaattccctgtcctcgagtattggcgaggggaacgagtagtctttggtcgtaaagaacacggaacggccccggttccagtctacaaaggaataatcgatccacccaaaccgcctccgcaacatctgagtcgggtcggccgagcaaggagtaagaagagccgggcggggtcttcagttccgagaggagcgagtgtcaagcgtgagggagaactcccggaggagactggttgggatcaggacacgagcgagatgggtcttgtgatggattatgtgaccaagactgacgttgagcgacgtaggtcctcccttctccttttactcaattaaaacggacctcggagatgtttgctaaccgcctgatgaattgcacgacgttgtatgtcttcctcaaatctacaggaattgcctatccatcgcatatgctcagctatcgaacaatgcctggagatacaaacggattcaagtttcaaaaggtcttgggagacgcaagctttgtggcctctgggatgcttgagattcctgtggggagtgagaaacctagcaaaccgacaaaagacaacacctacgtgagttgcgtttcttctgatgttcacggttggtgttgtgatatctggatcgagttacccaagctgatgtattgtttggttcaatagctgttcatcgttttggaaggagcggtcagcgtgaagatccatcgcacgatgttcaccatggctccacttggccaattcatggtaccacgaggtaagcgtcagaacattcgatgactgaattgatcttttttcccaaaggtagctaaacatcgttctttcattcttcatttggctcgtgtcatagggaatcaatactcgattacgacaatctctcgtcggcccgccaagctgttctttgctcaggcgagaaagatggcagcggatgaggatgaggtcatgccgatcggtgcgcctccctcatcccatcccacgtctaggaaaggagacgttagaaatgcagactagatagaatgaaaccgaggagcttccatgacccttgcgcgccgtgctctcctttcttgcatcgtccgttctttctttaccatcattgttatctctagcatctttatcacattgtccatccgttatctatcctttctctctctctccccatttcttcttcgactttgtttttcggtttttgtgtttcactctattgttcccttgtacttctccatcatgttttcctctttcttctttttctcgctcacttcctatcctttttcgttccttcgtcagcacgaccaacatacccttttacatgctctactctactctaataacttcacaccgttgccgataaagaaaatcatatgcattgtctgttttcgaactcatctggacatcgctacttgatcgacacgcgcgctcttgcaaaatcgcgtcggtcgtgcatatgaatctcccggccgtgtctgagacccgactcgctcctcgcctcattaccatcaccatccatctttcgacgctcgccaaacagctcataccagcctccacaagcttctgggttgtatttgtaccacacgtcgtgctcaggcgttcattgagcttaaaaaaattggcatctgtgtatgttctgtcctgaccgtgtcgtctttctttcgctcactccagctgactctatacattatcgaattcgcttatgctagatcgcacccggacgtcatgaccaacatgttctcctctggatctccttcatcttttctcctgtctcttctcctaatcctgacgattatcctccagatgatcaaccccactctcgcttcacctacaaacggtacctctcctgtgttgatcagaggaacgaatccacgtcaagtggattctggaccggcgttccctacgacgacagagttagctcagaacaaaccgtcccatcaagatttcgattgtcggccgtttggagaatgtgaacgatgtccggcttcgcaggtttgtctgacactttgtcttatctcggtgttcatcggtgttggcctcgtcctgagtcgttagctggttcaaactcaagacgctaaccaagctcattcacttgcgtcgttcggaaaacgatttcggatgccgtcatgaatagagacacgaacctttctgtcaaccgtacgggaatcgtagattactacactgtgtgcctaaaggaagccttcatcaccctaacaacccaggtggagatccgtctaccagtccgagttcacatgagctgcacgagaatgagatcccggcttgggaggcatgtgggagggttgtttcgaaagaacgaacagattactgggaatttgtcgtgcgtttctcctccttcttcttcttcttcttcttcacatgtctcatccctcaagacaaaactaacgaaaagtttcttgaaagacggtaaacatgctattctttgtgctagcaacgactctgatgctcctccgaggtcgaaagctggcgacacttcaataccggatgttggccgctcggatcgggatacctggtacaggtggaggcagtcgattccttgggttttctttatagagtggtcggtcgagatgaccgtctatgcgaatcagttgggaaggagatttggatctcgatcatatagtatttaattgccaaacttgataacttaggatgattcacaatgtctggctgccaaaggtaagttacgtgggtgaaggagcacaacaatctttcttgatttttgttttctcgctcctagtcgagtttctttcgtaaaaaacaagacgggatctcatcatacaagaaacaagaacaaggaagaagaacatacaaactataagaaaaatgacaacaaagaggaatggcaagacaacagaggattcaaaggaaaagaggttgatctctctgcgcgttttggtcggaagaacccattggtcgacaccgttcgcactgagaagaaagcatgatacaaccaagccggcaagaagacaaaagaggagggaagaaggaaagaagtgttcaagacaaagaggggtcaaaaaggacaaggaaggcctgaaccatacaaggatgaacaaaagatctctagtggtgagcgtcagaatgttcctgttcatatcgaacgccgctgtagattgttttgattcagttggaaaagctcaagtcgatgtcagcggagatcctgacaagtcttatttcctgggcagagagaaccttagataagactaaccagtaaccgcaactgtagtggttttgtatttgaacgtttcaggagaggccggtgaggttttgatgaaacgaaggcaaagaagcacacaaaagtcaactttactgtgaggattgctttagatggggttaggaatgagatagaggaaatccgacacgtacgatcttgggccgggctgatcgagattgatgtatactttaggatgaccaagggctcctcctcctattcaaaccagtaaaagtgttcaaaacatagacattcagatgatcgggttcgatactgagttggacgagtaggatccaatatgagaaagtctgtttcatccatttgggccggggcatgtctggtcggcataatctgcccagatcctcgccttcctgatacagtgacatggtctgtatccctccatcgacacttgtggttcgtctatccatccaaacctaaacttcccttccatccgtttcgttttctttgcttgctttgatcggtctcgctttacttgatagaaggaagaaagaaagagaagatgaactgaccaccatcacacacggccttcctgccgtgaaccatgatgaccgggacctgagagatcatctccatagcactctccggcttgggttggtactcgaggagagtctgctcgaatcgagccccagtgaatgcaaggtttcgaggtagctgagatggcgaccagctggatagttatcatcagacggagacgacaaaaaggaccagacaaacaagagtagaaagagtcaatagatttttcgagggcacacgatgaagatgaaacaagaaggaacgagcgaaaaggctaaaggatacactcacgtcgtagcgtagttaggactctgggcgacaagactgccggtgggcgtgttcttgttaggaatcgtgagaggagaacccgttgcggtgtttggggtataatcagccaaagagtttgccggaggtttaggcgaaggggactctggggtgtccaatcggaaagttgactgagagaacgctctggaaagagggacggatctacgggcgacgtatcgagcgagcatccttgctatagacgagagaaaggagagggatgaaagagatgatgggatggatgatggatgggatggtcgtttgatggtctttcaacagaaagacaaccaaccggaatcgaagcgttttagaagagatctctccgagttaaccctaacaggccacctgcgtggagcccatcaccttctatctactgaccactgaccgtctggtgctcatcttgtacccatcttgtacccatctgttgctcacccctgaccattagacgaccgttagagaccacatgagttcaaacaagtttgtgaaggcttctgcttgttgaaagaggaagggaaaaggagatgttgtgcgactttgtctaacaacctttttctgttggactaatttcatcaccgcttggccatctcatatcccttcttagtcgcatccgactcgtcctatttgacgcattcgacacgctcgttagtagttgtatatagccccgttagtttagataacatgcaactactcactccagtaacactctctcgattagctcacaccgagactgccgattcatatccagtatgcccaagaagctagacgggcagatctggacttgacggaagatgccattcgaaaagggtttcagactggtccggccgttccttatgattagatttcacccacccaagctttctctcgcttgtcaagactgaaacgatcgattccgactcttcgttgatgtgtcaacattccaaacgaccactagcatttccggcgttgaacaggcgattaccgctgtacggcgttcgagcgaacccaccgatcacatctgcagattggtggacgttcttgatcagatccaccttggtagatgccggagttccacctgatcgtccgtttctttttcttgctcctcttgtgcgtggagtatttcttgactgacgggcaaagtgatggaccggatggccgttttcctcattcaaacgcaacgctgcacggcgcgctacgaccgtgtgagacagatgtctcgaaagcgctacccacactcgcaccgcggttgatcgacaggttcagctcttcggaaggatacagatcgttcgacgatacgatcccctgtctgaccgcgctctcacagatgggtgtccgaactggtgtcttgtcgaacgctgatgatcggatctgttcgccttttcttctccttctgtttctttccttctttgacttactctcctgacttgtagaagggcaaatggctgtccttttgtgtgtgtgtgtgtgtgtgtctcacagtgatggttctcgactctttgtctataagcccactcctttcgagccccccgacgctgaactatacatcaggatattcgaagcctgatgctcggatctttcatttcgcgattgaccaagcccgagccggccgtcctcttgtctcttccggatacgagggtacaggcgcaggtgccaaccctcactcaggctgggcaggagtggcagagacagacggagaggacacgttgaaggatctgaagccggaagaagtcttgatggtgggcgatgagctagaagcgtccgtctctgtctctgtcttctcttttccttctctttcctttctcttcttttctcttcttgtcgtttgcttaccgttatttcaccctcgcttgctcaccggcccggctctctccctctctaaaagagactacaagggatctcttgaagccgggctccgatctctcctcatccgacggccgaccgaaccttcagatggcgctcatcgatctctacctgcccatgaatccgctgaattggagcgtctcggactcggttcagattcgggtgtgattgactcgttggatggcgcgatagactttgtcagacgatggaacgatccgcaggcgaatgcctagaccattttcgtagatcatttcacaacgttggggaacaacgcatccccagttctcgatctctcgtctgtacttcctcttttcttttcgtcacattataaaagaaccggttcatcaatatgaacgaacgagatagtagacatctatttagtggtaaaagatcaaagaaaagagaaacacaggtagcccaataaataattaaagataatgattaaagatgacagttcgagaaagagaagagaaccatatcaaggttaaaaagaaaagaaaagaggaaaagatatgggcgatagctcaatagataggaactagataaacagttgaagaccttgggtggcgcgttcggcgttccaaccgaaatcatccgtcgagtgtccatcgcaaggggtgtcaaagtcatcgagtaaggctggttggggaggagtgacaagctctgggccatcgtcatcgtctgacagatcatcgaacggaacgatcgaggtcgggcgtttcgccaccgggagcggcaggaacaactggggagggggcgaatgacgaggcgaggccggtcgagaaggaggaggcgaggttgtcgggtaggcatggttatgctcagtgtcttccattgtgaaagagagcagactgtccaccgagcccgttagggacgacatctcttcgtcgtctagatcgctttcgtcatcgtcatcgtcgacctcttggacttgaacgatagccgaggattcggacgagtgtgccgacgccggcgatggcacagacatcgaaccgggagcgatctcagagacgtcaccctcgtcgctgtcgagctggccgagagtgttctcgaaccattcttcctctcgaagtcgctgggcattgccggccgactcggcaacttgaatggcgttaaagatgaggactgatcggagtaggacgggtgcgtcgaccgggaggtacgacaggtactcaagcttctggtgggacagagctatcaacctttgggaccctccgtgggagtctttatagggaaagaagaatgaccaggggcttgataagcaaacagcgtcaaaaggtggagataagacgagatagagaagactcactgggttgtgtgtggaacattcttatgatgtaaacgttggatgtacaaacgagatgatacttgaggtgttctgagtttttttctgtgtgaactagaattgatttgtgtaggtgtttgcagtgttcttcagggaccacaagctgggaaatgatgccgtgtatatgggatttaatgtgaaggcaacgctagatgcttgatgtcggtagaggtggatcgtgtgcaaagttttcaacagaaggtttcggactgaaaggcatggtgttctggggaaggtgtctgaaggggtttcgaaaaagagatggtttcttttgtggatcgtctttttgttttggctgacagcagttggggttcaagtgggttcaggaacaggaacaggaaggaagtgaaggcgaaggaagtcgaggcgagagtgacgggaggaacggtgacaggaaggaagaagagaacaagagagaacattgttagtcaacgtgttcgagggctgagcagtatattcagggcaccgagtgaagtcagaacgaccccagagggtgaccaccttttgcaacagccacccattctcggagactatccagcagcaccacgtattcattctgccagtactcacctttctttcgtgtttgtctggttcgtgttcttagtttaacacatcgtgggcaaagagtatgatgatggggatgggatgaaagtagtttgttgggttggggagaaagaaagaaaaaagaagagaacgggacaaggcacggcctgtgggtggattatatacatacctcggccgagacggacctgtagagcacgaaaggtgactcgatggcgaaaaaagacaacaataaacgatcgaaacacgccgcggggaggctcgggcagggcggagatggtcaggcacaaaccggcagggcgaacgttcctggccagaagacaacgagtcaggggcgattaacccgagttaagcttgagtttatcttaagtgttggatttgactggattcgtatggggctagactgttctcgcctcatttattttttcgaattaatttttgattccttttccaatacaatcctctagtggactactctcaaaagatcagtcatcgttctttcgtctgtcgtattggctgcattccctcgcgttagttcatatcggctcatactatattattggctcatactgttgtatcgcttcttagattagagttgtctcttgctatttcattgcccctccccattgtatcagcgcacacaagcttggtcatttattctgttgccatcggtcgtcgttgatttggaatacaccctgaaacgttccttcttaatttgccattcgcacaaaaaaggacaaaagtccatttccgaattccgaccgttcatcccttaaacgttctgcttgccctcttttacatcttctatatacttcctatacatacttgtgtacatccctaatctctttcagccgccggtcttgccagccaactctcgtttcttccgggtctctatcttgatttggtcaaaccgttccctgaactttactagtgatgtcctctatcaagccagcaagaatgtagacacactcaacatcagtatccctgttggacattcttttggaaaggaagcccatagacactcacctgccgctcgttctccatccggagttgtagcacttgtctctcgagttcccgaatcttctgttgatctgtttaggaaagagaaaaatgacgaaagaaaaaaggagaaacccatctgtcagtacccggattcgatcaaagacaacactccaagaagatggaaaggccgaaccagcaggtaagctctctgtgccaccgatcaaccgactagcctccatcactcgttcttcctcatccctccatactctctcgacctccttccgtaaccgagtcatatgaaccggactgatactctgatgaagaaagcccgaacgaatacctaggttattcatgaccgatccagagtcgcctctttgttcttgctctcggtgttgccgttgttgttcttgttgttgttgctgctgctgcaacccataggcatgcgaggccaaagcatcgagcgatagacgaagtgactcgttctctaataacaattcttctctcgtttttgaggatggcctgaggtaaagggaaagaaaagttgtctcgatccgtgatctgtctacacctctatatatatatatatataag

SEQ ID NO: 1991 - DNA, 703 bp, Xanthophyllomyces dendrorhous
atatatataagagtacttacgctcggtcctctatctcaacccttgtcttcccatcgctcttctccttttcctttccattcgtgctcgaataagatgaatggtcgacctctggcagcaggcagaaagaatcctgactcgatcgggaagacgaagtagatctcgaaactacacacacatatacttgatctttttaggacacaagtacattcacgcgcatacaacattttctgccctcagagaactcaccttttttccgggtcgactttccagtcgatcgacgaccatcactactactgccgtccggtttgctcaaaggcaatgaagaactaggcgaggatgaaggtagaggcacagatagtcgacctgtagatggatcgatgatagatcccagaggcgcacttgcgaatgctacagccgggttcgaaaattcttgcagcattcctttcgtcgtttttgttgatcaagagttttatatttcaaagaaaaatccgtcagcaacagagagagatgataatgattcgatacaaagcacaccttcgactacgttccaaaaccgttgaaaaggatcggcctacagaagatgaaggatatgcgaagcgagagagaaaagtttatcacaccctcagcgcacagattttccggatggtgatactcatagatttgagactaggcaagtcccatagacagtgctaaccttctgatc

SEQ ID NO: 1992 - DNA, 20050 bp, Xanthophyllomyces dendrorhous
accatgaaagagcctgagatggccaaaagaggaaaaaaatcggaagaaggaaaaaggttcaaactctctatcgtttacggaaaatcgaaagacaaacgaacccgtagtaggcgagccagaaatcgattcgctctcctctcggaacccactgccactgccactccccgtcgcactcgcacttccagtcacacttccacccgaactgatcttggagaactccagatgccgctgaatggcagctcgctcagaagcctgcctcattagcccggtcctacctaccataccggtcggactgggaggcactaaagcaaaaggaggcgtgtttgggagtgaatttccattctcgcttaccgatgatctgcttccctgtcgagctcggggtgttatcggcgaggaggaaaatggagaggcagccaatcgatttggactagaacttggtccagaactcacactcggaattgacactctacgagatgaatccaaggccagtcgatcctgatgtgctttcaacgcccgaagcgctcgtttggcctgttctccgatacacacaaccggaaagagaaccaaaaaattcatcagaacgcaacgtctccactcatccggaaacacatcaaatctcaccccttcatccttcacaagtcgttcggcttcggcaaataatacagctgcttcttcgtgggccgctctggcttgaacgtgttggttgagtgacgtataaccttcggcctccgccgctttcttgtgagctcgaggtaacggcggtgattcagttggcatttcttcttctcctatcttctctccttgtcgggaagaattcgtacgaagcgaggatgggtcaaaagctagttatctgtgagtttaaggaagtggagatggaaatgtgctcaagatgaatggatggtcggttgagtgtgtggcaaaacgaaacggattcatcgtcatcaaatgatccgcaggcatgtttactcttaatcacaaccatgaccctcaaatccgttccctctccagagataacttcaaccatagtcgaagcaacgaaagaagaggaaaaggataacaatccaattgtgattatgacatagatagcgtatagagagaactatcataaaacgtatacatcagatgaacgatgtaagggaatgaaacatacataaggcataggggaccgtacacgcaagtcgatagtcaaactcaagaatagaaaaaagaaaagaaaaagcacagcgcatccttccgattgggagagaagaaaaaaatgaatccacaacggtagctcaacccttcaaagtccctttcaaacggctagtgaggtcttacatgacctgtgtcatcagataagaaagagaagaaacaaaaatcagatcagctactcgagagcgcagatgtccgaaaggtttccgaatgaagaagctcacccctccaaagccacctcctgctcccccgaatccgcctcctgctcctcttccgggtctaccacccaaacccatacccccgattcccatgcctccgatcccgcccatccctgggttccctccaccttgacctggaaacctcacacccatatccctgttctgtcccattccaggtggcataaactcatcgttgtccggctccccactccatccaccacctacaggcccgcctccaccaaaaccgccacctccaccgggaatacttcctgagaacggtgacacaggatcgaatctcgctccttgtggatgaccagggaacggaccaggctgtctttgggatcgatcggacgacggatggaacagtggatgagaaggatccatgtacatccctccttgagggttcatcccgccagaaccgagaccgccgataccaccgataggagggaacgtcgataccggacgataagccataggcgaagcagctagaggatccaggtcagcagcgccgatgctagctcgggacggattgtcaaacgtttgttgaccagtgttataaggaggagcagacggcattgatcgttccaagtttccgacaggttctgatcgtgattcttggagcgatgagtaagggggttgctgccttgatgaggacatatttccactgatgcccctttccttgctgtcgtataagaaagaaagaaaactctgatcacgtcagcactcatcgtttgtctaataagagtacatcgacaccaacctatcctctgtagattcctcttgatcttcgccctgggaggaatctaacttggaaagaatgtccttttggtacagctcaatcagtgtttgaagcttggaaggagacacaaagagcgggccgatctgatcggcgttcgtcttgtcagaactttgcgaagaatcttcaatggagaacggaaatgagtcaatcgatgcaatgtactcggataacgggatagccagatgatggttgttgtccttctaaagaatgctagaccattatgttgtcaataaagagctatcagtcatcgaaaggagaaaaactcaaaccttacctccacgtctaacacgccgaccacgactcttccacctcttccggccagccagaccttgaaagtaccgggaccttccgctcggatatattccaacactatctcccctggcgcgtctttggaccaggcagaaggaagaacattatcagccgaggaagcgagccggaagcctgctctagcatgtaaagtatggatgagcacgcccaaagcttcttgtggcgaggagagcgtcaagctagtttccgaaggcaggtagcctcgaatggaatcgtacacatcagagttaactgtcgaggacatttctgtaagcgtgagtaagtggatcagtccaatgagcaagaacgaagtgatggttaaagacacagatcgttgaacccactcatccatcaccaccaacaccaccaccaccatcacgatcgtcatctcttggttgatgttgaacgtggaaggttgaagcacagctttgttgaattatcaacagtgacgtttcttccggcacgttccgggctacagcagaaaaaaaaggaaaaaaaagttgaacaggtttaatcaaccctggttggaggattcgccagactcgtccaactcttcaccatactctcatccgccttgacctcaagcacccatgacgaccaagcgatcaccgtcaccgatcgataacgcggccaagaagctcaagccgagttctgcaagtcaaccggcggacttcaatcctcacctgtttgacccggctcagacggctactctcgctaaagaatatcagtccgccggaccgtacaaacactcggtcgtcgagtctctcttttcggatgatctcctcaaacaggtcctgactgaagtcaactctaaggatgatggaggagaaggaggactgggtggtttagttggctggggaatgaaggagaccgatatctacaaggttcgcacgtctccatccgaatcacctatactctcactctttccgggctttgcatattgaaatctaagctattgccctttataaaccgtcagatcaaccaatccttcgatctctcttctctttctcccgaacaccttcctcaagaacggctggacaagcttcctgcgctctgccaacttaaggaggccctgtactcgtccaagttcagaaattgggtgagagaagtcactgggtgcgggccactgtctcagaagaaggtggacggaagcaccacccggtataccaaggggtcagtctcaaattgaatttccatcttgaaaagacatccattatctgttcactgtctaaccgagtcgcttgcgagcttgccttcacagatgtcacttgctcttgcacgacgacgtgatctcaactcgacgaatctcctggatcttgtatcttccttcctcggcgtggcccacctcttatggcggtgcgctcgagctttacccggcgcttcctactccggacgtcccgttctcacccgaaaatccgcccaagacttggagagaggaaactgggtcggatgttttccctacgaaggtgattcccccaaagtggggtcaattcgtgttcttcgaggttcagcccggaaagagttatcattcggtcgaggaagtcgttgctcctgaaggcgtcgtcagacagagtatttcaggatggtggattagttctttcttaattactttctcttgagacacttgtcatcgtttgtaaagagtagaagactaatgctgggaacgtgatcatgtctttaggttccataagcctattgagggtgaagagggctacgaaggacccgaacaagaaggtctagcttcttctctccaacagattgtatgtatcatgttggacatcaaccgattgaggaagataggcgccaaaccattattgacactgacttcacaaaatgatcaatccattcctcttggtcttactcgaaataaattacaaataaacagacccagtcgcccctctcctctgtcttgacaccttacccagaggactctgaagtacctttgcccggaactcctcttacccctgacgaaatcactttcctcaagccttacttccatcctcagtaccttcaaagatcaacactctcgcttctctctcagcaatttggtgaacagtctttccttcttctcgaaaagtttttgcacccaactctggccaaagaactcgagggtctcatcgccgcccgagacaaagccgatgggcttgatctcgctagtcggcaaggcggacttgttccctctatggcggtaggggaaggtgtcgaaggctggcacgtcgtcggcccctcgacgaggcaacgtttcctctcactcgacgagccggaaggagccacctcattcgatcctacgggcagtccatcgagttctcccagtccgctcttgtcaacattattgacgactgtgttgcctagtcaagcgttcagaacttggttggcgctcatcaccggctttgttcctgtggctagacgactggaagctagaaggttcaggcctgggttggactacacactggctagaggagaggacgaggaggttaggctagactttagactaggcctgacccccggagagaagtgggaggacaaggaaggaggcgaagaatggggcgggtgggaggtcagtcccctcttgtaggttttgatgatcaaatctgatactgaacgcttcaaacatggccctcttcttgtctttacaggcttacctcgcccctccggacgatgatgatgacccagctgtttatcaatcgtccaaagcacaggccgcacagcatagccatgccgacggagaagaatgctcacacgaccactcgaaagatggagagaccaatggtgatgcggccgaggatgaggaagatgacgacgaagacgatggacctctattaacttctcaaccatcattcaactcggtcatgatcgttatgagagatgcaaaggtcatgaagtttactgtacgtcttcctaatctcactttccttgtatacctgaagtttgatcggtgaggatgctcgaactgactctccacaaaatctgtttttactgactggcttcttcagaaatacctcagcgccgctgccccaggttgccggtgggatatcggtggggagtgggaaattggtgctgtcgaggctgagagtgatgacgaggatggagaaggcgaagaagcttcctcgcaggacgcttaaccgcgatagataaaataaaagttttcatatttctcgttctggttctgtttcttccactcaacttatgatatcatcaaacagacagaaatcgcatacaagcttcaagaagacagaaagagatcacaaaaagaacaccgaatgacactgtttcttgctcatcccctccttcgctcttcctctagagctctttcaacgcacagccgtaccaatttatctatgccaggcgaccactcgtttacctctacaatctcccttgccgtcctctccgcgcgaatccggtcaagagttggtggccacgcagctagaagtcgagtgacgtagccctctttaatagaccgtgtcaggttatccatcaatgttccaatccgatcctgtcgagttgaaatgttaccaagatgttaatccggacaagggtgctaggagcttgcgcacgagatataacggactgaccaatacaaacgcgatatgggggggctcgtcctctctctctttttcttcctttccatccgcagatcgcatcaagacggcatggacgatgttagatcgaagtttcttcagttgaggggctagaaaggcgtgaaccattgcagtctatcgagcaccacgggtcagcacatgttggtcgttgagccaagagcctagataacaaacaactgacatccacagacatgcccacgaacaggttggctacaattctttcatggagctcgtctcgaagtccggccatgacttcttccaagagagtctgtactttaaactattacatgcatgtgagtatccggcagatactctgtatcagcctacagcatacagctcattacggtatcgatgcaagaaatattcaaaacgcacctcaatcattcgttccagctcttcatcaagagtgacacgcttctcctcgaccgaacaaattcttttctctactaagtcatcttcctcttctttgagaacagattccgtcagtttccgctcatagagtttgttcttagcctggcttttctcccccactttctctccgtcctcattctcatccacatcgtccgatctcttcccttcatgcatgaccttttcctcatcactaagatcaggttccctgtccttccaatacgcttcctggactttatcttgacactgaataatcaacatgtcttcagcgtcatccgccaacggatcgtcgcttccacaaaagctggtttggctaatcgttcgcctcataggcgacaatgtccatcttcttcctttgctctgtttctctttggatgattcctcagaagccgtcactcgaggtctcttcattggcgatgagtatgagtgtgtgggtacatcatcagcgcttgctcgtggtttaggagctggaagcaagggaacgactgtaggaaccacagcgatcgaggtagctcgacgggtcgagtgttgtttgggtcggacaccagttctaccgacggagactgaggagtgtcgtgaaccgggagaagagggcatgtcgctaagtaaaagaggatcctgctcgattttcaaataagaagacattgcggttgtttgaagaaccaaggacgcagagatgtatgtttcactatcttataggggaggaagttgacaggatacgtttgacagatttaggtcgttgaagctgtcagcatttactcagaacactgccaagtgcgcccaaccacgagattctcctttcaagagtcaagacaagaaagcatatattcatcggtgggtatatggaatggcaagataggggtaagctcaaaggacgagctgaagatagaaagtcagtctcagctcaaacaaccagaggctaaggatgggtcagagacttcgccaaaaattaggcagtagcagcgatggcagcctgcatggaaacacatcatatgttagctatagatacaagttaaagatttgcttaataggaatactgacctgagcgtcagcagacaggtggaagaaaccacaggtgttgaggagagcctcgacgctgacatcagcatcgacgtaaacggcagcctcgagagaggcgacgacatcaacaacggccgtggtggatttcgggacccagtatccacactatatccaacaacaaaataggaaaagaatcaacattcgcgctcaagaagcagataaaaagggcacgactaaccttgcccttcttggtgagatcagcaggccgagaagcaatgactccagaggcgacagcggcgacagtagcatcaatgtcaacaaagagatcgacaacgacgtcgagaccaagctacaaaacgatcgcaatggtcagctgtagaacgataaacagaaagatgaagaagtcgagacgtacgtggacatatccttgaacggataggtaggcatcgacggccgtcttgtcgttgatccagacgccggtggtagggtgccagtaaccaaactcgtaagcaggaggggccttccaccccttggtggggcacgtgtagtggagcgagtgatccttctttcgggaaagaccgctgacagcaagctcagctgcgacggtagcagagacctagagtaaacaaatacggccatgatcaactcatgaatgcctataaatgcgtctgggaaaggagctaaataggcttacatcgacgttggctttggcactcaaaagaccaagggcctggagagtggcagacacttcagcgtcgaggttgagatcgagaagatcacggttgtggtaggaggaggactaccaagaggaaacatcggaatgtgtgtcaggacgagatattatcatttgaatttggccagcaaagtgaacgtaccgcagatcgatcggagccagtaagactgacgacatcaccaaggatgctggcggatcctgacttggagctcgaggaagagtgggcgtcgtacctggcaaccatgccttcggcgttctcctgtgaaatgagagatgttgttcaagtcagaacgttcgagacgggcacacgaggaaagcggaaggaacaactcaccgagacaggggcagcctgaacggcagaagcgaaaagagcgagaccgagagagatggcggagaaggcaagcatgttgatattactcacaaatatggctgttgtcgaagttgttgacgggtggtagcttgttgttggctgggctgaagaaaaagttgaagcgagtgtgggaagtttagttagagaacgtgaagaacgaaagtagaagaaaaaaaagagagaggtcgaggtcgaaggcgaggaaaggttgttgatgaagaaagaatgagagagtggaaagaggacgaagaacgcaagactttataggacttttccttctttcccaaagaacatgttctgacaagcaaagacgtcagcaagcataaacagacataacaacaaccggggttgtttgcaaatatatcagtcgaggtgagaggaactgagctgaacgaggaacgttgtgttcccctcaccaaccaaaaccggcctggaccacacaagaccgaccttgagggtaaaggtccaagggtcagtcagttcccgttaacgggatcacatcctttgcgctcgatcaagtggaaacagatggatcaggtccggtcagtgtacggtcagcaaacatcgcgttgatggtgagtggtcaatcatcagttgccagttgttagtggtcagtcgttagtggtcagtcagatacagatgtatacgatgattcccttgaggatagaggagtatgcaagtcaacagacagacagacagataaacggacgtcagttagaatgaagactagggggtgatgtaatacgattatgtaagcaagattctaccacgtccagcgcctaacttgtgcccatcatcacccacctcccaccttccacctcccgtcacccatcctctgtctcgtcgcctctactctagtcatacaaccatcatcaaacaccatgcagacaacaatctcgcccatcaacagccagccagtgaaggagcttctgttgctttctcactcggaggtatgtcggttgtcggctcttctgcccctcgttacggtccttatatcttatcaggcacattttgatttgtaactaacatccttatttatcctctcactctatttctcatcaggtcaactctgcggtggaggcttcgatcaatgctcagaagtcatggaagaaggttcctttggacgagcgaattgccatctgtgaaaagttcttggttagcattccctgggttatccgactgaatcttgctcttctgagtctatcacagatcagatttaaccgatcgcatactctttatctaggtcgaactaaacaagctcaaagacgagatagcgtctgaattaactcaagagatgggccggtgagctctcgaatcgtcatcctcgataaacataatccgatgtgattcttaccatcatccttttgcgcagacctatccgatataccgccggggaagtcgcgggtgctatcggccgagccgaacacttgatctctatcgcccgagattccttggctgatgtgccagccgaacaaaaggacggattcacccgatacatcaaaaagaccccgcttggggtcgttcttgttatcgcaccctggaactatccttacctgtgcatgatcaactcggtcgtccctgccatcctcgctggtgagtcggcgctttctttctttgtttactggccttaacgtattaattcggcaacatccttgacacatatcccccacaggaaacactctacttcttaaaccttctcctcagactccttcttcagctcttcgacttcagcaggcgttccaagcggcttcgcttccagaggatgttatccagactctcgttctctcccaagacgacaccttgtcattagtttcagacggaagaatcggtttcgtcgcattcaccggatccgttgctggcggtaagggagtcgataaagctgctgccaacggacagggcttcaagggggtcggtttggagctcggaggaaaggatccggcttatgttagaaaggacgctgacttagcgtacacagtggaaaacctggtcgacggagcctactttaattctggacagtcatgttgctctgtagagcgaatttacgttcacgaatctctcttcgatacgttcgttgaaaagttcgtcgagaccaccaaggcttatgttgttggtgacccgacctcgtccgagacccagattggtcccgtcatctcgcttgcctcggccaagcgaatccaggctcagatcgatgaagccgtacaggctggcgccaagtcgctcattccccgagagcatttcaagtcagtcaaagagggcacgacctacgtccccccgcaggtgcttgtcgatgtctcacacgatatgaaggtcatgaccgaagagacctttggacctgtagtgggcatcatgaaagttcgtcatcattcatggatctcattgacccaagggcagctgctcctctttgatacacgcattgacattcgattctgttgaaataggtctcctcggatgaggaagctttgaagttgatgaatgactcaccttacggactcacggcgtccatttggacaaacgccgatgagcccagctctgtcaaggcttttgagacttttgttgaagacctagagagtacgtcgttttacctgtctcatgatgtctgcgcatcaagatcaaataaccaagctgatgggtcctgtgttgatgtctcaccttgtgtattcaccacgtacatcagctggaacggtcttcttgaacagatgcgatgttctcgacccggcgcttccttggacaggagtcaaagacaccggccgaggcgtctctctcagtggtttcggtaggcgtcatcccgattcttttctttcctcttctctttttgagggattattcacacgtagagattgactgacacttttcatgatggttctgctctcaggttttgaccagctcgttcgactcaagagcgtgcacatgaagaccaagatctagaacgccagataagcagaaaggaaaagatatcatatagacgattaatcatcaccatggccgatcaaagaaacgagagttgagttcggggttgggatgtatacaatgcatttccataatcaagttaggaagcctttatacacagaaggatcgtacataagtctttgtggtgcaaactcagttctttctcctttcagttcgctaccggcacaacccttctcgtctgcttttcgctcctctaagttctccgtgaagacttttgtttacattggcatatataaaaggaaacatcgctgccaaaaagcgtacagtagaacgtgaaaggaagttgagaaggaaaaggtctttttgttattattttatccgatttaatcctgtttacacaaagaaaatcacaagagatgagtacacgaagcgcttaatcaaggatataagacgacgaggagaaacgctgaggaaaagaatggacaaataacgactgacccagagtttcatcgtaccatcccaagaagcggtgatcaacttgctggattcatgaggtaaccagaggtgagagatcaccacttgtttatgagctctcaatcgtttcatcaactttccggtcttccagtcccagaagaccaggtttccttcagaatctcccgatgagatatctgtcaattgagaaagagggatagaaacatggagcgaaaataagggaaggggaggtgatcagattcgatgggtatagcgaatacagcgaaggatcacttacatcgaccatcaggggagaatccgacgccacaggcgtatccagcgatcgtatgcccagcaaagcgctattcccagagaaaatgaggaacaagggcaaagataagtgtcgacccagctttggacatccagaaagaatatttcaagttagatgaaagctggcgaaaagattagcgacgtaccttctttctgttttgtctgaatccatcagtcgagtagaccaagatctggttatccaagctctgagccgccaaccatttacctatttcattcgtttggatagtcagtgaggaacgtaagatcagtcatctatgctacatagatcaggataagaaaacagacacgcactattagggtgtaaagcgacagctggcatagaatgcatatcgggctccgctatcagcttgatcaccacagggatatcgtagtccctggatttttattcggttcgttgcgatagagaagatggaaggtcagctccgaagaaacaaatcgatcatggatgacaaattggggacgagacaggacaaataggcaaacgcaccaagctcgcattgacttatcgtccgatgtagtgacaaatcgtctgttctcatcaacgaacgtaatcgtgttgaccggtccgagatgttgatcgtactcctgagtgatagtatccgagttgatgtcgtactgtaaagatgccgtttcgatacatatataaagtcagacgtgcaaatctctgaagaaagcactgatagacgcgaaaacaagaaagaaaagtaagagaacgaatcgaacctgaatgattttcttgtcctgcataccagcgaggaagatgtgctgtttatcggcatctgggtgaaacgttaccacatgcggtcgttttccgttcgagaatgccttgatacattgtccggtctcagtatcccaaagtttcatctgcttgtcgtaagatgccgtgaggaatcttgatccgtcgttattgaaagcaacatccttgatggcttgagaatgacccataaatgtccgaagacagtttccatcgttgtaaacatcccaaagctatatcaaaaattcccaaaagttgatgatgatcagaaagagaggcatatgcatggcgcataggcataaataagaggagcgaggcgacgtagggtaagagcatataagaaaaagaccataccttgactttggagtccatacttccactcaataacaggtgaccagacccagggaatagtttcatactggccactcccttggtgtgtccggtgaaggtgtgaatgcattccttcgggaggaacgagtctaccggaggtgcgtccgcagaaagagagattcctttgtccgttgggacgtgcatgtacgttcgaccagcgtagtcggtgagcgatttgcctgtgaaagacgtacaaaagagccaacaaggatagatcatattaggatgttactgctcagcaaagtaccctgaaggggaaggagacgtaccatggaagattgatttttcctcgcctgcgccctttcgcttttcttttgcgctgcttgcagcctcttcccgtctcttcttctcctctcgccactcttttgcctcttcctccttctcttcatccacggctgcgtccccatcccaagtggcccacggtcccttgtaggcgtcttcaccatcgacgacggacaagtctcctttagcctgcctctttcgcttgaaatcctttttggccgctttcgtggctcgatgagaatcggccgtttggaaatcaagagcgatagcagaagcgatgttaccaatgatgggttgagcggtggagttaatggcggaagggttgtgagcgtagccgtggatcgcgaatgttcgttgttgggagtggaacgcgtgagcatccatcttttgctcctcgacatgacctgattaatgaagcaagcgaagatgttccgatgtgagcatgaggagcgatacacttttagaaaagcaagagcggaacgaaccggcgatagagttcattcctttgattcgagtgtcccaaggattctgagggccgaccactggtcgagacatctagagacgagtgaacagaagattgtaacgtatttgaactgttggtctgcccgttcgagtgtcaaggaagatgagagaagagactcacgtcagaatacgggatattgacgttcatcaccttatcggttggccgagtgatcaacgaagtttgcttattggggtcctgatcgatgtcgttttacacaagatgtcgatgttccatataaacgtgtcgaggcgcgtgaaggtacgtagtcggcagagaaatcatcagaacatactccttggtgccaaaccagataacgaaaagcaaaaaaggctgcgaaagaacaaacctcggcaaggacatcgggagcaacctgaatggtatcctttttgaaaccaggtagaacagaaggagcggtcgaagaagtaagagcagaaagattgaaggcgtctgattcgacctggctatcgctcagaggcttaacgacggaggctgtgctgctgttctgatcctcatcgtcatctgagctatactgaacgaggagagaggccatgatgggacgaatacacggctgctgatgatggtagttgctcggatggttgctaacatggctgggatgatggcctttggtgttggcaaaaggaggcgtaaccatgtgcgtaaccaccgcccatggtgacgaccgcttggccgtaaccactgccttggtgatcaccttctgctgatgtcgatttcatcatcaaacgaccatcttcagccatcatgggttccatcgccggtctcatcatcctttcggcctcgtccaggtaagtcagtagggtagctggatagatgtgtgatggaccaggttgttctgttgttgttgttggctgaatcatcccatcgtattctcttgatctttgccaggcaacctatcatctcgactccgttcaggccgccgtcccgacaatatgtatatacccatacctttctctctgctctcgacgcggctagcgattcaagcagcatatccagaggcccggcttctcctacagctcaattggaccctgttttgtgggtggacgagacagcaggtgtctgctgttggctgcagaaaggtggtctctggtttctgatatgcatcgacaaggagggtgagttggttggttcttcgatatcctgttgtcgctgtcaccggacgactctggcgctgaatttgagatctggaaaatattcgtttgtggttacctttagacaacccgctgataggttttaggttcttggaagtgttcctttcaattctagaaggatacataggcgacgtcagtcgatttctcaattgtaacagcggtatgcttgctagacaaagaactgacttgatcgatccgaacgcaaacggatacaaacaaacgaaaagatctccgaatcgcatctgaagagttgttttgacattgtctatcaagtaagcgcgtccatcgctattcacatttgaccgtcgttctgctgacattaacctcgaattgtcacgcatcgacagctactggaagagatgctggatgaaggctatcctcagacaaccgaagcaaacattctacgagaccttgtccttcctccctctttactctccaaagttttagatgttgccggcgtatcagggttagttatactctcgacctcagcgtcgtgtctacgcgtggactacaacgaaaatcaacagtcaacaatccagatggctaatctccaaacttactttttgattcatgtattgaaacggtggctacatgcagcttggggccaccatcgacacatgttccattttcgagctcaatcccatggagacggtcagacgtgaagcatagtagcaatgaaatattctttgattttgtagaatccgtccaaagcacagtcgatcggtaggtctgaattgtaaactctatcatagccttggacccatagctgaatgttgcgcttcacaccattcctccttgatatatcagccgtgggaatacaaagcggatgactcgatctggccgggttgattgtaatgcgcgactatcgggtacaccagatctcattctgacgttgacaaatccgtcagctgtctcaacaccagccttccatccctgcgttcggtaagttcattcttacactccgttcttttcttttctccttgaaatgtatcgttttaacgtgccctcctcattcatcgtgcctcaacagtctggccagatacttgaaagaccaggccttgtcctttgtaccaccggacggcatgttcaaattgatggattatataatcagccgtcctagtcatccctcggattcatcagctgtagggaatagaggagaggacaatgaaacaggagttcggttcgtgactaaggtgaaactctcagagcgaggtggtatgtagtttctcctcaacttatactccttagcgtccgtaactcaccttaaatccggtctatcattatccggaatttttttgttttactaggaaccttctctttgacagtccttccgacacatctatctagaccaatcgaaggcgccgtcgtcaaatggttcttgggacatgacgttgcgctggagaaagtctcagctacgctcagtcctggaggttcgaacgaggctgaagtaggcaggtgggaagtcgacgggatcgagaaggtctgtctaatctgttctcatctctctctttctttctcttcttccacttatatacttggagaatcgttggaggactaacctttcgtcatcctttgggattaaaagacattaatctggaaactcccgacgttaaatcctcgttcaaccgctcgtaacctctctggatcgtttgtcacctcgtacgtctctccttctctccttgttgtagacagaactgatcttttcatattaaatctttgcaaaccttcatgtgtctcatctcgctctttgtcaggtcgactgaaccactacctgatcctacgatccatttatcgtacacaatacatcaagcatccatctctcaagtccgtatcgcccaactcaaagtctctaatctcggcggaccaggtggtaaagggggacaacaacagccgaaagtatttagaggcgtaagagggagggttgaagcgcttgttgaagcacgctggtagacgatcatctcaagaagggtatccatattcgtcatatttcaataaaaaaaccatgcatcgggttttagggcatttaactgtgtgaaaacaaataacaataatacgagttcaagacgctttgttcaatggtatatttatgtcaagtatacggaaaggaaaggaaatcagaaggaggtcgtaaacagaatattgaaaaaagaccaaagcgagagcgtcaaatgatgaggggagatacaaagaaagatttgaaccatataaggaaaaagagtgtaagtgtatgagaaatctataatttaaggtctacgagttttggattgagaatcacaaaaattcacatcgttcatggaggttgaattcgatctgtaagaacgagaagcaagatattcatatctcatgaactagagaaaagatttaaactaaaagaaataagcatactcacgggcttgaaggtggtaggtttctatcaaacacactcatgctaaccaaactctcgctactcaatgtcaatctttccgcccaaccacctggagatgaacctctcctttcaatatctcctatcaaccagtcatcttctccatcatcctgagcttctcgtaaatcggcattgctaccggcaaatccgtgtgaaagggtgtaactagattgtctacttagaggcgataacgtgggggatatgggagagtttagaccgaaaggttggagttgttggggtgagggagtgtcaaagggatcgatctcaagatcgggtgaagaggttgctcctgttgaatcgagcacaatcaatggaatatctaagtaatacccggtattagttgctgatctacgttttgaaaaacgatagaggtcgaaagacagagatcgacctaccagatctgctttgcttctgaagagccaatttagtttccttctgatactgcaggtaccgccttctagtttgaattgcgaggaagagagatcgaattcgttcggtacttagagattcagtgactttgcgcacatgttttcttctacggacaagttcgtccaccctggtaaacgttaccaaccaaaagaatatggtggtaagtaaatacttcagggatccctgtcgatattcttccatgtgcttacagaagtgcatgctcgtcgtcgatcagtttgtagtgggacaaaagaataagcatattggcgaaagagattcccttcccagcttcttcggaaattatagcctcgtggtacaaccgaacattcaatgctttcctctgtctgacctgagtgaagtcaatcttggacaagaggactcgcaaagctcggacatcgattgtgtgaaatttaccgatgatgatatctgattcaagcgtatcagctgtcggttggcaaagtggaagcaaattggtaacggaagcttctcgcggatacgtccgaacctgtcaagcagagcagaagaagccacatctgagtcctctattcaacgaacactcagtgatgtcatcgggttagattcttacctcaaatactccagacaatttggcaaagaacggaataaattgctcttttatgatgtaacccgttctgtttggatcgaatagggcccatgcttttttgaatgcacctgatagatgttgcgaagttgtgttttcttttagccatcgagatcgaaaggcgatgagaagaaagaactaacggatttcctctcgatttaaagacgcctttcctggaacctggaatacatatgagaagctctcgacgacgatacctattcgacgatacaagactcagtatgaccacccacagacgagaacatacgtgtatttctaacaaactcaccagtgaacatgttgacaaacaaatacatggagattacgttccaagcaataaagattcctgtgcacaaaatgtcgacagatgtcaataaaagaacaagtgaaggatttgatactacattggtaatgaatagaaactcaccgtaagaccatgctgtgcttccacagtctgtgtcgaggtaattctcattttcaacgcatctcggatagttcaaagcataatcgtgcatgaacctatgatgaagactcaacaggtagatgttagtgttttgtttgtatcttgagatttggcgaagtgaagagttttttacccattccatccctcgcctgtactcatgaatgctaacatgaccacactgtttccaaaatcccggaagttggcgttttgtgtctcaccattcgaccacttggtgagactaaaaacttcgagtgtaacgatggagaagaacacgaagaaacaaaaccagagtaggaagagatttccgatagctggtgcgctcactctatgatagtttgtcagataaatataagaggcaagaagccagtttgttcatgctgtgcaccactacattgagaagaagagaactcacatggcagttttgaataactggtttaaactgctacttgtttgaacaagcttcaaaattataagaatcaggaaagccttttggatttggcctgagtaagtccatcccgaaggactactgaagatggaaccagcagtcgttgcaaatgttccgcagacggtaaccatgtcaaaaatggacctagaaaaacaatcgagatgaagttagaagccgtttcgttaat
